United States Patent Application Publication US 2024/0327476 A1 - sequence listing, part 62

SEQ ID NO: 117279 - DNA, 2991 bp, synthetic construct
  misc_feature 1..2991: note = Description of Artificial Sequence: Synthetic coding sequence
  source 1..2991: mol_type = other DNA
atgccggcgctggcccgagacggaggccagcttcctctcctggttgtgttctccgcaatgatcttcggaaccattactaatcaggacctgcccgtgatcaaatgtgtgctgatcaaccataagaacaacgatagctcagtgggaaagagcagctcttatcccatggtgagtgaaagccctgaagatctcggctgcgctctgcggcctcagtcgtctggcacagtgtacgaggcagccgccgtcgaagttgatgtgtcagcatctattactttacaggtccttgtcgatgcacccggaaacatctcgtgcctctgggtctttaagcatagtagtcttaattgccaaccccattttgatctgcagaacaggggagtggttagcatggtgatcctgaaaatgactgaaacacaagctggcgaatatctgttgtttatccaatccgaagccactaactacaccattctcttcaccgtctccatccgcaacaccctgttatataccctcagacggccgtatttccgcaagatggaaaaccaagacgcactcgtctgtatttccgagtctgtcccagagccaattgtcgagtgggtactgtgcgactcacagggtgagagttgcaaggaagagtcccctgctgtggtgaagaaggaggagaaagtgcttcatgaactcttcggcaccgatattaggtgctgcgcacgcaacgaactaggaagagaatgtaccaggctcttcacgatcgacttaaaccaaacaccccaaaccaccctcccccagcttttcctgaaagttggggagcctttgtggataagatgcaaagccgtccatgtgaatcatggctttgggttgacctgggaacttgaaaataaagcactggaagaggggaactattttgagatgtcaacatattctactaaccgaaccatgattaggatactgtttgccttcgttagctcagtggcaaggaatgacactgggtactatacttgctcgtcctcaaaacacccttcgcaatcggccctggtgacgattgttgagaagggattcatcaacgctacaaactcgagtgaagactacgagattgaccagtatgaggaattttgtttctccgtgcggtttaaagcctatcctcagattagatgcacctggactttctctaggaagtcgtttccatgcgaacagaaagggctggacaacggttactctatatctaagttctgcaaccacaagcaccagcccggagaatacatctttcatgcagagaacgacgatgctcagtttaccaagatgttcacactgaacatcagaaggaagccgcaggtgctggcagaggctagcgctagtcaggcctcttgtttctctgatggctatcccctgcccagctggacctggaagaaatgcagtgataagagtccgaattgcacagaggaaatcaccgaaggggtgtggaataggaaggccaaccgaaaagtgtttggtcagtgggtgtcttcctccactctgaacatgtctgaggctatcaagggatttctggtgaagtgttgcgcttataacagcttgggaactagctgtgagacaatactattaaattcacctgggccttttccgttcatccaggacaacatctccttctatgctactattggtgtttgtttactgttcattgtggtgctgacactgctgatatgtcataagtacaaaaagcagttccgttacgagtcccaacttcagatggtgcaggtcaccggttctagcgacaatgaatatttctacgtcgacttccgggaatacgaatatgacctgaaatgggaattccccagagagaacctggagttcgggaaggtattaggatcaggcgcttttggcaaggtgatgaacgctactgcttacggcatctccaaaaccggcgtgtcaattcaggtggcagtaaaaatgcttaaggaaaaagcggatagctccgaacgggaagctttaatgagcgagctaaagatgatgactcagctaggaagccatgagaacatcgtgaacttgctgggtgcctgtacactcagtgggcccatttacttaatttttgagtattgctgctatggcgatctgctaaattatctgaggtccaaaagggagaagtttcaccggacatggacagaaatttttaaagaacacaactttagcttctatccaacgtttcagtcccatcccaatagtagcatgccagggtcgcgtgaagtgcagatccaccccgattctgaccaaatcagcggactgcatggaaactccttccattccgaggacgaaatcgagtacgaaaaccagaaacggctcgaagaagaggaggatcttaatgtgctgacattcgaggacctcctttgtttcgcttatcaggtagccaagggcatggaatttctagaattcaaaagttgcgtgcaccgtgatttggccgcacgcaatgtgctggtaactcacggcaaggtggtcaaaatctgtgattttgggctggcgcgagatattatgagtgattccaattacgtggtccgcgggaatgtgaggctggctcgacttcctgttaaatggatggcccctgaaagcctgtttgagggtatctacaccattaaatctgatgtgtggtcctacgggatcctcctttgggagattttctctctgggtgtgaatccatacccgggcattcctgttgacgcaaacttttataagctgatacaaaatggttttaaaatggaccagcctttctatgccacggaagaaatttatatcattatgcagtcgtgttgggcctttgactctcggaaacggccttcctttccaaatctaacttcttttcttggctgtcaactggccgatgccgaggaggctatgtaccaaaatgtggacgggcgagtaagcgaatgtcctcacacctaccaaaatagacgaccattcagcagggagatggatcttggactgctgagtcctcaggcacaagttgaggattcatag

SEQ ID NO: 117280 - DNA, 2859 bp, synthetic construct
  misc_feature 1..2859: note = Description of Artificial Sequence: Synthetic coding sequence
  source 1..2859: mol_type = other DNA
atgcccgccctcgcacgcgatggaggccagctacctctgctagtggtgttctcagcaatgatatttgggaccattaccaaccaggacctccctgtgatcaaatgcgtgctgatcaaccacaagaataatgactcgagcgtgggaaaatctagttcatatcccatggtttcggagtcacccgaggatctgggttgtgcactaaggccacagagcagtggaaccgtgtatgaagcggccgccgtggaggtcgacgtgtccgcttcaattacgctgcaagtgcttgtggatgcacccgggaatatcagctgtctctgggtttttaaacactccagcttgaactgccaaccccacttcgatctacagaaccgaggggtagtttccatggtaatcctcaagatgacggaaactcaagcgggcgagtacctgctgtttattcaatctgaggccaccaactacaccatcctttttacggtcagcattagaaataccctgctctacaccctgcgacggccatactttcgcaagatggagaatcaggatgccctcgtctgcatctcggagtctgtacccgagccaattgtggaatgggtattatgcgattcccagggcgaaagctgcaaagaagaaagccctgcagtggtaaaaaaggaggagaaagtgttgcacgaactgttcggtaccgatattcggtgctgtgcgcggaatgagctgggacgagagtgcacccgcctgtttaccatcgatctgaatcagacacctcagacgacgctgcctcaactgtttctgaaggttggcgagcctctctggattcgatgcaaggctgtgcacgttaaccacggtttcggtcttacatgggagctggagaacaaggctctggaggaaggcaattattttgagatgagcacctactctaccaatcgtaccatgatcaggatactgtttgctttcgtatcgtccgtagccaggaacgacaccgggtattacacctgctcctcttctaaacatccctcccagagcgcactggttaccatcgtggaaaagggctttattaatgccaccaattcctctgaagattatgagattgaccagtatgaggaattttgtttcagcgtccgtttcaaagcctatccgcagattcgctgcacttggaccttctcgagaaagtcatttccctgcgagcagaagggtctggacaatggatacagcatcagtaagttctgtaatcataagcaccagccaggcgaatacatctttcatgccgagaatgacgatgcccagttcacaaagatgtttacactgaacatacgaaggaagccccaggttttggctgaggctagcgccagccaggccagttgcttcagcgatggctatcctctgcctagctggacctggaaaaaatgctcagacaaatctccaaactgcaccgaggagattacagagggggtgtggaatcggaaagccaatcggaaagtcttcgggcagtgggtttcatcttccactcttaatatgagcgaagccatcaagggtttcctggtgaagtgttgcgcttacaattcactgggaaccagttgcgagacaatcctcctaaacagtcctggaccctttccctttatacaggataatattagtttctacgctacaataggagtctgtttgctcttcattgtcgtgctgaccctgctcatttgccacaaatacaaaaagcaatttaggtatgaatcccaattacaaatggtccaggtgaccgggagctctgataacgagtacttctacgttgactttagggagtacgagtacgacctgaagtgggagtttcctcgggagaacctggagttcggcaaggtcctgggcagtggggcctttggcaaagtgatgaacgcaactgcatacggaatttcaaaaacaggagttagtattcaggtggccgtcaagatgctaaaggaaaaggccgattctagcgaaagagaggctctcatgagcgaactgaagatgatgacacagttgggttcacacgagaacatcgtgaatctccttggggcctgcacactgtccggtccgatatacctgatttttgagtactgctgttacggcgacttgctgaactacctcagatctaaacgggagaaattccaccgaacatggacagagatctttaaggagcacaacttttcgttttaccccacttttcagtcccatcccaacagctcaatgccaggttcgagagaagtgcaaatccatcctgattcagatcagatctctggtctgcacggcaatagcttccatagcgaagatgagattgagtatgagaaccagaagcgcctggaggaagaggaggatctgaatgtgctcactttcgaggatctgctgtgttttgcgtatcaggtagccaaaggcatggaatttctcgaattcaaatcggcgcgcctaccggtgaaatggatggcaccggagtctctcttcgagggaatctacacaatcaagagcgacgtgtggagttacggaattctgctgtgggagatttttagcctgggcgtcaacccttatcccgggattccagtcgacgcaaacttctacaagctcattcagaatgggttcaaaatggatcagcccttctacgccaccgaagaaatttacataattatgcagtcctgctgggcttttgacagtcgcaaacgtccctccttccctaatctgacttctttcttaggctgccaattggctgacgccgaagaagcgatgtaccaaaacgtggatggtcgcgtctctgaatgtccccatacctaccagaaccggaggccctttagccgcgaaatggacctgggcctgctctccccacaggctcaggtggaggattcttag

SEQ ID NO: 117281 - DNA, 2253 bp, synthetic construct
  misc_feature 1..2253: note = Description of Artificial Sequence: Synthetic coding sequence
  source 1..2253: mol_type = other DNA
atgtggaatctgctgcatgaaactgatagtgccgttgcgacagccaggagacctcgctggctgtgcgcaggggcactggtgctggccggcgggttttttctgctggggtttctttttggctggtttataaagagttccaacgaagccacaaatattactcctaaacataacatgaaagcctttttagacgaattgaaggccgagaacattaagaaatttctctacaatttcacacagataccccatctagctggaaccgagcagaacttccaattggcaaagcagattcagtcccagtggaaagagtttggactcgactccgtggagctcgctcactacgacgtgcttctgtcctaccctaataagacccatcccaactatatttctatcatcaatgaggacggcaacgaaatctttaacaccagcctgttcgagcctccaccacctggatatgagaacgtatcggacattgtgccaccattctctgcatttagcccacagggaatgcccgagggagaccttgtatatgtcaactatgctcggactgaggacttcttcaaattggagagggacatgaagattaattgctcagggaagatcgtgattgccaggtatggaaaagtttttaggggcaacaaagtcaaaaacgctcaactggctggagccaaaggggtaattctctacagtgacccagccgactatttcgcccccggggtgaaatcttaccccgacgggtggaacctcccagggggcggtgttcagcggggaaatatcctgaacctcaatggcgccggggaccctttaacacccggatatccagcaaatgaatatgcttatcgcaggggaattgccgaggcagttgggctaccttcaatcccagtgcacccaattggttactatgacgctcagaaactccttgagaagatgggggggagcgccccaccggactcatcttggaggggatccttgaaggttccctacaacgttgggccagggtttacaggcaatttttcgactcagaaggtcaaaatgcatatccattcaacgaacgaagtgacccggatttataacgtgatagggacactgcgcggtgcagttgagcccgatagatatgtcatactgggtggccatagagatagttgggtgttcggaggcatcgatccacagtccggtgcggccgtggtccacgaaatagtccgaagtttcggcaccttaaagaaggagggttggaggcctagaagaaccattctgttcgcctcctgggatgccgaggagttcggcctcctcggttccaccgagtgggccgaggaaaattccaggttgctccaggaacgaggagtcgcatatatcaatgcggattcttctatagaaggtaattacactctaagggtggactgtacccccctgatgtactccctggtgcataaccttacgaaggaattgaaaagtcccgatgaaggttttgaaggaaagtccttgtatgaaagttggaccaagaagtccccatcgccagaattttctggaatgcccagaatctccaagctcgggagcggcaatgatttcgaagtgtttttccagcgactgggaatagccagtggacgcgctaggtacaccaaaaattgggagaccaacaaattctccgggtacccgctgtaccactccgtgtacgagacctacgagctggtggagaagttctatgaccccatgtttaagtatcaccttaccgtggcacaggtgcgtggggggatggttttcgagcttgcaaatagcatcgtactgcccttcgactgcagagactatgctgtggtcttgcgcaaatacgccgacaaaatctattctatttccatgaagcatccacaagaaatgaaaacttacagtgtctcttttgactcactgttttcagcagtgaagaattttaccgagatcgcaagtaaatttagcgagagactgcaggacttcgataagtccaaccccatcgttctcagaatgatgaacgaccagcttatgtttttagaacgagcttttatcgatcccctagggctgccagaccgacctttttaccgtcacgtgatatacgccccaagctctcacaataagtatgccggcgaatccttcccaggcatttatgacgctctgttcgatatagaatctaaagtggacccttctaaagcctggggtgaggtaaagagacaaatctacgtcgctgcctttacggtgcaggccgcagcggaaacactgtccgaggtagcatag

SEQ ID NO: 117282 - DNA, 2208 bp, synthetic construct
  misc_feature 1..2208: note = Description of Artificial Sequence: Synthetic coding sequence
  source 1..2208: mol_type = other DNA
atgaccgcgggctctagctacccactctttcttgcggcctacgcttgtacaggctgcctagcagaacgcttaggttggtttatcaaatcatctaacgaagcaaccaacatcacacctaagcacaacatgaaggcattcctggatgaactgaaggcggagaacattaagaaattcctgtacaattttactcagataccccacctggcaggaacggaacaaaactttcagctcgctaagcaaatccagagccagtggaaggaatttggcctggattctgtcgagttggctcactatgacgtgctgctcagctaccccaacaagacccatcccaattacatctcaattatcaatgaagatgggaatgagatcttcaacacctcgctcttcgagccaccaccacctggctacgagaatgttagtgacatcgtcccaccattttcagccttcagtcctcaaggcatgccagagggcgatctggtgtatgtgaattatgcaagaactgaagactttttcaagctagagagagatatgaaaatcaactgttcaggcaaaatcgttatagcgaggtacgggaaggtgttccgcggtaataaggtgaagaatgctcagctggccggagccaaaggtgttatcctatacagtgacccggccgattacttcgcccctggcgtgaagagttatcccgatggctggaaccttccaggagggggagtgcaacggggaaacatcctgaatctaaatggcgccggcgatcctttaacacctgggtacccggcaaatgaatatgcttacagacggggaattgctgaggcggttggactgccatcgattcccgtgcaccccattggatattacgatgcccagaagctgctggaaaaaatggggggctcagcacctcctgattcctcctggagaggctcactgaaagtgccctataatgtgggccccggctttaccggtaacttctccacacagaaggtcaagatgcatatccattctactaatgaagtcactcgtatctataacgtcattggcaccctgcgaggcgctgtggagcctgatagatacgttatcctgggcggccacagagatagctgggtgtttggggggatcgatccgcagtcaggggcagcggtggtccacgagattgtgagaagctttggtaccctcaaaaaggaaggctggaggccccgacggacaatcttatttgcatcctgggacgccgaggaatttggactcctgggcagtaccgagtgggccgaagaaaacagtcgcctgctgcaggagagaggtgtagcctatatcaacgcggactcgagtatcgagggtaattacaccttacgtgtcgactgtacgccattgatgtattccctagttcataatttaaccaaggagctgaaatcacccgatgaaggcttcgaagggaagtcgctctatgagtcttggaccaagaaaagtcccagccccgaattttctggtatgccgaggatcagcaaactcgggtctgggaacgatttcgaggtgtttttccagcgcctggggatcgcctcagggagggcgcggtacacaaaaaattgggagaccaacaaattcagtggttaccccctgtaccatagcgtctacgagacttacgagttggtggagaaattctatgatcccatgttcaaatatcacctcaccgtggcccaggttagaggcgggatggtctttgagctcgcaaactctatagtactcccatttgactgccgggactacgccgtggtcctccggaagtacgcagacaaaatatactcaatttcgatgaaacatccccaggaaatgaaaacatacagcgtctccttcgactccctattttcagctgtcaaaaatttcaccgaaatcgcaagtaagttcagcgaaagattgcaggatttcgacaagtctaaccctatcgttctgcggatgatgaacgatcagctcatgtttctggagcgagcttttatcgaccctttggggttacccgatagacctttttataggcatgtaatctatgctcccagctcacacaataaatatgctggggaaagttttcctggtatctatgatgctctgttcgatatcgagtctaaggtagacccttctaaggcttggggagaggttaagcggcagatctacgtggcggcattcactgtccaggccgctgcggaaaccttgtcggaggtggcttag

SEQ ID NO: 117283 - DNA, 1329 bp, synthetic construct
  misc_feature 1..1329: note = Description of Artificial Sequence: Synthetic coding sequence
  source 1..1329: mol_type = other DNA
atggggggctcggcccccccagattcaagctggaggggatctctgaaagtgccttacaacgtgggtcctgggttcaccggtaatttttctactcagaaagtcaagatgcatatccatagtaccaacgaagtaacaaggatctataacgtcattgggactttgcgcggagcagtcgagcctgaccgctatgtgattctgggcggccaccgcgactcatgggtcttcggagggatcgacccacagtcaggggccgccgtcgtacatgaaatcgtaagaagtttcggcactctcaagaaggaaggctggagaccccggcggactatcctttttgcttcctgggatgctgaggagtttgggttactggggtctacggagtgggccgaggaaaactcccggctgctgcaagaacgcggggtcgcctacattaatgccgacagcagcattgaaggcaattatacattgcgtgtagattgcaccccactgatgtatagcctggtacataacctaactaaggagctcaagtctccagatgagggcttcgaagggaaatccctatacgaaagctggacgaagaaatccccctccccagagttctctggcatgccacgcatcagcaagctcggatccgggaatgatttcgaggtattctttcagcgcctgggcatcgcttcgggcagggccagatataccaaaaactgggagaccaataaatttagcggctacccactctatcattccgtgtatgagacatatgagctcgtggagaaattttacgatcctatgttcaagtaccacctgacggtagcacaagttcgcggtgggatggtgttcgagctggcgaattctattgtgctgcctttcgactgcagggattacgcagtggttctgcggaagtacgcagacaagatctactctatcagcatgaaacacccacaagagatgaagacttactctgtgtcatttgactctctgttctccgctgtgaaaaactttaccgagatcgcgtccaagttctccgagaggctgcaggattttgataaatctaatcctattgtgttaagaatgatgaatgaccagctaatgttccttgaacgcgcattcattgatccccttggcctacctgatagacctttctaccggcacgtgatttacgcaccatcttcacacaataagtatgccggagaatcatttcccgggatctatgacgcgctgttcgacattgagagcaaggtcgatcctagcaaggcctggggagaggtcaaacgccaaatctatgtggctgcctttaccgtccaagctgctgcggagaccctcagcgaggtggcctag

SEQ ID NO: 117284 - DNA, 2160 bp, synthetic construct
  misc_feature 1..2160: note = Description of Artificial Sequence: Synthetic coding sequence
  source 1..2160: mol_type = other DNA
atgtggaacctcctacacgagactgactcagccgttgccacagctcgccgaccacgctggctgtgtgctggtgctttggtgctggccgggggattcttcctcttgggctttcttttcgggtggtttattaagtcctccaacgaggcaactaacataactccaaaacacaatatgaaagcatttctggacgagctgaaggctgagaatatcaaaaaatttctgtataacttcactcagatcccacacttggccggaacggaacagaacttccagttggcgaagcaaatccagtctcaatggaaggaatttggcctcgacagtgtggagctggcacactatgacgtgctgctgtcttaccctaataaaacccaccccaattacattagcatcattaacgaggatggtaacgaaatttttaataccagcttgttcgaacccccaccaccggggtatgagaatgttagcgacattgttccccccttctcagctttctcccctcaggggatgcctgagggagatttagtgtatgtgaattatgctaggactgaagatttctttaaacttgaaagggacatgaagattaactgcagtgggaaaattgttattgccaggtatggtaaggtcttccgaggcaataaggtcaaaaatgcccagctggccggtgccaaaggagtgatattgtattccgatccggctgattatttcgccccaggagtgaagtcttaccctgatggttggaatttgcccggaggcggtgtacagcggggaaatatcctcaatctgaatggcgcaggcgatccactgacaccaggatatccagccaatgaatacgcctaccgcaggggaattgctgaggctgtcggcctccccagcatacccgtgcatccaatagggtactacgatgcccagaagctgctggagaaaatgggaggcagcgcaccacccgacagctcctggcgaggaagcctgaaggttccctacaacgtgggaccaggcttcacaggaaactttagtacccaaaaggtcaaaatgcacatccacagtacaaacgaggtcacaaggatttacaatgtgattgggactttgcgcggcgcggttgaaccggacaggtatgtgattcttggcggacatagggattcctgggtgttcggcggaattgatcctcagagtggtgctgccgtcgtgcatgaaatagtgagatctttcggtacactgaagaaggagggctggcgcccccgccgaaccattctctttgcatcatgggacgccgaagagttcggactcctgggatcaaccgaatgggctgaggagaactcacgccttctccaggaaaggggcgttgcctatatcaacgctgacagcagtatagaaggcaactatacccttcgggtcgattgtaccccactgatgtatagtcttgttcataacttgaccaaggagctaaaatccccagatgagggatttgaggggaaatctctgtacgagtcatggacaaaaaaatctcccagtccagaattctctggcatgcccagaatcagtaagcttggatccggaaatgatttcgaggtgttcttccagaggctgggcatcgcgtccggccgcgctcgctataccaagaattgggaaacaaacaaattctccgggtaccctttataccatagcgtgtacgagacatacgagcttgtggagaaattttacgacccaatgtttaagtaccacttaacagtggcacaggtgaggggtggaatggtcttcgaattagcaaactccattgtgctcccatttgattgcagggattatgccgtagttctgcggaagtacgctgataagatctatagcattagtatgaaacacccacaggaaatgaagacgtatagcgtttcctttgactcattgttctccgctgtgaagaacttcacagagatagcctccaagtttagcgaacgcctgcaggattttgacaagagcaagcatgtcatttacgctccttcctctcacaacaaatacgccggtgagtcgtttcccgggatctacgacgcgctattcgatattgaatctaaagttgatcccagcaaggcctggggagaggtgaagcggcagatttacgtggccgcattcactgtccaggccgcagccgaaacattaagtgaagtcgcatag

SEQ ID NO: 117285 - DNA, 1638 bp, synthetic construct
  misc_feature 1..1638: note = Description of Artificial Sequence: Synthetic coding sequence
  source 1..1638: mol_type = other DNA
atgtggaacctgctccacgaaacagatagtgcggtggccacagcgcgtagaccccgttggctctgtgctggcgctctggtcctcgcagggggcttcttcctcctagggtttcttttcggctggttcatcaaaagctcaaatgaggccactaacatcacaccgaagcacaacatgaaagccttcttggatgaacttaaggctgaaaatataaaaaagttcctgtacaactttacccagatcccccatttagccggtaccgagcagaactttcagctagcaaagcagatccagtcccagtggaaagaatttggtctcgactcagtggagctggctcattacgatgtgctgctaagctatcccaataagactcaccctaactatatatcaatcattaacgaggacggcaacgagatctttaatacgagtcttttcgagccccccccacccggatacgaaaatgtgagtgacatcgttccacctttttcagctttttctcctcagggaatgccggagggcgacctcgtttacgtcaactatgcccggacagaggacttttttaagctggagcgggacatgaaaatcaactgttcaggcaaaattgtcatcgcacgctatggcaaggtgtttaggggaaataaggtgaagaacgctcagctggccggcgctaagggggtgattttgtatagtgatccggccgactacttcgctccgggagtgaaatcgtaccctgatggatggaatctacctgggggaggcgttcagcgtggaaatatattgaatttgaacggggctggggaccctttgactccaggctatcccgctaacgaatacgcttatcgccgagggattgccgaggctgtgggactgccaagtattcctgttcaccctattgggtattacgacgcccagaaactacttgaaaaaatgggagggtctgctcccccagacagcagttggagagggtccctcaaggtcccttataatgtgggcccaggcttcacagggaacttctcaactcagaaagtcaaaatgcacatccacagcaccaatgaagtgacccgcatatacaacgtcatcggcaccctgcgtggagctgtggagcccgacagatacgtgattctgggcggacatagggactcatgggtgttcggggggattgacccccagtccggcgcagccgtcgtccacgaaatcgtccgctcattcggaactctgaagaaagaagatatattagggtggagaccccgccgtactattctgttcgcttcgtgggatgcggaggaatttgggttactgggatcaacggaatgggcagaggagaatagtagactgcttcaagagcgcggcgtggcttacatcaatgcagactctagtattgaaggtaactatacacttcgtgtggactgcacgcctctcatgtactctctggtacacaacctcacaaaggagctgaaaagcccggatgagggttttgaggggaagagtctctacgagtcttggactaagaagtccccctcacccgagttctccggaatgccccgaatcagtaagttaggctccgggaatgatttcgaagttttcttccagcggctgggtattgcgtccggacgggcccgttatacaaaaaagaaaaagtag

SEQ ID NO: 117286 - DNA, 2115 bp, synthetic construct
  misc_feature 1..2115: note = Description of Artificial Sequence: Synthetic coding sequence
  source 1..2115: mol_type = other DNA
atgacggccggatctagttatccactttttctagcggcctatgcctgcactggctgtcttgccgaaaggcttggctggttcatcaaatcgtccaacgaagctaccaacattactccaaaacacaacatgaaggcgttcctggatgaactgaaggcagaaaatatcaaaaagttcctctacaactttactcagatccctcacctcgcgggcaccgagcagaatttccaactggcgaagcagattcagagtcagtggaaggagtttggacttgacagcgtggaattggcacactatgatgttttgcttagttacccgaacaagacacatccgaattacatcagtataataaatgaggatggcaacgagatatttaacacttccttgtttgaacctccccccccaggttacgagaatgtttccgatattgttccccccttcagcgcattttcaccacagggcatgcctgaaggagaccttgtgtacgtcaactacgcccgtactgaggacttctttaaactggagagggatatgaagatcaactgctcaggaaagattgtaatcgcgcgatacggcaaagtgttccgaggaaataaagtgaaaaatgcccagctcgcaggtgctaaaggcgtgatcctgtatagcgatccagctgactactttgctccgggcgttaagagctatccagatggatggaacctccctgggggcggcgttcaaagaggtaatatactaaatctgaacggcgctggggaccctctgaccccaggctatccagctaatgaatacgcctatagaagggggatagccgaagcagtggggctgccttccattccggttcacccgatcggatactacgatgcacaaaagttacttgagaagatggggggctctgctccacctgatagctcctggagggggagcctgaaagtgccctataatgttggcccagggttcacaggaaacttcagtacacagaaggttaaaatgcacatccatagcactaacgaagtgacgagaatttacaatgtgataggtacactgaggggggcagtggaaccggaccgctacgttattctgggagggcatcgcgatagctgggtcttcggcggtatagacccacagagtggagctgccgttgttcacgaaattgtgaggagtttcgggactctcaaaaaagagggttggcgacctcgacgaactatcctctttgcttcctgggacgccgaagaatttggcctactgggatctaccgagtgggccgaagagaatagtcggctgcttcaggagagaggagtggcctatattaacgccgatagttctatcgaaggcaattacacactgcgggtagactgtacccccctgatgtactctctagtgcataaccttaccaaagagttgaagagccccgacgaaggattcgaaggcaaaagcttatacgagagctggacaaagaaatcacccagccccgagtttagtggaatgccacggatatctaaactcggcagcggcaacgattttgaggtgttcttccaacgtctgggaatcgccagtgggagggcacgctacaccaagaattgggaaacaaacaaattctctggctatccactgtaccactctgtttatgaaacatacgaactcgttgaaaagttctacgaccccatgtttaagtaccacctgacagtcgcccaggtccgggggggtatggttttcgaacttgccaactctatcgtgcttccctttgattgtcgagattacgctgtcgtgctgaggaaatacgctgataagatctacagcatcagcatgaagcatccacaggagatgaagacgtattctgtgagcttcgacagcttgttctcagccgtgaagaacttcaccgaaattgcgtccaagttcagcgagagactgcaggattttgataagtccaagcacgttatttacgccccctcgagtcataataagtacgccggcgagtcctttccagggatatatgatgctctgttcgatatcgaatccaaggttgatccatccaaggcgtggggagaagtcaaaagacaaatctacgtggcggcatttaccgtgcaggctgcagccgaaacattgtcggaggtagcttag

SEQ ID NO: 117287 - DNA, 774 bp, synthetic construct
  misc_feature 1..774: note = Description of Artificial Sequence: Synthetic coding sequence
  source 1..774: mol_type = other DNA
atggctcagcggatgactactcagctgctgctcctcctggtgtgggtagctgtcgtgggggaggcacagacccgcatcgcctgggcgcgcaccgagttgcttaacgtgtgtatgaatgcaaaacaccacaaagaaaagcctggtcccgaagacaagctgcatgaacaatgtcggccgtggagaaagaatgcctgctgctctacgaacactagccaggaggctcataaagatgtttcatatctatatcgattcaactggaatcactgcggtgaaatggccccggcctgtaaacgccacttcattcaggacacgtgcttatacgagtgttcgcctaatctaggaccctggattcagcaggtcgatcagtcttggcggaaggagagagttctgaacgtgcccctatgtaaggaggactgcgagcaatggtgggaagactgtcgcaccagctatacatgcaagtctaactggcataaggggtggaattggaccagcggctttaataaatgcgctgtgggcgctgcttgtcaaccgttccacttctatttcccaacccctaccgtgctctgcaacgaaatatggactcacagctacaaagtgtccaattattctagaggcagcggacgttgtattcaaatgtggtttgaccccgcccaaggcaaccccaacgaggaagttgcccgattctacgctgccgcgatgtccggggcaggcccctgggcagcgtggcccttccttctatcattggctttaatgctgctgtggctgctctcctag

SEQ ID NO: 117288 - DNA, 774 bp, synthetic construct
  misc_feature 1..774: note = Description of Artificial Sequence: Synthetic coding sequence
  source 1..774: mol_type = other DNA
atggcccagaggatgaccactcagctcctgttactgctggtatgggttgctgtcgtgggagaagcacagacccgtatcgcatgggctagaaccgagttgctgaacgtctgtatgaacgcaaaacatcacaaggagaagcccgggcctgaggataaattgcacgagcaatgcaggccctggagaaaaaacgcttgttgtagcactaatacgtcacaggaagcacataaagacgtgtcttacctgtaccgtttcaattggaaccactgcggtgagatggcacctgcgtgtaaacgacactttatacaagacacctgtctgtacgagtgttcaccaaatctagggccctggatccagcaggtagatcagagctggaggaaggagagggttctcaatgtgccactctgtaaggaagattgcgagcagtggtgggaggattgccggacatcgtatacttgcaagtctaactggcacaagggatggaactggacctccgggtttaacaaatgcgcggtgggggcggcctgccagccttttcacttctactttccgacaccaactgttctgtgcaatgaaatctggacgcactcttataaagtgtccaattacagccggggctctgggcgatgcatccagatgtggtttgatcctgcacagggtaaccctaacgaagaagtggcccggttctatgcagcagctatgtccggagcgggcccatgggccgcgtggccgtttctgctctctctcgctctgatgctcctctggcttttgtcatag

SEQ ID NO: 117289 - DNA, 774 bp, synthetic construct
  misc_feature 1..774: note = Description of Artificial Sequence: Synthetic coding sequence
  source 1..774: mol_type = other DNA
atggcacagcggatgactacgcagttgctactactgcttgtgtgggtggcagtggtcggagaagctcagactcgtattgcttgggccaggaccgaactgctcaacgtgtgcatgaatgccaagcatcataaagagaagcctggcccggaagataagctgcatgagcagtgcaggccttggagaaaaaacgcttgctgctctacaaatacctctcaggaggctcataaggacgtgtcctacctctatcggtttaattggaatcactgtggcgaaatggccccagcatgcaaacggcatttcatacaggacacctgcttgtatgagtgctcacccaatctcggcccttggattcagcaggtggaccagagttggaggaaggagcgggtgctcaacgtgccactgtgtaaagaggattgtgagcagtggtgggaggactgccgaacctcctatacctgtaagtctaactggcacaagggctggaactggacttccggttttaataagtgcgctgtaggcgcagcatgccagccatttcacttctatttccctacacccacagtgttatgtaacgaaatatggacacactcctacaaggtatcaaattactcccgcggcagcgggaggtgcatccagatgtggttcgacccagcacaaggaaatcctaacgaggaggttgcccgcttctatgctgcagctatgtctggagctggaccctgggccgcatggccttttctcctctccctcgctctgatgcttctctggctgctctcctag

SEQ ID NO: 117290 - DNA, 774 bp, synthetic construct
  misc_feature 1..774: note = Description of Artificial Sequence: Synthetic coding sequence
  source 1..774: mol_type = other DNA
atggctcagcgcatgacgacacagcttctgctgctcctcgtgtgggtggccgtggttggcgaggctcaaacccgcattgcatgggcccgcaccgaactgttaaacgtgtgtatgaatgcaaagcatcataaggaaaaacctgggccagaagataagctgcatgagcagtgccgcccttggcggaagaatgcgtgctgcagtaccaacacttctcaagaggcacataaggacgtgagctacctctatcgttttaattggaatcactgcggggaaatggccccggcttgcaaacgccactttattcaggatacatgtctctatgagtgctctcccaatctcggcccttggattcagcaggtggaccaatcatggagaaaagaacgggtgctcaatgtgccgttgtgcaaagaagactgcgaacagtggtgggaagactgccggacttcctacacatgtaagagcaattggcataagggttggaactggacaagcggctttaataagtgtgccgtcggcgccgcgtgccaaccatttcacttttacttccccacaccgacggtgctgtgcaacgagatttggacgcactcatacaaagtctcaaactactcacgaggtagtggtaggtgcattcaaatgtggttcgatcctgcccagggcaaccctaatgaggaagtggctaggttctacgctgctgcgatgtccggtgctggaccctgggcggcctggccctttctgcttagcctcgcccttatgcttctgtggctgctcagctag

SEQ ID NO: 117291 - DNA, 768 bp, synthetic construct
  misc_feature 1..768: note = Description of Artificial Sequence: Synthetic coding sequence
  source 1..768: mol_type = other DNA
atggtgtggaaatggatgccattactgttactattggtgtgcgtggcaacaatgtgctccgcccaggatcgcactgatctgcttaatgtctgtatggatgccaaacaccataagacaaaacctgggccagaagacaagttgcacgaccaatgcagtccctggaaaaagaacgcctgctgcaccgcttctacatctcaggagcttcataaagatacaagtcgactctacaatttcaattgggaccactgcggcaaaatggaacctgcctgcaagagacatttcatacaggacacgtgcctgtacgagtgttctccaaatctagggccttggattcagcaggtgaaccaaagctggaggaaagaaaggttcctggatgtcccattatgtaaagaagattgccaaaggtggtgggaagattgtcacacttcccacacgtgcaagagtaattggcaccgagggtgggattggacttctggagtgaacaaatgtccggccggagcactctgtcgaacattcgaatcatattttcccaccccggccgccctctgtgaggggctttggagccactcatataaagtctctaactacagtcggggaagtggacggtgcatccagatgtggtttgatagtgctcagggaaaccctaacgaggaagttgccaggttttacgcagctgctatgcatgtgaacgcaggcgaaatgctgcacgggacagggggcctgctactgtccctggcacttatgctccaactctggctgctggggtag

SEQ ID NO: 117292 - DNA, 729 bp, synthetic construct
  misc_feature 1..729: note = Description of Artificial Sequence: Synthetic coding sequence
  source 1..729: mol_type = other DNA
atgctgccagccgcaaccgaggtccagctgcgcctccaaggccaaaaagacatggtgtggaagtggatgcccctactcctgcttctcgtgtgcgtcgctacaatgtgcagcgcccaggatagaaccgacctgctcaacgtgtgcatggacgccaaacatcacaagacaaagccgggaccggaagataaactgcatgaccagtgcagtccttggaaaaaaaacgcctgttgcaccgcttctacgagtcaggaattgcacaaagacacatccagactctacaactttaattgggaccactgcggcaagatggagcccgcttgcgcaacatctagcaggactccagtatccatgagcgcccaccctggggctctggaccctgccggcgaatccgaactcgccaaaaatgcaagctggatgtgtccttatgcaaagcggaccgtgagcgccggaggcaggattgtgactccacccacaagagccagagctacgggtacggaggatggaactgggccccaagaactgaccagcgcccaactgggacttagtgccgcgccattatcccccacaagccccctgcagctccccttcgttaaagcatctggcgtgacccacactcgaagcgcaactaccgcggagggggccgctgccgctagcagatgtgggttgattcagcctagggcaacaccaacacggaaatggcgtggttctatgctgcagccttgtatgtag

SEQ ID NO: 117293 - DNA, 516 bp, synthetic construct
  misc_feature 1..516: note = Description of Artificial Sequence: Synthetic coding sequence
  source 1..516: mol_type = other DNA
atggtgtggaaatggatgcctctcctactgcttctggtctgtgtggccaccatgtgctcggcacaggacagaactgatttactgaacgtgtgcatggatgcaaaacaccataagacgaaacctggccctgaagacaaacttcatgaccagtgtagcccttggaaaaagaacgcctgctgcaccgccagcaccagtcaagaactgcacaaggacacttctcgcctgtacaacttcaattgggaccattgcggcaaaatggagccagcttgcaagaggcatttcatccaagatacctgtctgtacgaatgtagtcctaaccttggtccctggatccagcaggtgaatcagtcctggcggaaggaacgattccttgatgtgccattatgcaaagaagactgccagagatggtgggaggactgtcataccagccacacctgtaaatccaattggcaccgtggatgggactggacatctggggtgaataaatgtcctgcaggagccctgtgcagaacatag

SEQ ID NO: 117294 - DNA, 2010 bp, synthetic construct
  misc_feature 1..2010: note = Description of Artificial Sequence: Synthetic coding sequence
  source 1..2010: mol_type = other DNA
atggcactgcttctggtaagcttactggctttcttgagcctaggatctggttgtcaccatcggatctgccactgcagtaaccgcgtgtttctttgtcaggagtccaaagttacagagattccgtcagacctgccccgcaatgcgatcgagctgcggtttgttctgaccaaactgcgggttatccagaaaggcgctttttcaggatttggcgatctggagaaaatcgagatcagccaaaacgatgtgcttgaagtgatcgaggcagacgtgtttagcaaccttccaaagctgcacgaaatcaggattgaaaaggctaataacctgttgtatataaaccctgaagctttccagaacttgcctaacttgcagtacctcctgatatcaaataccggtattaagcacctgccggacgtacataaaattcattcgctacaaaaggtgctgctgtggttgaacaagaatggaattcaggagattcacaactgcgcatttaatggtacccaactcgatgaactgaatttgagcgataataacaacctagaagagctccccaatgatgtatttcacggcgccagtggcccggttatattggatatttcccggacaaggatccatagcctgcctagctacgggcttgaaaacttgaagaaactacgggcgcgtagcacctacaatctgaagaagttgcccacccttgagaaattggtcgctttgatggaagccagcctgacctacccaagtcactgctgcgcttttgcgaattggcgacgtcagatcagtgaactgcacccaatctgcaacaagtcgatactccgccaagaggttgattacatgactcaggctaggggccagcggtcaagcttagcggaggataacgagagttcctactcacgcggattcgacatgacctacaccgagtttgattatgatctctgcaacgaggtggtggacgtgacctgctcccccaagcctgacgccttcaacccttgtgaggacatcatggggtataacatcctgcgagtactgatctggtttatatccatattggcaattaccggcaatataatcgttctagtaatccttacaacatctcagtataaactgacagtcccgcgcttccttatgtgtaacctggctttcgctgatctctgtatcggaatttatctcctgctgatagcctcagtcgatatccacacaaagagccagtaccacaattacgctatagattggcagacgggagcaggctgcgacgctgccggcttttttacagtcttcgcgtcagaactgagcgtgtacaccctgacagcaatcaccctggaaagatggcatacaatcacacatgccatgcagctggattgcaaggtgcagttgaggcatgcagcttccgtgatggtcatgggttggatctttgccttcgcagcagctttatttcccatctttggcatctcatcatatatgaaggtgtctatctgtctgcccatggacatagactcacccttgtcccagctttacgtgatgtcactgctggtcctcaacgtgctcgccttcgtggtgatttgcggatgttacatccatatatatctcaccgtgagaaatccgaatattgtgtctagctcctcagacacacgaatcgctaaaagaatggctatgctgatattcacggacttcctctgcatggctcctataagctttttcgcgatctccgcaagcctaaaggtgcccttgattacagtgagtaaggctaagatcctgttagttttgtttcaccccatcaattcttgcgccaacccatttctgtacgctattttcactaagaatttcagacgcgattttttcatcctcctgagcaagtgtggctgttatgagatgcaggcccaaatttataggacagaaacttcatcaacagtccataacacccacccgcgaaatggccattgttcgagtgcccctcgcgtaactagcggtagcacgtacatactcgtgcccctctcgcacctggctcagaattag

SEQ ID NO: 117295 - DNA, 1902 bp, synthetic construct
  misc_feature 1..1902: note = Description of Artificial Sequence: Synthetic coding sequence
  source 1..1902: mol_type = other DNA
atggcccttctgctggtcagtctgcttgcctttctgagtctgggctctggctgccaccacagaatttgtcattgctctaaccgagtgttcctttgccaggaatcaaaagtgactgaaatccctagtgatctgcccagaaatgcaattgagctacggttcgttctgaccaaattgcgcgtcatccagaagggtgccttttccgggttcggtgacctggaaaagattgagatttcacagaatgacgtgctcgaggtgatagaggccgacgtctttagcaatcttcccaagcttcacgaaattcgcattgaaaaggccaataatcttttgtacattaatcccgaagcctttcagaatctgcccaacctacaataccttctcatcagcaacaccggcatcaagcatctgcccgacgtgcataaaattcactcattacaaaaagtgctactggatatccaggacaatatcaatatccacaccattgagcgaaattcctttgtcggcctttccttcgaaagcgttattctatggctaaacaagaacggcattcaagaaatccacaattgtgctttcaatggaacccagctggacgagctgaatctgtcggataataataacttggaagaactgcctaatgacgtttttcacggagcctccggccccgtgattttgtcagagttacatccaatctgcaacaagagtattctcagacaggaagtcgactacatgacccaagcacggggccagcgatctagtctcgctgaagacaatgagtcctcgtactcccggggattcgatatgacatacactgaatttgactacgatttgtgcaatgaggtggtggacgtcacctgcagtccgaagcctgatgctttcaacccctgcgaagatattatggggtataacatcctacgtgttctgatttggtttattagtatcttggccattaccggcaacatcattgtcctcgtaatcctcactacttcccagtacaaactaacagtgccccggttcctgatgtgcaatttggctttcgccgatttatgtatcggcatctacctcttgttaattgcgagtgtggacatccatacaaaatcccaatatcacaattatgctatcgactggcagactggcgctggatgcgatgctgccggcttctttacggtatttgcttccgagctctcagtctacacattgactgccattaccctagaacgttggcacacaattacacacgccatgcagttggactgtaaggttcagctgcgacatgccgcttccgtgatggtcatgggatggatttttgccttcgcagccgccctatttcccattttcggaatttccagttacatgaaggtttccatctgtctcccgatggatattgactctcccctgagtcaactgtatgtcatgagcctcctggttcttaacgttcttgctttcgttgtaatttgcggatgttacattcatatatacctcactgttcgtaatcccaatatcgtgtcttcgagctctgacactcgcatcgcaaagcgaatggccatgctgatcttcactgattttttatgtatggctccaataagctttttcgccatctctgcaagtctgaaggtgccattgataacagtctcaaaggccaagattttgttggtcctgtttcaccccatcaacagttgcgccaacccgttcctgtacgcgattttcaccaagaactttagaagggattttttcatcctgctgagcaaatgcggctgttacgaaatgcaggcccagatctatcgcacagagacatcgtcgacagtgcataatactcaccccagaaacgggcattgcagctcagcccccagggtcactagcggctcaacttacattctcgtgcctttatcccacctcgcacagaattag

SEQ ID NO: 117296 - DNA, 2088 bp, synthetic construct
  misc_feature 1..2088: note = Description of Artificial Sequence: Synthetic coding sequence
  source 1..2088: mol_type = other DNA
atggctctcctgctggtatcccttttggcttttctttccctgggtagcggctgccaccacagaatatgccattgctccaacagggtgttcctgtgtcaggagtcaaaagtgacggagattccttctgatctgccgagaaatgccatcgaactgcgcttcgttcttacgaagctgcgcgtcattcagaaaggagcatttagcgggtttggagaccttgagaagatcgagatctcccagaatgatgtgctggaggtcattgaagctgacgtattcagcaatctcccaaagctacatgagatccgaatcgagaaagcaaacaatctcctgtacatcaaccctgaagcatttcagaacctgccaaacctccaatatctattaatttcaaataccggtattaagcatttgccagatgttcacaaaattcatagcttgcaaaaagtgttattggacatacaggataacataaatatccacactattgagcgaaattcatttgtcggtctctcttttgagagcgtcatcttgtggttaaataagaatggtatccaggagattcacaattgcgcttttaacggaactcagttggacgagcttaatttaagcgataacaataatctggaggaactgccaaatgatgtctttcatggcgcttcggggcccgtaatcctcgacatttctagaactagaattcactctctcccttcttatggactagagaatctaaagaaactgcgcgctcgaagcacgtacaatctcaaaaaactcccaaccctcgaaaagctcgttgcattaatggaggcttcactgacatacccctcccactgctgtgcctttgcgaactggcgtcggcagatctcagaactccaccccatttgtaacaagagcattctgaggcaagaggtcgactatatgacacaggccaggggtcagcgaagctctcttgccgaagacaacgagagttcatactctaggggctttgatatgacctacacagagttcgattatgacctttgtaatgaggtggttgatgtgacctgctccccaaaaccagacgccttcaatccctgtgaggacataatgggctataacatactcagggttctgatatggtttatttccattctcgcgataactgggaacataatcgtcctggtaatccttacaaccagccagtataagctcactgtgcctcgattcctcatgtgcaaccttgctttcgctgatctctgcatcgggatctacctcctgctcatagctagcgtcgatattcacacaaagtcccagtaccataattacgctatcgactggcagactggcgctggatgcgatgctgctggtttcttcactgtgttcgctagtgaacttagcgtctacacactgacggccatcaccctggaaagatggcacacaatcacccatgcaatgcagttggactgtaaggtgcagttgcggcatgccgcctccgtcatggtgatggggtggatcttcgctttcgccgcggccctcttccctatcttcggcataagctcgtatatgaaggtttcaatctgtcttcccatggatattgacagtccactgtctcagctgtatgtaatgtctctccttgtgctgaatgtgttggcatttgttgtgatctgcggttgttacatccacatatatttgaccgtcaggaacccaaatatcgtttccagctctagtgacaccaggattgctaagcgcatggcgatgctgattttcacggattttttatgcatggccccgataagctttttcgcgatcagcgccagcctgaaagtgccactcattaccgtttcaaaagctaaaatcttactggtgctctttcatcctatcaattcatgtgctaacccctttctctacgccatcttcaccaagaacttccgaagagatttcttcatcctcctgagcaaatgtggctgttacgagatgcaagcccagatttacagaacggagaccagttccactgtgcacaatacacacccccgcaatggacattgttctagcgctccccgggtgacttccggctccacttacatcctcgtccctttgtcacacttagcgcagaactag

SEQ ID NO: 117297 - DNA, 1296 bp, synthetic construct
  misc_feature 1..1296: note = Description of Artificial Sequence: Synthetic coding sequence
  source 1..1296: mol_type = other DNA
atggaggcctcactcacatacccttcccattgctgcgcttttgcgaactggcgccgtcaaatcagcgagttgcaccctatttgcaacaagagtatcctccgacaggaggtggattatatgacgcaggcacgcggtcagagatctagcctggccgaggataacgagtcatcatactctagaggatttgacatgacttacaccgagttcgattacgacctgtgcaacgaagtggtggacgttacctgtagtcctaagcccgacgcctttaacccatgcgaggacattatggggtacaacatcttgcgcgtgctgatttggttcatcagcattcttgcaataaccgggaatattatagtcctggtgatcctcactactagccagtataagttgactgtacctcgatttttgatgtgtaacctggcatttgctgacctatgtataggcatttacctgctgctgatagcttctgtggatatccatactaagtcccagtatcacaactacgcaatagattggcagaccggcgctggatgcgatgccgcaggattcttcacagtgtttgcctccgaactgtctgtttatacactgacggccattactttggagagatggcacaccatcacccatgccatgcagctggattgcaaggtgcaactgcgccacgccgctagtgttatggttatggggtggatcttcgcattcgctgctgccctgtttccaatatttggaatatcatcatacatgaaggtgtccatatgtctcccaatggacatcgactcacccctgagccagctgtacgtcatgagcttgctcgtcctcaatgtactggctttcgtagtaatatgcggatgttacatccatatctatcttacagtccggaaccctaatatcgtgagcagcagctcggatactagaattgcgaaacggatggccatgctcattttcactgatttcttatgtatggccccaatttcattcttcgccatcagtgcatctcttaaagtgccactgattaccgtctctaaggcaaaaatcctactagtgctgttccaccccatcaactcatgtgccaacccttttctgtatgccatcttcacaaaaaattttaggcgcgacttcttcatcctattatccaaatgtggctgttacgaaatgcaggcccaaatttatcggactgaaacaagcagcactgtgcacaatactcacccgcgcaacggacattgctcttccgcccctcgagtgacaagcggctctacctatatcctggtgccgctctctcatctcgctcaaaactag

SEQ ID NO: 117298 - DNA, 3417 bp, synthetic construct
  misc_feature 1..3417: note = Description of Artificial Sequence: Synthetic coding sequence
  source 1..3417: mol_type = other DNA
atggcccccacactgtttcagaaactgttttccaaacgcactggtttgggagcacccgggcgcgatgcacgggatcctgactgcggtttctcttggcctctgccagagtttgatcctagtcaaatccggctaatagtctatcaggactgcgagcgtcgcggccgaaacgtactgttcgattcgagtgtgaagcggcgaaatgaggacatctccgtgtcgaagctgggtagtgatgcccaggttaaggtgtttgggaaatgctgtcagctcaagcctggcggcgatagctcctcttccttggattcttctgtcacttcctcctctgatatcaaggaccagtgcttaaagtaccaggggtcacgttgtagcagtgatgcaaacatgctcggcgagatgatgtttgggtcagtggccatgagctataaaggcagtacgttaaaaattcaccagataaggtcaccccctcagttgatgcttagtaaggttttcaccgctcgtaccggcagctcaatttgtggcagtcttaatacactgcaggactcacttgagtttatcaatcaggacaacaatacactgaaggccgacaacaataccgtcataaacggactgctaggaaatatcgtgcactcgaaccccatggacatgccaggtcgcgagcttaatgaggatcgggattcgggaatcgcacgctccgcttccctgtcaagcctcctgattaccccatttccatctcctaactccagccttacccgatcctgcgcctcttcttaccagcgaaggtggcgccgaagccaaaccacatctctcgaaaacggcgtgtttccccgctggagtattgaagagtcatttaatctgagtgacgagtcatgcgggcctaatcctgggatcgtccggaagaaaaagatcgcgataggcgtgatcttcagcctgagcaaagatgaggacgaaaacaacaaattcaatgaatttttcttcagtcacttccctcttttcgaaagccacatgaacaagcttaagtctgccatagagcaggctatgaaaatgagccgtaggtccgctgacgctagccagcgatctctggcctacaatagaatcgtcgatgccctaaacgaatttcggactaccatttgcaatctgtacacaatgcctcggattggggaacccgtgtggcttactatgatgtcagggacgccggaaaagaatcacctctgttatagatttatgaaggaattcactttcttgatggaaaacgcctccaagaatcagttccttcccgctctgattactgcagtgctgaccaaccatctagcatgggtccctacggtgatgcccaacggtcagccaccgataaagatctttttagaaaaacatagctcacaatccgtcgatatgttagctaagacacatccttataacccactctgggcccaattgggggacctgtatggtgcgattgggtctccggtccgactggcgcgaaccgtggtggtgggaaaaaggcaggacatggtgcaacggctcctatacttcctgacctactttattcggtgtagcgaattacaggagacacacttgctggagaacggagaagacgaagctattgtgatgccaggaaccgtgataactactacactcgagaaaggcgagattgaggaaagtgagtatgtgctcgtgactatgcataggaacaagagtagcttgctgttcaaggaatccgaagaaatcagaaccccgaactgtaactgcaaatattgctcacatccattactgggacaaaacgtggaaaatatatctcagcaagaacgtgaagatattcaaaatagtagcaaggaactgctcggtattagtgatgagtgtcagatgatctcacctagtgattgccaggaagagaatgctgtggacgtcaaacagtaccgggacaagttgagaacctgtttcgacgccaaattagaaactgttgtctgtacaggctcagtacccgttgataagtgcgcactctccgagagcggcctggagagtaccgaggagacatggcagtctgagaagctgttagatagcgactcccacaccgggaaagccatgaggagcaccggaatggtagtggagaaaaaacccccagataagatcgttcctgcgagtttcagctgtgaagccgcacagaccaaggtgacctttctaatcggggactcaatgtctcccgattctgacaccgaattgcggtctcaggctgtcgtggaccaaattaccaggcaccacactaagccattaaaggaggagcgcggggccatcgaccaacaccaggaaactaagcagaccacgaaggaccagagcggagaatccgatactcagaatatggtctccgaagagccctgtgaactgccttgttggaatcattcagatcccgaatccatgagcttattcgacgagtactttaacgatgatagtattgagacccgaaccattgatgatgtgccgttcaagacaagcactgatagtaaggatcactgttgcatgttggaattcagcaagattttgtgtaccaagaataataaacagaacaacgaattttgcaaatgcatcgagacagtaccacaggactcctgcaaaacttgtttcccgcagcaagaccagcgcgacacactcagtatcttggttccacacggtgataaggaatcttctgacaaaaagatagcagtgggaaccgagtgggacatcccgcgtaatgaaagttccgattccgctctcggcgattctgagtccgaagacaccggacacgatatgacacgccaggtgtcctcctactatggcggcgagcaggaggactgggccgaagaggacgaaattccctttccaggtagcaagcttattgaagtctctgcggtacagcccaacatcgctaacttcgggcggtccctcctcgggggatactgctcctcgtatgtgcccgactttgttctacaaggtatagggtctgatgaaagatttcgccagtgcctgatgagtgacctgtctcacgccgtccagcaccctgtgctggatgagcccatagcagaagcagtctgtatcatcgccgatatggataaatggacagttcaggtagcgtcctcccagcgaagagttaccgataacaaactgggaaaggaggtcctggtgagctcactggtctctaacctgctccattcgaccctgcagttgtataaacacaatttgagtccaaacttctgcgtgatgcatctcgaggatcgactccaggaactgtactttaagtccaagatgctgagtgaatacctgcgtgggcagatgagagtccatgttaaggaactaggagtggtgctgggtatcgagagttctgatctcccactgctcgctgccgtggcgtccacccatagcccatacgtggcccagatcctgctgtag

SEQ ID NO: 117299 - DNA, 3501 bp, synthetic construct
  misc_feature 1..3501: note = Description of Artificial Sequence: Synthetic coding sequence
  source 1..3501: mol_type = other DNA
atggcacccactttatttcagaagctcttttcaaaaaggaccggactgggggcgcccgggcgcgacgccagagatcctgattgtggatttagctggcccctgccagaattcgacccatctcagatccgcctgatcgtctatcaggattgcgaacggagagggcggaatgtgctctttgattcctccgtgaagagaaggaatgaagatatctcagttagcaaattggggagtgacgcgcaggtgaaggtttttggcaaatgttgtcaactgaaacctgggggggattcttctagttcactggactcttcagtaacttctagctctgatatcaaggaccaatgcctgaagtatcaagggtctaggtgtagctcagatgcgaatatgctgggcgaaatgatgtttggcagtgtagccatgtcttacaaaggctctacgctgaaaatccaccagattcgaagccctccacagttgatgctgtctaaggtcttcaccgcgcgcaccggctcatctatctgtgggagcctgaacacgctccaggatagtcttgaattcatcaaccaggacaacaacaccctgaaggccgataacaacaccgtgatcaacggacttctaggtaatatcggcctctctcagttctgtagcccaagaagggcttttagcgagcaggggcctttgagattgattaggtcagcatctttttttgccgtgcattctaacccgatggatatgcccggacgggagctaaacgaagatcgtgacagcgggatagctaggagcgccagtctcagttcactgctaatcactcccttcccctcccctaatagcagcctcaccagatcatgcgctagcagctaccagaggagatggagacgctcccagaccacgagcctggagaatggcgtattcccacgttggtcgattgaggaaagcttcaatctctccgatgagtcctgcggccctaaccccggcattgtgcggaaaaaaaaaatcgcaattggggtcatattttctcttagcaaagacgaagacgagaacaacaagttcaatgaattcttttttagccattttcccttattcgagtcccacatgaataagttgaaatcagcgatcgaacaagcaatgaaaatgtcacggaggtccgcagacgcatctcagaggtctctcgcgtacaatagaatcgtggacgcattgaacgaatttaggacaaccatctgcaacctgtacactatgccccgtatcggcgaaccagtgtggctgactatgatgtctggaacaccggagaagaatcacctgtgttaccggtttatgaaggagtttacttttctcatggaaaacgcttctaagaaccagtttctgccagccttaatcacagctgtcttgacaaatcatctggcatgggtgcccaccgtgatgcccaacggccagccccctattaaaatttttctggagaaacattcttcccagagcgtggatatgctcgcgaaaacgcacccatacaacccgctgtgggcccagctcggtgatctttatggggccatcgggtcaccagttcgccttgcacggaccgtggtggtggggaaaaggcaggacatggtacagcgcttactttactttcttacttacttcatcagatgcagcgaactgcaggagacccacctgctcgaaaatggggaagacgaagccatcgtgatgcccggaaccgtgatcactactaccctggagaaaggagaaatcgaggagtcagagtatgtccttgtcactatgcacaggaataagtcgtcattgctgttcaaggagtccgaggagatcagaacaccaaactgcaattgtaagtattgtagccacccactgttgggacagaatgttgagaatatatcacagcaggaaagggaagacatccagaattcgtctaaggagttactggggattagtgatgagtgccagatgattagcccaagtgactgccaggaggagaatgcagttgacgtgaagcagtatcgcgacaaattacggacatgcttcgatgcaaagctggagaccgtcgtgtgcactggcagcgtgcccgttgataaatgcgctctgtcggaatctggattagagtccacggaggaaacttggcaatctgaaaagctactggactctgattcgcatactggcaaagccatgcgaagcacaggaatggtggtggagaaaaagcctccagacaagatcgttcccgcctcattcagctgtgaggccgcgcagacaaaggtaacatttttgatcggagactctatgagcccagactcagataccgagttgcgaagccaagcagtggtcgatcagattacacgccaccacaccaagcccctgaaggaagaaagaggggctatagaccagcatcaggaaacgaagcagacaacaaaggatcagtccggagagagcgatacacagaatatggtgtcagaagagccttgcgagttgccttgttggaaccattccgaccctgagagtatgtctttgtttgacgagtactttaatgacgacagtattgaaacacgtacaattgacgacgttccttttaagaccagcaccgactccaaggatcactgttgcatgcttgagtttagtaagatattgtgcactaagaacaacaaacagaataatgagttttgtaagtgcatcgaaacagtccctcaggactcttgtaagacctgcttcccccagcaggatcagcgagacaccctgtctatcctcgtaccgcatggagataaagaatccagcgataaaaaaatagctgtgggaaccgagtgggatatcccccggaacgaaagctcagattccgctctgggagattcggagagtgaagatactgggcacgatatgacccgtcaagtgtcctcctactatgggggtgagcaggaggactgggccgaggaggacgagatccccttccctggctccaagctcatagaagtgtctgccgtacaacccaacattgctaacttcggcaggtcacttctgggtggttattgctcctcatatgttcccgacttcgtgcttcaaggtatcggatccgacgagcgattccggcagtgcctgatgagcgacctcagtcacgctgttcagcaccccgtgctggatgagcccatcgctgaggccgtgtgcataatcgccgatatggacaaatggaccgttcaggtcgccagctctcaacgcagggtcaccgataacaagttaggcaaagaggtccttgtgtctagcttggtgagcaacttgctacattccactcttcagctgtacaagcataacttgtcccccaacttctgtgttatgcacctcgaggatagactccaggagctttactttaaatctaaaatgctctcagagtatctgcgcggccagatgcgggtgcacgtgaaagaactgggtgtggtgctgggcatagagtcatccgacctgcccctccttgctgccgttgccagtacacatagtccctacgtcgctcagatattgttatag

SEQ ID NO: 117300 - DNA, 1527 bp, synthetic construct
  misc_feature 1..1527: note = Description of Artificial Sequence: Synthetic coding sequence
  source 1..1527: mol_type = other DNA
atggctccaacactgtttcaaaaactgttcagtaaacgcacgggactgggcgcacctggacgagacgcccgtgatccagactgtggcttttcttggccgctgcccgagttcgatcccagccagatcaggctgatcgtctaccaggactgcgaaaggaggggacgaaatgtgctgtttgatagtagtgttaagcgccggaatgaggatattagcgtgtctaaactgggttctgatgcccaggttaaggtctttgggaaatgttgtcagctgaagccaggcggagactcctcctcgtccctggattctagtgtcacatcctcctcagatatcaaggaccagtgtcttaagtaccagggctctagatgctcctcagatgccaacatgctcggcgagatgatgtttggatccgtggctatgtcctacaagggctctactcttaaaattcatcagatccgtagccctccgcagctcatgctgagcaaggtgttcacagcaaggacaggatcaagtatctgtgggtcccttaacacgctccaagacagtctcgaattcattaaccaggacaacaacactctgaaggccgataataacaccgtgatcaacgggctgctcggaaatattggcctatcgcaattttgtagcccccgacgagccttcagcgagcagggaccactaagactgataagaagcgctagctttttcgcagttcacagcaatcccatggatatgcccggtagagagttgaacgaggatcgtgacagcgggatcgcacggtctgcctccttgtcctcgctgctaatcacgcccttcccttctcccaacagtagcctgacaagaagctgtgcctctagctatcagcgccggtggcgcagaagtcagactacctccttggagaacggagtgttcccacgatggtcgattgaggaatcattcaatttgagcgatgagtcttgcggcccgaacccgggtattgtccgcaagaagaagatcgccatcggagtaatcttttcactcagcaaggatgaggatgaaaacaacaaatttaacgagtttttcttctctcatttccctttgtttgagtcacacatgaataagctgaaatctgccattgagcaagcaatgaaaatgtcacggcggtccgccgatgcttctcagaggtccctcgcatacaaccggatcgtagacgccttgaacgagttccgcacgactatttgtaacctgtacactatgcccaggatcggcgaacctgtgtggcttacaatgatgtcaggcacacccgaaaagaaccatctgtgttatcgctttatgaaggaattcacatttctgatggagaatgctagtaaaaaccagtttcttcccgctcttatcacagccgtactaacaaatcacctcgcgtgggttcccaccgttatgcctaacggtcagcctcccatcaagatcttcctagagaagcattcttcacaatctgtcgatatgctggccaaaactcatccttacaacccgctgtgggcacaactcggcatgtag

SEQ ID NO: 117301 - DNA, 2757 bp, synthetic construct
  misc_feature 1..2757: note = Description of Artificial Sequence: Synthetic coding sequence
  source 1..2757: mol_type = other DNA
atggatatgcccgggcgagagttaaatgaagatcgcgattcaggtatcgcccggagtgcaagcttgtccagtttattgattactcctttcccaagcccaaatagctcactcacgcgcagctgcgcctcaagttatcagagaagatggcgccgatctcaaaccacctctctggagaatggcgtctttcccaggtggtctatcgaagaatcctttaatttatccgatgagtcttgcgggcctaatcctggcatcgtgcggaaaaaaaagatcgctatcggtgtaatattttctctcagcaaggatgaagacgagaataataaatttaatgagttctttttctctcatttccctctgttcgagagtcacatgaataagttgaagtccgcaatcgagcaggctatgaaaatgtctaggaggtcagctgacgcctcccagaggagcctggcatacaaccgaattgtagacgcgctcaatgaatttcgaaccacaatctgtaatctgtacacgatgccacgcatcggtgagccggtgtggctgacaatgatgtccggtactcctgagaaaaatcacctttgttatcggtttatgaaagagttcacgtttctcatggaaaacgcaagcaagaaccaatttctgccagctctcattacagcagttttgacaaaccacctcgcttgggttcccacggtcatgcccaacggtcaaccccccatcaagatatttctggaaaaacatagctcccagagcgtagatatgctcgctaaaacccatccttacaatccactctgggctcagctgggagatttgtacggggctatcggcagccctgttagactggcccggacagtcgtggttgggaagcgccaagacatggtccaaagactgctgtactttctgacttactttatcaggtgctctgagttgcaggagacacatcttctggaaaacggcgaagacgaagccatcgttatgcctgggacggtaatcacaactacattggagaagggcgagattgaggagtccgagtacgtgctggtgctcttattcaaagaaagcgaagagatccgtactccaaattgcaactgtaagtactgttcacatccgctcctggggcagaacgtggagaatatctctcagcaggaaagagaagacatccagaacagctcaaaggagctcctcgggatctcggatgagtgtcagatgatctccccctccgactgtcaggaggagaatgctgttgatgtcaagcagtatcgtgacaagttgagaacctgctttgatgcaaagctggagaccgtggtctgtaccggctctgtacctgtggacaaatgcgccctgtcagagtctggcttagaatcaacagaagaaacttggcaaagtgagaaacttctagatagtgactcacacactgggaaggccatgagaagcacggggatggttgtggaaaagaagccaccagacaaaattgtacctgccagtttcagttgtgaggcagcacagactaaggtcaccttcctgattggtgattctatgtctcctgatagcgacacagaactgcgctcccaagccgtggtcgatcagatcacaaggcatcataccaagccactcaaagaggagcgcggtgccattgaccaacatcaagagacaaaacagacaactaaggaccagtctggggagtccgacacccagaacatggtaagtgaagagccatgtgaactcccatgctggaatcattccgaccccgaatcgatgagtctgttcgacgagtatttcaacgacgattctatcgaaactagaacaatcgatgatgtgccgtttaagactagtacagactcaaaagatcactgttgtatgctggaattcagtaagatcctatgtaccaagaacaataagcaaaataatgaattctgtaagtgtatcgagacagtcccacaggattcgtgtaaaacctgttttcctcaacaggaccagcgcgacaccctatcaatattagtcccccatggcgataaagagagttcagacaagaaaattgcggtgggcacagagtgggacattcctcgcaacgaatccagcgacagtgccctgggtgactctgagtctgaggacaccggtcatgacatgacgaggcaggtatcgagctactacgggggggagcaggaggattgggcagaggaagacgagatcccattccctggaagcaagcttatcgaagtgtcagcagtccaacccaatattgctaattttggaaggtctcttctcggtggctactgttcaagctatgtgcctgactttgttctacagggaatcggctcagacgaacggtttcggcagtgcctcatgtcagatttgtcccacgccgtgcaacaccctgtgctggacgagcccattgcagaggctgtttgtatcattgcggacatggataagtggactgtccaggtcgcgagttcccagagacgcgtgaccgacaacaagctggggaaggaagtgctagtctcctctcttgttagcaacttgctgcactccaccctgcagctgtataagcacaacctgtcccccaacttttgtgttatgcacctggaggacagattgcaagagctgtattttaagagcaaaatgctgagcgagtatctgcgagggcaaatgcgcgtgcacgttaaagaactaggcgtggtccttggaatcgaatcatcagaccttcccctactggctgcggtcgccagcacacatagtccttacgtcgcccagattctgctgtag

SEQ ID NO: 117302 - DNA, 3345 bp, synthetic construct
  misc_feature 1..3345: note = Description of Artificial Sequence: Synthetic coding sequence
  source 1..3345: mol_type = other DNA
atggcgccaacacttctccagaagctgttcaacaagcgcgggtcttccggctcttctgccgcagcctccgcacaaggcagggccccaaaggaagggcccgcatttagttggagctgtagcgagttcgacttgaacgagatcaggttaatcgtctatcaggactgcgatcgcagaggcaggcaggtgctcttcgactcaaaggcagtccagaagatcgaggaggtgaccgctcagaaaaccgaagacgttcccattaaaatctccgcaaagtgttgtcaaggatcttcttcagtctcttcatcctcttctagtagcattagttcacacagctcatcaggggggtcttcccaccatgccaaagagcaactcccaaagtaccagtacacccgccccgcgtccgacgtcaatatgcttggtgagatgatgttcggctcagttgcaatgagttacaaaggctcaaccctgaaaatccactatattcgcagtcctccccagttgatgatctcaaaagtcttctccgccaggatgggcagtttttgcggctctacaaacaatcttcaggactcattcgagtacatcaatcaggatccaaatctcgggaaactaaataccaaccagaattctctgggaccttgccggaccgggagcaacctggcccatagtaccccagttgatatgccctctagaggacagaacgaagacagagatagcggaatagcccgatctgcatccttaagttccctcctgattacacccttcccgtccccatccagctcaacttccagctcttctagttatcagagacggtggctgcggtcccagacaacctccctcgagaacggcattattccaaggcgcagtaccgacgagaccttttcattggccgaggaaacatgctcctccaaccctgcaatggttcgccggaaaaagattgcaatatctatcatcttttccttgtgcgagaaagaggaagcccagcgcaactttcaggacttcttcttcagccacttccctctcttcgaaagccatatgaataggctgaaatcagctatcgaaaaagcaatgataagctgcagaaaaatcgccgagagtagcttgcgggttcagttctacgtgtctagactaatggaggcacttggagaatttcgcggcaccatttggaatctgtacagcgtgccacgaatcgcagagccggtctggcttaccatgatgtctggcactctagagaagaatcaactgtgccaacgatttcttaaggaattcacacttcttatcgagcagatcaacaagaaccagttcttcgccgctttgttgactgccgtgcttacataccatttggcatgggtgcctaccgttatgcctgtggaccacccaccaatcaaagcgttctctgagaaacgcacatctcagtctgttaatatgcttgcaaaaacccatccctacaaccccttgtgggcccagctgggagacctgtatggcgctatcggttctccagtgcgcttgactaggaccgtagtcgtaggcaaacagaaagacctagttcagcggatcctgtacgtgcttacttactttcttcgctgcagcgaactccaggagaatcaactcacctggagtggcaaccatggcgagggcgaccaggtcctgaatggctcgaaaatcatcactgccttagagaagggtgaggtggaggagagcgagtatgtggttatcacagtgcggaatgaaccagctctggtgccccctatactcccgcccaccgccgctgagcggcacaacccatggccgacgggatttcctgaatgccctgaaggcactgatagccgcgacctgggcctcaaacctgacaaagaagcaaacagacgcccagaacagggatccgaagcttgttcagcgggctgtttagggccagctagcgacgcaagttggaaaccacagaacgccttttgcggcgatgagaagaataaagaagctccgcaggatggctccagcaggttgccgtcatgtgaagttctaggagcgggcatgaaaatggatcaacaggcagtctgcgaactacttaaagtcgaaatgcctactcggctgcccgatcgttctgtggcttggccatgtcctgatcgacaccttagggagaaacctagccttgagaaggtgacatttcagataggcagtttcgcgagccccgagtcagactttgaaagccggatgaaaaaaatggaggaaagagttaaagcctgcgggccaagcctggaggcatctgaggcagctgacgtagcccaagatccacaggttagtcgctcacccttcaaaccagggtttcaggaaaacgtgtgctgtcctcaaaaccgcttgtccgaaggcgacgaaggcgagtccgataaaggatttgcagaggacaggggctcccgcaacgatatggccgctgacattgcagggcaactttctcacgcagcggatcttggcaccgctagccacggtgccggcgggacaggtggcaggcggctggaagcgaccaggggcctgtatgtgaaggccgctgaaggacccgtcttggagcccgttgcaccacgttgcgtgcagagaggtccggggcttgtggcaggagcaaatattccgtgcggcgacgacaacaagaaggccaactttagaaccgaaggggatatcccccggaatgaatcgagtgattctgcgcttggagactccgacgatgaggcctgtgcttcagccatgttggatctggggcacggaggcgaccgcaccggggggagtctcgaagtggagctccctcttcctcgatcccagagcatcagtacccaaaacgttagaaatttcggtcgttcgttgctggcaggatactgtccaacttatatgcccgacctggtgcttcatgggactggctctgatgagaaacttaaacagtgcctggtagcggacttggttcatactgtgcaccacccagtcttggacgagccgattgctgaagcagtttgtatcatcgctgatacagataagtggtctgtacaagtggccacgtctcagcgtaaagttaccgacaacatgaagctgggacaggacgtgctggtgagcagccaggtgagcagcctgttgcagtctatattgcagctgtataagctgcacctgcctgcagatttctgcattatgcatctggaagatcgtctccaggagatgtacctgaaatctaaaatgctttccgaatacctgaggggtcatacaagggtccacgtgaaagagctgggagtggtcctcggtattgaaagtaatgatctgccgctcctcaccgcaattgcatcgacacattccccatacgtggcccagatactcctgtag

SEQ ID NO: 117303 - DNA, 3414 bp, synthetic construct
  misc_feature 1..3414: note = Description of Artificial Sequence: Synthetic coding sequence
  source 1..3414: mol_type = other DNA
atgtgcggaggcacagcgaacaccactaaccagccagagagttggcaggactctgccaggtgcgtgagtgacgctgtacccggagccggtaggatttaccgagccctgttgtgcacaaagatcaagaagcataccggagtggacagaagcactgaccatacagaactcgataattcctggagctgctctgagttcgaccttaacgaaatcaggctgatcgtttatcaggattgcgaccggcggggcagacaggttctgttcgacagtaaggctgtgcagaagatcgaggaggtaacagctcagaagacagaagatgtgcctatcaagatctcagccaaatgttgccagggatcatctagcgttagctccagttctagctcctcaatctccagccactcctctagcggagggagcagtcaccacgctaaagaacagctccccaagtatcaatatacgagacccgcctcagacgtcaatatgttgggcgagatgatgtttggcagcgtggccatgtcctacaagggttcaacactgaaaattcactatatccggtccccaccccaacttatgatcagcaaggttttcagtgcacgaatgggctccttttgtgggtcaaccaataacctgcaggactcctttgagtacattaatcaggaccccaacctgggcaaactgaatacaaatcagaactctcttggaccttgcaggacgggaagcaatttagcacactccacacctgtagatatgccctcacggggccagaacgaggatcgcgactccggcatcgcacggtcagcctcgctgagtagcctattgatcacaccatttccaagtcccagcagctccactagttcttcgagctcttaccagcggaggtggctgcgctcacaaacaacgagcctagaaaacggcatcattccaagacgtagcactgatgagacttttagtctggcagaagagacatgttcgagcaatcctgcaatggttaggcgcaagaaaatcgccatctccattatcttcagcctttgtgagaaagaggaggctcagagaaattttcaggatttttttttctcccactttcccctgtttgaatctcacatgaatcggctgaagagcgccattgagaaagctatgattagctgcaggaaaatcgccgaaagttccctgagagttcagttctacgtgagccgcctgatggaagccctgggagaattccgaggcaccatctggaacctctactccgtgcctcgcatcgcagaacctgtatggctcacaatgatgtcaggcactttggagaagaatcagctgtgtcagcgcttccttaaggagttcacacttttgatcgaacaaatcaacaaaaaccagttcttcgctgctcttttgacagctgtgctgacataccacctggcctgggtaccaacagtgatgcccgtggaccatcccccgatcaaggcattctccgagaaaagaacatcacagtccgtgaacatgttggcgaaaacccacccctataatcccctgtgggcacagcttggagacttgtacggagccattgggtcacccgttcgactaacccgcacagtcgtcgttggaaagcagaaagacctggttcagaggattctgtatgtgttaacctattttcttcgctgttctgaactgcaggaaaaccagctgacctggtcgggaaaccacggagaaggcgatcaggtgctgaacggttctaagattatcaccgcccttgaaaaaggcgaagtggaggagagtgagtacgttgtgatcacggttcgaaatgaaccagctttggtgcctcctatcctgccacctaccgcagccgagaggcacaacccctggcccaccggattccccgaatgcccagaaggcacggattcgcgggacctcggactcaagccagataaggaagctaaccgacgccctgagcagggatccgaggcctgctccgctggctgtctcggaccagcttccgatgcctcttggaaaccacagaatgccttctgtggggacgagaaaaataaagaggccccccaagacggtagtagcagactccccagctgcgaggttctcggagctggtatgaaaatggatcaacaagccgtctgcgagctgctaaaggtggaaatgccaaccaggctccccgacaggagcgtggcctggccatgtccagaccgccacttaagagaaaaaccttccctcgagaaagtgacgttccagattggttcttttgcaagccccgaatccgattttgaatctcgcatgaagaagatggaggaacgggtgaaagcttgtggccccagtctagaggccagtgaggccgccgacgtggcacaagacccgcaagtgtccaggtccccgtttaaacccggattccaggaaaacgtctgctgccctcagaataggctcagtgagggagatgagggcgagtccgacaaaggcttcgcggaggatagaggcagccgaaacgatatggccgcagatatcgcggggcagctgtcgcacgccgccgatctgggtacagccagtcatggagctggcggtacagggggtcgaagacttgaagcaacgagaggcttgtatgttaaggcggcagaaggacccgtgttggagcccgttgcccctcggtgcgtgcagcgcggtcccggcctggtggccggggccaacataccttgtggtgatgataataagaaggccaatttccggactgagggggacatcccaaggaacgagtcctctgattctgcattgggggacagtgacgacgaggcatgcgcaagcgccatgctcgatttggggcatggcggagataggacgggaggtagcttggaggttgagctgccactgccccggtctcagtccataagtacccagaacgttaggaattttggtcggtccctcctggcaggatactgccccacgtatatgcccgacctggtgctgcatggcactggctccgatgaaaagttgaagcagtgtcttgtcgccgacctggtgcataccgtgcaccaccctgtgctcgatgagcccattgcagaggcagtgtgtatcatcgccgataccgacaagtggtccgtgcaggttgctacctcccagcggaaggtcactgacaatatgaagctcggccaggatgtgcttgtcagttcccaagtcagcagcttattacaatccatcctccaactctacaaacttcatctgcctgccgacttttgtatcatgcacctggaggatagattacaagaaatgtatctgaagtccaagatgctttctgagtatctccggggccataccagagtccatgtgaaagagctgggcgttgtgctgggaatcgagagcaacgatctccccctgctgacagctattgcatctactcattctccgtatgtggcgcagatattgttatag

SEQ ID NO: 117304 - DNA, 2022 bp, synthetic construct
  misc_feature 1..2022: note = Description of Artificial Sequence: Synthetic coding sequence
  source 1..2022: mol_type = other DNA
atgtgcggcgggactgccaacaccaccaatcaaccagaaagctggcaggactcagccaggtgcgtcagtgatgcggtccccggggccggaaggatctatagggccttattgtgtacaaagatcaagaaacacacgggtgtcgatcgcagcacagatcatactgagctagacaactcctggtcttgctctgagttcgatcttaacgagattcgccttattgtgtatcaggactgcgaccggcggggtcgtcaagtactgttcgactcaaaagccgttcagaaaatcgaagaggtgaccgcgcagaagaccgaggacgtgccgatcaagatttccgccaaatgttgccaaggctcctcctctgtgagctctagctcaagcagttcaatctctagccattcttcgagcggtggttccagccaccacgctaaagaacagctgcccaagtaccagtacacccgtcctgcaagcgatgtgaatatgctgggagagatgatgttcggtagtgtcgccatgagctacaaagggagcaccctgaaaatacattacatccggtcgcccccacagttgatgatatcaaaggtattttccgctcgcatgggcagcttttgcggcagtaccaataacctgcaggacagctttgagtacattaaccaggaccctaacctggggaagctgaataccaatcagaatagcctcgggccgtgtaggacaggctccaacctggcgcattcaacacctgtggatatgcctagccggggccagaatgaagatagagattcaggcatagcgcggtccgcatccctgtcttccctgctcatcacacccttccctagtccgtcttcttcaacatcatcctccagtagctatcagcggcggtggctccgttctcaaacaacttccctggagaacggaatcatacctcggcgcagcaccgacgaaactttttctctcgccgaggaaacctgtagcagtaaccccgcaatggttaggaggaagaagattgcgatcagtatcattttttctctgtgtgaaaaagaggaggcacagcgcaacttccaggatttcttcttcagtcacttcccactgtttgaaagtcacatgaaccgccttaagtctgctattgagaaggctatgatttcttgcagaaagatcgccgaaagcagcctgagagttcagttttatgtaagtcgcctgatggaagcactgggagaattccgtggaaccatatggaacttgtattccgtgcctcgtattgctgaaccggtatggctcacaatgatgagcggtaccctcgagaaaaatcagttatgtcagagatttcttaaagaattcaccctcctgatcgagcagatcaacaaaaatcagttctttgcagcccttctgaccgccgttttgacgtaccacctggcctgggtaccaacggtgatgccagttgaccaccccccaataaaagcttttagcgagaagcgcaccagccagagcgtgaacatgcttgctaaaacacacccctacaaccctctctgggcccagttaggtgacctttatggggcgatcggctcccccgtgcgcctgacccgaacggtggtcgtgggaaagcagaaggacctggtgcagcgaatcctgtacgtgttgacgtactttctccgctgctcagaactccaagagaatcagctgacttggtccgggaaccacggcgagggagaccaggtgctgaacggcagcaagattatcaccgctcttgagaagggggaagtggaggagagcgagtacgtggttatcaccgtgcgcaatgaaccggcactggtgcctccaatcctcccaccaaccgcagctgagcggcataacccctggccaacgggctttcctgaatgtcccgaggggactgactctcgggacctgggcctgaaacctgataaagaagccaatcgacgacccgagcaaggctccgaggcatgctcggccgggtgcctcgggcccgcttccgacgcatcatggaagccacaaaatgcattttgcggatag

SEQ ID NO: 117305 - DNA, 660 bp, synthetic construct
  misc_feature 1..660: note = Description of Artificial Sequence: Synthetic coding sequence
  source 1..660: mol_type = other DNA
atggatccggccccaggggtcttagatccgagagctgccccccctgccctgttggggacacctcaggctgaagtgctcgaggatgtcctgagggaacagttcggacccctgccacagttagccgcagtgtgcagactgaagaggctgccgtctggggggtattcctccacggaaaatctgcagctcgtgcttgaacgtcgacgtgttgccaatgccaaagaaagagaacggattaagaacttaaatcgagggttcgccagactgaaagccctagtgccattcctgccgcagtctagaaagccgtccaaagtggatatcctgaaaggagccaccgaatatatacaggtcctcagcgatttattggaaggcgctaaagactcaaagaagcaggacccggatgaacaaagctatagtaacaacagctctgagagccacactagctcagctcgtcaactctcgagaaatataacgcagcacatcagctgtgccttcggcttaaaaaatgaggaggagggtccatgggccgacggcggtagcggtgagccagcgcacgcctgccgccatagcgtcatgtcaaccacggaaataatcagccccactaggtctcttgatcgctttccagaggtcgagcttctctcacataggttgccccaggtgtag

SEQ ID NO: 117306 - DNA, 1035 bp, synthetic construct
  misc_feature 1..1035: note = Description of Artificial Sequence: Synthetic coding sequence
  source 1..1035: mol_type = other DNA
atggtgcgagctagacatcaaccgggaggattgtgtttactgttgctcctcctatgtcaatttatggaggatcgctccgctcaagctggtaactgctggctgcgccaggccaagaacgggagatgccaagtgttatacaagaccgagcttagcaaagaggaatgttgctcaacgggccgactgtccaccagctggacagaggaagatgtcaatgacaataccctttttaagtggatgatatttaacgggggggcccctaactgtattccttgcaaagagacttgcgagaacgtggactgcggacccggaaagaagtgtcgaatgaacaagaagaataaaccaagatgcgtgtgtgccccagattgctctaatattacctggaagggccccgtgtgtggcctagacggcaagacctataggaacgagtgtgctttgttaaaggccagatgcaaagaacagcccgagttagaggtccaataccagggaagatgtaagaagacctgcagggacgtcttttgcccaggatcctctacttgcgtggtggatcagaccaataacgcctactgtgtaacctgcaatcgaatatgtcctgaacccgcatcctccgagcagtacctgtgcgggaatgacggtgttacctactcctcagcctgccatctgcgaaaggctacttgtctgttggggcggagcattggcctcgcttatgagggcaagtgtattaaggcaaagtcttgcgaggacattcagtgcacaggaggtaagaaatgtctctgggatttcaaagtggggcgcggccgatgtagtctgtgcgatgaactttgccccgatagcaaatctgacgagccagtctgcgccagcgataacgctacttatgcttcagaatgcgctatgaaggaagccgcttgttcttcaggggtcctgctggaggtgaagcatagcggctcgtgtaactccatatcggaggatacagaagaagaggaggaggatgaagaccaagactattcttttcccatatcttctatactggaatggtag

SEQ ID NO: 117307 - DNA, 954 bp, synthetic construct
  misc_feature 1..954: note = Description of Artificial Sequence: Synthetic coding sequence
  source 1..954: mol_type = other DNA
atggtgagggccaggcaccagccagggggactatgtcttctgctgctgctattgtgtcagttcatggaggaccgaagcgcacaagcagggaattgctggttgcggcaagcaaagaacgggcgttgccaggttctgtataaaaccgagctttcaaaggaggagtgctgtagtaccggccgcctgagcacaagctggacagaagaggatgtgaatgataacacgttatttaaatggatgatcttcaatggaggggcccccaactgtatcccttgcaaggagacttgcgaaaatgtggattgcggtcctgggaaaaaatgcagaatgaacaagaagaataaacctagatgcgtgtgcgccccagattgctccaacattacgtggaagggacccgtttgcggcctggatggcaagacttaccggaacgagtgtgccctcctgaaagctcgttgcaaagagcagcccgaacttgaagtgcagtatcaggggcggtgcaagaagacctgccgcgatgttttttgccccggcagttctacctgtgtcgttgatcagaccaataatgcgtattgcgtgacctgcaatcggatttgccctgagcctgccagcagtgagcagtacctgtgcggcaacgacggcgttacctactcaagtgcctgtcacctcaggaaggcaacatgcctgctgggaaggagcatcggactggcctatgaaggcaagtgcattaaagcaaaatcttgtgaagatatacagtgcaccggaggaaagaaatgtctgtgggactttaaggtaggccgcgggaggtgtagtctgtgcgacgaattatgtcctgacagtaagtccgacgaacctgtctgtgccagtgacaacgccacgtatgctagcgagtgcgcaatgaaggaagcggcatgcagcagcggtgttctgttggaagtgaagcactcaggatcttgtaattag

SEQ ID NO: 117308 - DNA, 1023 bp, synthetic construct
  misc_feature 1..1023: note = Description of Artificial Sequence: Synthetic coding sequence
  source 1..1023: mol_type = other DNA
atggtgcgcgccagacaccagcccggagggctgtgtctcctgctgctcctcctatgtcagttcatggaggaccgctccgcacaggccggaaattgctggctgagacaagccaaaaatggacggtgtcaggtactttataaaacagaactgtccaaggaggagtgctgttcgaccggccgcttaagcacatcttggacagaagaagatgtgaatgacaatactctgttcaagtggatgatttttaacggcggcgctcccaattgtattccctgcaaggagacttgtgaaaacgtggactgtggtcccggcaagaagtgcagaatgaacaagaagaacaagccacgatgtgtttgtgcaccggattgcagtaacatcacttggaaaggtcctgtgtgcggcctggacggtaaaacttaccggaatgaatgtgccctgcttaaggctcgttgcaaagagcagccagaactggaagtgcagtatcagggccggtgtaagaaaacctgccgtgatgtgttctgccctggatcttctacatgcgtcgtggatcaaactaacaacgcctattgcgtgacctgtaaccgcatatgccccgagccagccagttctgaacaatacctctgtggaaatgatggggttacttactccagcgcatgtcatctgcgtaaagccacttgcctgttgggacggtccatcggccttgcttatgagggcaagtgcataaaagctaaaagctgcgaggatattcagtgtacagggggcaagaaatgcctgtgggacttcaaagtcggccggggacgttgctcactttgtgacgagctctgtcccgacagcaagtcagacgaacctgtgtgcgcctcagacaatgctacatacgcatctgaatgcgcaatgaaagaagccgcctgtagttcaggggtgttgctggaggtcaaacattctggctcctgtaattacacagaggaggaggaggaggatgaggaccaggactacagtttccccatctcttcaattcttgagtggtag

SEQ ID NO: 117309 - DNA, 927 bp, synthetic construct
  misc_feature 1..927: note = Description of Artificial Sequence: Synthetic coding sequence
  source 1..927: mol_type = other DNA
atgtggaagcgttggcttgcactagctctggccttggtggcagtcgcttgggtccgtgccgaagaggaactgcgcagcaaaagcaaaatctgcgccaatgtgttctgcggagcaggccgggagtgcgccgtcacagaaaaaggagaaccaacatgcctgtgcatcgagcagtgcaaaccgcataaaaggccagtgtgtggctcaaacgggaaaacttaccttaaccattgcgaattacaccgtgatgcctgcttgacaggaagtaagatccaggttgattacgatggccattgcaaggagaaaaagtcagtatcgccctcagcatcccctgtcgtgtgttatcagtctaaccgtgacgagctgcgaaggcgtattatccagtggcttgaggcagagataatcccagacgggtggttttccaaggggtcaaactactcagaaatccttgacaagtatttcaagaattttgacaacggagactcgcgcctggacagctccgagtttctgaagttcgttgaacagaatgagacggctataaacatcacgacttatccagatcaggaaaacaacaaacttctcaggggattgtgtgttgacgccttgatcgagctttcagatgagaatgctgattggaagttgtcctttcaggagtttctcaagtgcttgaatcctagtttcaatccgcctgagaagaagtgtgctctcgaagacgaaacgtatgccgatggcgcagagacagaagttgactgcaatagatgcgtttgtgcctgcggcaattgggtatgtactgccatgacctgtgatgggaaaaaccagaaaggagcacagacgcagacggaagaagagatgactcgctatgtgcaggagctccagaaacaccaggagaccgccgagaaaacgaagagagtgtccactaaagagatttag

SEQ ID NO: 117310 - DNA, 423 bp, synthetic construct
  misc_feature 1..423: note = Description of Artificial Sequence: Synthetic coding sequence
  source 1..423: mol_type = other DNA
atgtggaaacggtggctcgcactcgccttggcgctggtcgcagtggcctgggtgcgtgcggaagaagaactcagaagcaaaagtaaaatttgtgcaaatgtcttctgcggcgcgggtcgggagtgcgcagtgaccgaaaaaggagagccaacctgtctctgtatcgaacagtgtaaaccccacaaacgcccggtctgtggctccaatggtaagacttatttgaaccactgcgagctccaccgggatgcctgcttaactggctcaaagattcaagtggactatgatggccattgtaaggaaaaaaaatccgtgtcaccttcagctagcccggtagtctgttatcaaagcaatagagacgagctgcgaagacgaataatccagtggttggaggcggagatcatacctgatggatggtttagttag

SEQ ID NO: 117311 - DNA, 756 bp, synthetic construct
  misc_feature 1..756: note = Description of Artificial Sequence: Synthetic coding sequence
  source 1..756: mol_type = other DNA
atgtgctttgtcgaaccagctggaaacgttcagtctcaacgaaagggcaacccccctgttagtgcgctgagcaatgcaaatctgactggaagcaagatacaggtcgactatgacgggcattgcaaggagaagaaatccgtttcaccttcagcatccccggtcgtgtgttatcagagtaatcgggatgagcttcgcagacgcataatacagtggctggaggcagagatcatcccggacgggtggtttagtaagggttctaattattccgagatactggacaaatatttcaagaacttcgataacggcgatagccgtcttgattcttcggagtttctcaaattcgtcgagcaaaatgagaccgccatcaacattacaacttatccagaccaagaaaataacaagctgttgcgcgggctctgcgtggatgccctcattgagctgtctgatgagaatgccgactggaagctttcattccaggagttcttgaagtgtttaaaccccagctttaatcctccagaaaagaaatgtgcactggaggacgaaacctacgcagatggggccgagacagaggtagactgcaatcggtgtgtgtgcgcgtgcggaaactgggtctgcacagctatgacatgcgacggcaaaaaccaaaagggtgctcagacccagactgaggaggagatgaccaggtacgtgcaggagctccagaagcaccaggagacagccgagaagacaaaacgcgtgtctacaaaggaaatttag

SEQ ID NO: 117312 - DNA, 792 bp, synthetic construct
  misc_feature 1..792: note = Description of Artificial Sequence: Synthetic coding sequence
  source 1..792: mol_type = other DNA
atgcgaccaggggcccctggcccactgtggccacttccctggggagctctggcttgggcggtaggcttcgtctccagtatggggtctgggaaccctgctcctggaggagtctgttggttgcaacaaggtcaggaggcaacatgcagcctagtcctgcaaaccgacgtgactcgggctgagtgttgtgcttctggtaacattgataccgcttggtcaaatctgacccaccctggtaacaaaatcaacctgcttgggttcctgggtctggtgcactgtttgccctgcaaggatagctgcgacggcgtggagtgtggtccaggaaaagcatgccggatgctgggaggcagacccagatgtgagtgcgcacccgactgcagcggcctccctgcaaggttacaagtgtgcgggtccgacggcgctacttatagagacgagtgtgaactaagagcagcacgctgtcgcggccaccccgatctctctgtgatgtatcggggaagatgccgcaagtcctgcgaacacgtggtgtgcccacgaccacagtcatgtgtggtggaccagactggctctgctcattgcgtggtctgtagggcggctccctgccccgtgccctcttctccaggccaggagctgtgtggaaataataatgttacctacatatcgtcgtgtcacatgcgccaggccacttgcttcttggggaggagtattggtgtgcgacacgcaggctcatgtgcaggcacccccgaggagcctccagggggagagagcgctgaggaggaggagaattttgtatag

SEQ ID NO: 117313 - DNA, 1614 bp, synthetic construct
  misc_feature 1..1614: note = Description of Artificial Sequence: Synthetic coding sequence
  source 1..1614: mol_type = other DNA
atgctgaacaccttgcaaacaaatgccggctacctagaacaagttaagagacagcggggcgacccacagacccagctggaggcgatggagctttatctggcccggagcggcctacaggtggaagacttggacagactgaatataattcacgtcactgggaccaaaggcaaagggagcacctgtgcattcacagaatgcatcctcagatcctacggtctcaaaactggattcttctcctcaccacacctggtgcaggtgagagagcggatcaggattaacggtcagcctatctcccccgagcttttcacaaaatatttctggcgcctgtaccatagattagaggagacaaaggacgggagctgtgtgagtatgcccccttatttcagattcttgaccctgatggctttccacgtattcctgcaggagaaggtggatctcgcagtcgtggaggttggcattggcggcgcgtacgactgcacgaatattatcaggaaacccgtggtttgtggcgtcagctccttgggaattgaccatacaagcctcttgggagatacagtggagaaaattgcttggcagaagggcgggatttttaagcagggggttcctgcattcaccgtgctgcagcctgagggacccctggccgtcctacgagatcgggcgcaacagatcagctgccccctttacttgtgtccgatgctggaggcacttgaagagggggggccaccactgaccctgggcctcgaaggcgagcatcagcgaagcaatgcagctttggccttgcagttggcgcactgctggcttcagcggcaagaccggcacggcgcaggtgaacctaaagccagccggccgggattgctctggcagctgccactagcacccgtattccagcccacgagccacatgaggctaggtctgagaaacaccgaatggcctggccggactcaagtgctgcgccgcgggcccctgacttggtacctcgatggagcgcacaccgcaagctctgcccaggcatgcgtgaggtggttccgacaagcattgcaaggcagggagcgaccctcaggaggccctgaagtgcgcgtgcttctattcaacgccactggtgatagagacccagctgccctgttgaagctgctgcagccttgccaattcgattatgccgttttctgcccgaacttaacagaggtatcatctacagggaatgccgaccagcagaactttaccgtgactctcgaccaggtgctcttgaggtgtttagagcatcagcaacactggaaccatctggacgaggagcaggcctcccccgatttatggagtgctcctagtccagaacccgggggctccgccagcctgctcctggcgcctcacccccctcacacctgctccgcctcctctttagtcttctcatgcatttcccacgcattacaatggatttcccaaggccgggatcctatctttcagcccccgagccctcccaaagggctcctgacacaccccgtcgcccactctggcgcatctatacttcgcgaagccgctgccattcatgtcctggtgaccggctccctgcacctcgttggcggcgtgctcaaactgcttgaaccagctctgagccaatag

SEQ ID NO: 117314 - DNA, 1128 bp, synthetic construct
  misc_feature 1..1128: note = Description of Artificial Sequence: Synthetic coding sequence
  source 1..1128: mol_type = other DNA
atgagccgggcgcggagccacctacgggccgcgctctttctggcagctgcttccgcaaggggtattaccacacaggtggcggcacggcggggactctccgcatggcctgttccacaggagcccagtatggagtatcaggacgccgtcagaatgttaaacaccttacagaccaatgcgggttatttagaacaggtgaaaagacagcgaggcgacccccagacccagctggaggctatggaactctacttggctagatccgggctacaggttgaagacttagacagacttaatataattcatgtgaccgggaccaagggtaaaggttcaacttgcgcctttaccgagtgcatccttagatcttacggcttaaagacgggtttcttctcatcccctcacctggtgcaagtcagggagcgtattaggatcaatgggcagccaatcagtccggagctctttacgaaatacttttggcggctttatcaccggctcgaagagaccaaggatggatcctgcgtttctatgccaccatacttcaggtttctgaccctgatggctttccatgtgtttttacaagagaaagtcgatctggccgttgttgaagttggtatcggcggtgcttacgattgtacgaacattattaggaaacccgtcgtgtgcggcgtgagttcgctcggcattgatcatacttcgctgctgggggacaccgtggaaaagatcgcctggcaaaagggcggaatcttcaaacagggcgtccctgcttttactgtactccagcccgaggggcccctcgccgtgctgagagatagagcacaacagattagcgtcctgggctcacaacggcatccgggtcaggggagctgcggctcctgcccatggcacctctgcagcagtcctcaccccacttgcgggagcggctttggcacgagatcgggacgggccggcagaaggtgttgcggcgcaggtccaagtcctggaacgtggaccgtgcgcacaccgcccgctgcacgtcggcccgcatgtgctggctctgcaaggcggtgtcgggctgctcgggggcgtgccgtggctcctcgtttcgagtcctgcagtagtatgctccccggcaccggcactaggcggccatgttag

SEQ ID NO: 117315 - DNA, 1128 bp, synthetic construct
  misc_feature 1..1128: note = Description of Artificial Sequence: Synthetic coding sequence
  source 1..1128: mol_type = other DNA
atgagtcgcgctcggtcccatctgcgagccgccctgttcttagccgctgcatccgctcgcggtattactactcaagtcgccgccaggaggggcctctccgcctggcctgtacctcaggaaccttcgatggagtaccaagacgctgtgcgtatgcttaatacacttcagactaacgcaggatacctcgagcaagtgaaaaggcagcggggcgatccgcagacccagctagaggccatggagctgtatttggccaggtctggactgcaggtggaggatctggacagactaaacatcatccatgtaaccggcaccaaaggtaaagggagcacatgtgcgttcacggaatgtattctgcggagctatggactgaaaaccggcttcttttccagtccccatttggttcaggtcagggagcgaatcagaattaatggacaaccaattagcccagaactattcaccaagtatttttggaggctctaccatcgcctagaggagaccaaggacggttcctgcgtcagcatgcctccctactttagatttctgacgcttatggcttttcatgtgttcctgcaggaaaaggtagatctcgccgtggtcgaggtggggattggaggcgcctatgattgcactaacatcatcaggaagccagtggtgtgcggggtttcaagcctgggcattgaccacacatctctccttggggatactgtggaaaaaattgcatggcagaagggggggattttcaagcagggagtcccagctttcacggtgctgcagccagaaggccctcttgccgtcctgcgggaccgtgcacaacagatcagtgtactgggctcacagcgccacccaggtcaggggtcgtgtgggtcatgcccatggcatctctgtagttctccacaccctacctgcggaagcggctttggaactcgaagtggccgcgccggacggagatgctgtggcgccggtcctagcccaggaacgtggaccgtgaggactcctcccgccgctcggagaccagcctgtgcagggtctgctagacgatgtagagccgcacggggaagggcagtggcccctcgattcgaaagctgttcaagcatgctgcccggtacggggaccaggaggccatgttag

SEQ ID NO: 117316 - DNA, 1764 bp, synthetic construct
  misc_feature 1..1764: note = Description of Artificial Sequence: Synthetic coding sequence
  source 1..1764: mol_type = other DNA
atgtcacgtgccaggtcgcacctccgggcagcccttttcttggccgctgcctctgccagggggatcacgactcaggtggccgccaggcgcggattgtctgcttggccagtccctcaagagccgagcatggaataccaggatgccgtgcgaatgctgaatactctacagactaatgccgggtacctggaacaggtcaaacgccagcgtggagatccacagacacagcttgaggctatggagctctatttagcaagaagcggtttgcaagtcgaggatctggatcgccttaatatcattcacgtgaccgggacaaagggcaaaggaagcacgtgcgccttcacggagtgcattttgaggtcctacgggctgaaaaccggatttttttcatccccccatctagtccaggtaagggaacgcatcaggatcaatggccagccgatatcccccgaactgtttactaaatacttctggaggctctatcaccggctcgaagagacgaaggacggtagctgtgtatctatgccaccttacttccggttcctgacactcatggccttccacgtatttctgcaggagaaggttgacctggccgtggtggaggttgggattggaggagcctatgactgtaccaatattatacggaaacctgttgtctgtggggtgagttccctcgggatagaccatacgagcctgctgggcgacactgtggaaaagatcgcttggcaaaaggggggtatcttcaaacagggagttccagcttttaccgtgctccagccggaggggccactggctgtgcttagagatcgggctcagcagatcagttgcccgctttacctctgccctatgctcgaagctttggaagaaggtggtccccctctcactctggggttggagggtgaacatcaaaggtcaaatgcagcgctcgctcttcaattggctcactgctggctgcagcgtcaagatagacatggtgccggtgagcccaaggcttctcggccaggcctactgtggcagctgcccctggctccagtgttccagccgacttcgcacatgcggctcggcctgagaaacaccgagtggcctgggaggacacaggttttgagacgcggcccacttacctggtacctcgacggggctcacactgcgtctagcgcacaggcttgcgtgagatggttccggcaagcccttcagggccgcgagcgcccatctggaggcccggaagtaagagtcctcttatttaatgctaccggcgaccgcgatcccgctgccctgctgaagctgcttcaaccctgccagttcgattatgcagtcttttgtcccaacctgactgaggtatctagtacagggaacgcagaccagcagaattttactgtgacactggatcaagtgctgctgcgctgtctcgaacaccagcaacactggaaccacttagatgaggaacaggcatccccagacctgtggtctgcaccctcccccgagcctggaggatctgcatccctgctgctggctcctcatcctcctcacacctgttctgcctcttcactcgtgttttcgtgtatctctcacgcactgcagtggataagccaggggcgcgaccctatctttcagcccccctcaccgccaaaggggttacttactcatcctgtagcccatagtggtgccagcattctacgggaggcagccgccattcatgtgctggttaccggctcactgcacctcgtgggcggtgtgttgaaactacttgagccagcgctgtcacagtag

SEQ ID NO: 117317 - DNA, 1686 bp, synthetic construct
  misc_feature 1..1686: note = Description of Artificial Sequence: Synthetic coding sequence
  source 1..1686: mol_type = other DNA
atgtcccgggccaggtctcacctgcgagcagctttgttcttggccgccgctagtgcccgcggaatcactacacaggtggcggctaggcggggtctgtccgcctggcccgtgcctcaggagccttcaatggagtatcaggatgccgtccgcatgcttaacacactgcaaaccaatgccggctacttggagcaggtgaagaggcagcgaggcgacccacagactcagttggaagcaatggaactgtacctggcacgtagtgggctgcaggtcgaagatctggaccgccttaacattatccacgttaccggtacaaagggaaaggggtctacttgtgcattcactgagtgtatcctgcgctcctacggcctgaagactggctttttctcttcaccacatctggtccaggtccgcgagcgaattagaattaacggccagcctattagccccgagttattcacaaagtatttttggcgcctctatcacaggttagaggaaacaaaagtggatttagccgttgtggaggttggcatcggcggcgcctacgattgtactaacattatccgtaagccggtcgtgtgcggggtgtcatctcttggcattgatcacacttctctattgggggatactgtagaaaaaattgcttggcagaaggggggaattttcaaacagggagtcccagccttcactgtgctgcagcctgaagggcctctggccgtcctgcgggatcgggcacagcaaatctcttgcccattgtacctctgcccaatgttggaggcgctagaggaggggggcccacctctgacgctggggcttgaaggagaacaccaacgatcaaatgccgccctggccctgcaactagcacactgctggctccagagacaggatagacatggggccggtgaacctaaagcttccagaccaggacttctgtggcaactgcctctagcacctgttttccaacccacctcacatatgcgcctcggacttcgcaacacagagtggccaggaaggacccaggtgctgagacggggcccccttacctggtacctcgatggggctcatacagccagcagcgcccaggcctgtgtgagatggttccgtcaagccctgcagggtcgcgagcggccttctggtgggcccgaggtgcgggtgctgctctttaacgccactggagatcgcgatcctgccgctctgctgaagttgttgcagccatgtcagttcgactatgccgtgttctgccccaacctgaccgaggtctccagtactggcaatgccgaccagcaaaacttcactgtcaccctagatcaagttctgctcaggtgcttggaacatcagcagcattggaatcacctagacgaagagcaggcgtcacctgacctctggagcgctccgtccccagagcccggcgggtccgcgagcttgctgctggccccccacccaccccatacctgtagtgcatccagcctggtgttcagttgtatctctcatgcattgcagtggatatcacaaggtagagacccaatttttcagccccccagcccacctaagggccttttgactcaccccgtggcccactctggagcaagcattctccgggaagcggcagctattcacgttctcgtgactggcagcctgcacctggtgggtggggtgttgaagctgcttgagcctgcactgtctcagtag

SEQ ID NO: 117318 - DNA, 585 bp, synthetic construct
  misc_feature 1..585: note = Description of Artificial Sequence: Synthetic coding sequence
  source 1..585: mol_type = other DNA
atgctgaacacactgcagactaatgctgggtaccttgaacaggtaaagcggcagagaggtgatccacagacccaactggaggccatggagttgtatctagcccgctcaggactgcaagtcgaggatcttgaccggcttaatatcatacacgtgaccgggactaaaggtaaagggtcgacttgtgcatttacagagtgtatcctgcggtcctacggtctgaaaaccggcttttttagctctccccaccttgtgcaggtgagagaaaggattcgcataaacggtcagccaatatcaccagagctattcaccaagtatttttggcgcctgtatcacagacttgaggaaactaaggtagatctggccgttgtggaagtcggcatcggtggagcctacgattgtaccaacattattagaaaaccagtcgtttgtggtgtgtcctctctcggcatcgaccacaccagcctgctgggtgacacggtggaaaaaattgcctggcagaagggtgggattttcaagcagggtgtgccggcgtttacggtcctgcagcccgagggaccactggcagtgctgagggatcgcgcctag

SEQ ID NO: 117319 - DNA, 798 bp, synthetic construct
  misc_feature 1..798: note = Description of Artificial Sequence: Synthetic coding sequence
  source 1..798: mol_type = other DNA
atgttgaacacccttcagactaatgccggatacctcgaacaggttaaaaggcaacgcggggatccgcagacacaactggaagccatggaattgtacctggctcggtcgggcctccaagtggaagacctggacagactgaatatcatccacgttactgggacgaaggggaaggggagcacctgtgcatttactgagtgcattctcaggagttacggcctgaagactggctttttttccagcccccacctagtccaagtgagagaaagaatcagaattaatggccagccgatttctcccgaactatttacaaagtatttttggagactctatcatcgcttggaggagacgaaagatgggtcctgtgtttcaatgccgccatattttcggttcctgacactcatggccttccatgtgtttttgcaggagaaggtggacctagccgtggtggaagtaggaatcggaggcgcttatgattgcacaaacatcatacgaaaaccagttgtttgcggggtcagctctctggggattgaccacacatccttgttgggagataccgtggagaagatagcgtggcagaaaggcggaatctttaaacagggagtgccagccttcaccgttctgcagcctgagggccctttggccgtcctgagggatcgggcccagcagatctcggtgctgggatcacagcgccaccctggccagggaagctgtgggtcctgtccatggcatctttgtagctctcctcacccaacctgcggctccggttttggaaccagaagtggtcgagccgggaggtag

SEQ ID NO: 117320 - DNA, 1392 bp, synthetic construct
  misc_feature 1..1392: note = Description of Artificial Sequence: Synthetic coding sequence
  source 1..1392: mol_type = other DNA
atgcattcagcctcgagcatgcttggggccgtgaagatggaggggcacgaaccctctgattggtcttcctactacgccgagccagaggggtacagttcagtcagtaatatgaacgccgggctgggtatgaatggcatgaacacatacatgtcaatgtcagcagcggccatgggatcaggcagtggtaacatgagcgccggctctatgaacatgtcttcgtacgtgggcgccggcatgagtccatcactggctggcatgtcaccaggggcgggcgcaatggctggcatgggtggatccgctggagcagcgggagtggctggtatgggcccacacctgagccctagtctcagccccctcggggggcaggccgctggtgctatgggcggtctggctccctacgccaatatgaattcgatgtctcccatgtatggtcaagccggtctcagcagggccagagatcctaaaacttatcgccgcagttacactcacgctaagcctccatactcttatattagtttgatcaccatggccatacagcaatctcccaataagatgctgaccctgtctgagatttaccagtggatcatggacttgtttccattctataggcagaaccagcagcggtggcagaattcaattcggcatagtctgagtttcaacgactgcttcttgaaagttcccaggtcccccgacaagccagggaaaggaagcttctggacactccatcccgatagtgggaatatgttcgagaatgggtgttacctgagacgtcagaagaggtttaaatgcgagaagcagctggcccttaaagaggccgctggcgccgctgggtcaggcaagaaggcggccgccggggctcaggcctctcaagcacaattgggagaagccgcgggcccggctagcgagacaccagccggcacggaatctccccattcgtcggctagcccatgccaagagcacaagcgaggagggctaggcgaactcaaaggtacccctgccgctgcactgtcgccgcctgaaccagcgccaagccccggccaacagcaacaggcggccgctcaccttttggggccccctcaccatccaggactgccgcccgaggcccacctgaagcccgaacaccactacgcctttaaccatccattttctatcaataacttgatgtcttccgagcagcagcatcatcatagccaccatcaccatcagccccacaagatggacctgaaagcgtacgagcaagttatgcactaccctggttacggaagcccaatgcccggatcactcgcgatggggcccgtgaccaacaaaactggactcgatgcctctcctctagcagccgatacaagctattatcaaggagtctacagtcggcctatcatgaattctagctag

SEQ ID NO: 117321 - DNA, 1374 bp, synthetic construct
  misc_feature 1..1374: note = Description of Artificial Sequence: Synthetic coding sequence
  source 1..1374: mol_type = other DNA
atgctcggggccgtgaagatggagggacatgagccctcagactggagcagttactatgcagaacccgagggatactcctctgtaagtaatatgaacgccggcctcggaatgaatgggatgaatacctatatgagcatgagcgcggccgcaatggggagcggaagtggcaatatgtctgccgggagcatgaacatgtcctcttacgtcggagctggaatgtccccctcactggccgggatgtctccgggcgctggagccatggctggcatgggtggctccgccggggcagctggagtcgccggaatgggccctcacctcagcccttctctaagcccgctggggggccaggcagcgggagcaatgggcggactcgcaccgtatgctaacatgaatagtatgagcccgatgtatggtcaggccggtctgtcccgggctagggaccctaaaacttatcgccgatcttacacgcatgctaaacccccctactcatacattagcctcattacaatggcaatccagcagtccccaaacaagatgctcaccttatcggagatttatcaatggatcatggatctcttcccattttaccgccagaaccagcagcggtggcagaattcaattagacattccctgtccttcaacgactgctttctcaaggttcctcgatccccggataagccaggaaaggggagcttttggactctacacccagatagtggaaatatgttcgaaaatggatgctaccttcgtcgacaaaagaggtttaagtgtgaaaagcagcttgccctgaaggaagcagcaggcgccgccggcagcggcaagaaggctgctgccggcgcacaggccagtcaagcacagctgggcgaagccgcaggacccgcttcagaaacaccagccggaaccgagtcaccacacagctctgcatcgccctgccaggaacacaagcgaggtggcttgggcgagctgaaaggcacccccgctgccgcgttgtcccctcccgagcccgctccctctcctgggcagcaacaacaggccgcggcacatctgctgggcccgcctcaccaccctggcctgccccctgaagcacaccttaaacctgagcaccactacgcatttaaccacccttttagtataaataacttgatgtcctctgagcagcagcaccatcacagtcaccaccatcatcagccccacaagatggacctgaaggcttacgagcaggtaatgcactatcctggatatggcagccccatgcctggaagtttagcaatgggacccgtcactaacaaaactggcctcgatgcctctccacttgcagccgacaccagttactaccagggtgtttattcccgacccattatgaatagttcttag

SEQ ID NO: 117322 - DNA, 1374 bp, synthetic construct
  misc_feature 1..1374: note = Description of Artificial Sequence: Synthetic coding sequence
  source 1..1374: mol_type = other DNA
atgttaggcgcagtcaagatggaaggccatgaacccagcgactggagtagttactacgctgagcctgagggctattcaagcgtcagcaatatgaacgccggactggggatgaacgggatgaatacctacatgagtatgtccgccgctgcaatgggaagcgggagcgggaacatgagtgcagggagtatgaatatgagcagttatgtgggcgctgggatgtctccttctctagctggtatgagtccaggcgccggtgctatggcaggtatggggggatcggccggagcggctggagtggccgggatgggccctcatctgtccccctccctcagtcccctcggtggccaagcagccggcgcaatgggaggtctcgctccatacgccaacatgaacagcatgagtcctatgtacggtcaagctggtctctctagggcccgcgatcccaagacctataggagatcatacacccacgcgaagccgccttatagttatataagcctgatcactatggcaatacagcagtcgcctaataaaatgcttacgctgtcggaaatttatcagtggataatggacttgttccctttctacaggcagaatcagcagcgatggcagaactctatcaggcactcacttagttttaatgactgtttcttgaaggtgccccggtctccggataagcccggtaagggtagtttctggacacttcatccagattcaggtaatatgttcgaaaacgggtgctacctgcggaggcaaaagaggtttaaatgtgagaaacagctggcactgaaagaggccgccggagcagctggtagcgggaagaaggcagcagcaggtgctcaggcctcccaggcacagctcggcgaggctgctggaccagcatcggaaactcccgccggcactgagagtccacactcgagtgcttcgccctgccaagaacacaaaaggggtggcctgggcgagttaaagggcactccagctgcggctttatcaccgcctgagccggccccgtcacccggacagcaacagcaggccgccgcacacctgctcggcccaccacaccaccctggactgccacctgaggcacatctcaaacccgaacatcactacgcgttcaaccaccccttttccattaataatcttatgagttccgagcaacaacatcaccatagccaccaccaccaccaaccacacaagatggatctgaaagcctacgaacaggttatgcattaccctggatacggaagcccaatgccaggcagcctcgccatggggcctgtgacaaacaagaccgggctcgatgcatcaccactcgcggccgacacatcatattaccaaggcgtctactcgcgtcctattatgaactcctcttag

SEQ ID NO: 117323 - DNA, 1032 bp, synthetic construct
  misc_feature 1..1032: note = Description of Artificial Sequence: Synthetic coding sequence
  source 1..1032: mol_type = other DNA
atgctgggcgcagtaaagatggagggacacgaaccttccgattggagttcctactatgctgaaccggagggatattcttccgtgtccagagcacgagatccaaagacctaccgaaggagctatacccacgcaaagccaccgtattcttacatatccctgatcactatggccatacagcagagcccgaataagatgctgacactttccgaaatctaccagtggatcatggatctgttccccttctaccggcagaatcaacagaggtggcagaattctatcaggcattctctgtctttcaatgactgctttcttaaggtgcctcggtccccggacaagccagggaagggctcattctggactctccacccagacagtggcaatatgttcgagaatgggtgttatttgcgacgacagaagagatttaaatgtgaaaagcagctggcgctcaaggaggccgccggggctgctggatctgggaagaaagccgccgctggcgcccaggcctcacaggcccagctgggggaagctgccggcccagcaagtgaaacgcccgccggtacagaaagtccacattcttctgcttctccctgtcaggaacacaagagaggcgggttaggcgagctcaaagggaccccagcagctgctctctctcccccagaacctgcaccgtctcctggacagcagcaacaggccgctgcccacttactagggccccctcaccaccctggcctcccaccagaagcacacctcaaacctgaacaccactacgcattcaaccatccgttttccatcaataatttaatgagcagcgaacagcaacatcaccatagtcatcatcaccaccagccccacaaaatggacctaaaagcctatgagcaggtcatgcattaccctgggtacggaagtcccatgcctggtagtctggccatgggcccagttactaacaaaaccggcctcgatgcctctccgcttgccgccgacacttcgtactatcaaggagtctacagtcgtcctattatgaattcctcgtag

SEQ ID NO: 117324 - DNA, 1053 bp, synthetic construct
  misc_feature 1..1053: note = Description of Artificial Sequence: Synthetic coding sequence
  source 1..1053: mol_type = other DNA
atgctggggtctgtcaaaatggaggcccacgacctggccgaatggtcctattacccggaagcaggagaggtatattcaccagtgacgccagtgcccactatggccccattgaactcctacatgacactgaacccactgtcttccccatacccgcctggtggtttgccagcttctcctttaccatctggccccctggcgcctccagcccctgctgcgccactcggaccaacttttccagggctgggcgtgtccggaggaagctccagcagcggatatggcgctcccgggcctggcctggtccacggtaaggagatgcccaaaggctaccgcagaccactggctcatgcgaaacctccgtattcttatatttctctgattacaatggcgattcagcaggcccccggaaagatgctgaccctgagcgaaatctatcagtggatcatggatctttttccatactatcgggagaaccagcagagatggcagaatagcattagacactcactctccttcaacgattgctttgtaaaggtagcccgatctcctgataagccggggaagggaagctactgggctcttcacccatcttcaggaaacatgtttgagaatggttgttacctccgcaggcagaagcgctttaagctggaagaaaaggtaaagaaagggggcagtggggccgccaccactacgagaaacggcaccggaagtgctgcttccacaaccaccccagccgctacggtcacctcccccccccaaccaccacctccggctcctgaaccagaggcccagggcggtgaggacgtaggagcactcgactgcggatctcctgcctccagcaccccttacttcaccggacttgagctccctggagaacttaagctggacgccccttataactttaaccacccattcagcataaataatttgatgagcgagcaaactccggcacctcccaagttggatgtggggttcggggggtatggggcagagggcggcgagccaggagtgtattatcagggtttgtactctagatcgctcctgaatgcttcctag

SEQ ID NO: 117325 - DNA, 1662 bp, synthetic construct
  misc_feature 1..1662: note = Description of Artificial Sequence: Synthetic coding sequence
  source 1..1662: mol_type = other DNA
atgcaggcccggtatagtgtcagttcacctaattcactcggtgtggtgccttatcttgggggggaacaatcttactaccgtgcagccgctgcagccgctggaggtggatacaccgctatgccggccccaatgtccgtatactcccaccctgcccacgccgagcagtaccccgggggaatggctagggcctacggcccatatacaccacagccacaaccgaaggacatggtcaagcctccttactcgtacatagccctgattacaatggcgattcagaacgcccctgataaaaaaatcacacttaatggtatatatcagtttatcatggaccgatttcctttctatcgggacaataagcaagggtggcagaatagcattcgacacaatttgtctctaaacgagtgtttcgtcaaggtcccaagggacgacaagaaaccaggtaaaggaagctactggacactggatcctgacagctacaatatgtttgagaatgggtcctttctgcgacgacggcgccgtttcaaaaagaaggacgccgtgaaggacaaggaggaaaaagataggctccacctgaaagaacctccacctccagggcgacagccacctcccgcaccgcctgaacaagccgatggaaacgccccaggcccccagccccctcccgtgaggatacaggacataaaaaccgagaacggtacttgcccgagccctcctcaacccctgagcccagccgcggcactgggttcaggcagcgccgccgctgtgcccaaaattgagagcccagactccagttcttctagcctttctagtgggtcctcccctccaggatctcttccttctgcacggcctctgagtttggatggagcagacagcgccccgccacccccagctccctccgccccccctccacaccattctcaaggcttcagcgttgataacattatgacctcgctacggggctccccccagagtgccgccgcggagttgtcaagcgggctgctagcctccgcggccgccagtagcagagccggcatagccccacctctcgcccttggggcctacagccccggtcagagttctctgtacagctcaccttgctcccagaccagctcagcaggttcttctggcgggggtggcggaggtgccggtgcagctggaggggcagggggtgctggcacttaccactgcaatctccaggcaatgtctttatatgccgcaggagagcgaggtgggcatctgcagggcgcccctggtggtgcaggcggcagcgccgtcgatgatccacttccggattattctctgccaccggttacatcaagtagctcaagcagcctgagccatggtggaggcgggggaggtggcggtggtggacaggaggccggacaccatcccgcggcacatcagggcagacttacaagctggtatttgaaccaggccgggggggacttagggcacctcgcttcggctgccgccgccgctgccgccgctgggtatcctggacaacagcagaacttccacagcgttcgcgagatgtttgaatcgcagcggattggcctcaacaattctcccgtgaatggcaatagcagctgccagatggcgttcccatccagccagtcgctataccggacctcaggagctttcgtgtacgactgcagcaagttttag

SEQ ID NO: 117326 - DNA, 639 bp, synthetic construct
  misc_feature 1..639: note = Description of Artificial Sequence: Synthetic coding sequence
  source 1..639: mol_type = other DNA
atgcaggcccgttatagcgtcagcagcccaaattctctgggggtcgttccgtatctcggtggtgagcagagttactatagggccgctgccgcagcggccggtggaggttatacagccatgcctgcaccaatgtcagtgtatagccacccggcccacgccgagcagtatccagggggtatggctcgcgcatatggaccttatacccctcagccacagccgaaggacatggttaagcccccctactcctacatcgccctgattacaatggctatccagaatgctcctgacaaaaaaataacgctgaacggaatttaccagttcatcatggaccgttttcctttttaccgcgacaacaagcaggggtggcagaatagcattaggcacaatttatcattgaacgagtgcttcgtcaaagtcccacgcgacgataaaaagcccgggaaggggagctactggacgctggaccctgactcttataatatgtttgagaatggcagcttcttgcgccgccggaggaggttcaaaaagaaagacgccgttaaggacaaagaggaaaaagatcgaccccaggccacgcgagcttcctcgagaacatctacaaggtgtgggagatgttcgtcacatcgcggatcagcctag

SEQ ID NO: 117327 - DNA, 1488 bp, synthetic construct
  misc_feature 1..1488: note = Description of Artificial Sequence: Synthetic coding sequence
  source 1..1488: mol_type = other DNA
atgacactcggctcctgctgctgcgagatcatgtcaagcgagagctctcccgccgcccttagcgaggcagacgcagacatagatgtggttggtggcggtagtggggggggcgagctgccagccagatcaggccctcgtgcccccagggacgtcttaccgcacggccatgagcctcccgccgaagaagcagaggccgacttagccgaggacgaggaggagtctggaggatgtagtgacggtgagccgcgtgccttagcctcccggggtgctgcagccgctgccggctcaccaggaccaggcgctgctgccgctagaggagctgccgggcccgggcccggacccccctctggaggtgccgctacccgctctccattagtgaaacctccgtacagttatatcgccctgattacaatggcgatccttcagtccccaaagaaacggttgaccttgagcgagatttgcgagttcatatccggtaggtttccatactacagggagaaattccccgcttggcagaattccattagacacaatctttcgctgaacgactgcttcgtcaaaattcctcgcgagccgggtaacccaggtaaaggaaactattggactttggatcccgaatccgcggacatgttcgacaacggctcctttctcagacgccgcaaacgcttcaagcgtcaaccactgccaccccctcatccacacccacaccctcatccagaactgcttctgcgcggcggggccgctgcagccggtgaccccggagctttcctgccgggattcgcagcctatggcgcgtacggctacggatatgggctggctctacctgcctatggtgcccccccgccaggcccggcgccccaccctcaccctcacccgcatgcctttgccttcgcagcagccgctgcagccgccccatgtcaactgtcggtacccccggggagagctgcggcacccccgccaggaccaccaacagcaagcgttttcgctggcgcggggtcagcccctgcgccggcacctgctagcgggagtggaccaggcccgggaccagctggactgcctgctttcctaggcgcagagctcggctgtgcgaaggctttctatgcagcctcactgagccctcctgccgctgggactgcggctgggctgcccacggcactcctgcgccagggactgaaaaccgatgccggcgggggcgcaggtggtggcggcgccggcgctggccagcgaccttcattctccatagatcatatcatgggtcacggcgggggaggcgctgctccacctggagccggcgagggctctcccggccctccattcgctgctgcagcgggccctggcggtcaagcccaggtgttggcaatgctgactgccccagccctggctcccgtggcaggccacataaggctgtcccaccccggggacgcactgctgtctagtggctctaggttcgcttcaaaggtggctggattgagtgggtgtcacttctag

SEQ ID NO: 117328 - DNA, 1437 bp, synthetic construct
  misc_feature 1..1437: note = Description of Artificial Sequence: Synthetic coding sequence
  source 1..1437: mol_type = other DNA
atgacactgagcggaggaggcagcgccagcgatatgagcggccagaccgttttgaccgcagaggacgttgatatcgatgtagttggagagggcgatgatgggctggaagagaaggactctgatgctgggtgcgattcaccagccggaccgcctgagttaagactggatgaagcagacgaggtgccgcccgcggcgccccatcatggccagcctcagcctccccatcaacaaccccttactttgcccaaagaggcggctggggccggcgcgggacctggtggagatgtgggagcgccggaggccgacgggtgcaagggcggcgttggcggcgaggagggcggagcatctggtggaggacccggggccggaagcggaagcgcgggcggacttgccccatccaaaccgaaaaatagtttagttaagcccccatacagttacatagcccttataacaatggcgattctccaatcccctcaaaagaagttaactttgagtggtatctgtgagtttatttctaacagattcccttattatagagagaagttcccagcttggcagaactcgatcagacacaatctctcactgaacgattgttttgtgaaaattcctagggaaccaggaaaccctgggaaaggcaactactggacgcttgatcctcaatcagaggatatgtttgataacggatcatttctcagacggagaaaaagatttaagaggcatcagcaggagcatctgcgcgaacagacagctctcatgatgcagtcgttcggtgcttactcactggcagcagccgcgggagcagccggaccgtatggacgcccctacggattgcatccagccgcagctgccggtgcctatagccaccccgccgcggccgcggctgccgcagccgccgccgcactgcaatatccatatgctcttccacctgtggccccagtcctgccgccagcagtacctctcctgccttccggggagctcgggcgcaaggccgctgctttcggttcacagcttggccccggcctacagttgcaactcaatagcctcggcgccgcggccgccgctgccggaacagctggggcagcgggaaccaccgcttcattgattaaatctgaaccttccgctcgtccatcatttagtatagagaatattatcggaggagggcccgccgcacctgggggatccgcggtaggggcaggagtggctgggggtacgggaggttccggcggaggctcaacagcacagtccttcctacgtcctcccgggactgtccagtctgcagcactgatggcgacgcatcagccactgtcactctcccgaacgacagcaacgatcgctcccatcctgtcggtgcctttatcgggccaattcctccagcctgccgcatcagcggcagccgcagcagcagcagctgcgcaggctaagtggcctgcccagtag

SEQ ID NO: 117329 - DNA, 1320 bp, synthetic construct
  misc_feature 1..1320: note = Description of Artificial Sequence: Synthetic coding sequence
  source 1..1320: mol_type = other DNA
atgaacctgccccgcgccgaaagattgaggagcacgccacaaagatccctgagggacagtgacggcgaggacggcaagatcgatgttctcggagaggaagaggacgaggatgaggaggaagctgcctcacagcaattccttgaacagtcacttcagcctggccttcaagtggcgcgctggggaggcgtggccctgccacgagaacacattgagggtggagggggaccatccgacccatcggaatttggcaccgaatttcgagctcccccgcggtccgctgccgcatctgaagacgccagacagcctgctaaacccccttcaagttatatcgccttgattactatggcaatactgcagtccccgcacaagagattgaccctgagtggcatatgtgcattcatttctgaccgctttccctattatcgaagaaagttccccgcatggcaaaatagcatacgccataacctgtcattaaacgactgttttgtgaagatcccaagggagcccggtaggccaggaaaaggcaactactggagcctggatccagcatcccaagacatgttcgataacgggtcgtttctcagaagacgtaaacgatttcagaggcatcagccaactcctggagctcatctgccacatccgtttccattgcccgcggcacacgcagctctgcataaccctaggccaggtcccctccttggggctcccgccccgcctcagcctgtgcccggggcctatccaaacacagggcccggtcgtaggccttacgcactgctgcaccctcacccaccccgttatctcctgcttagcgctcccgcgtacgctggcgcacctaagaaggcagaaggcgctgacctggcgactcctgcacccttcccttgttgctccccgcacttggtgctcagtctgggacggagagcacgtgtgtggagacgccatagagaagccgacgcatccctgtccgccctaagggtaagctgtaaaggctccggcgaaagagtgcaagggctgcggcgggtttgcccaaggccacggggagccaccgcgccgtgcagttccgatcgtcaggcatgtagaacaatcctgcagcagcaacagcgtcatcaggaggaagactgtgcgaatggttgcgccccaaccaaaggagccgttttgggtgggcatttaagcgctgcgagtgccctactccgctatcaagcggttgcagagggctctgggctcactagcctcgcggctcccttaggaggagagggaacaagcccggttttcctcgtgtctcctacaccttctagcctcgcagagtcggcaggcccctcttag

SEQ ID NO: 117330 - DNA, 1227 bp, synthetic construct
  misc_feature 1..1227: note = Description of Artificial Sequence: Synthetic coding sequence
  source 1..1227: mol_type = other DNA
atgaacctgcctagggccgagaggccacgctcaacacctcagcgctcgctgcgcgactcggacggagaagatggtaaaatagacgtgctgggagaggaagaagacgaagatgaagtagaggacgaagaagaagaggctagccagaagttcctggagcagagcttgcagccaggactgcaggtagcccgatgggggggcgttgcgctaccgcgcgaacatatcgaagggggaggacccagcgatccctcggagtttggcacagagtttcgggcccctccgcggagtgcggccgccagcgaagacgcccgacagcccgccaagcccccttacagttacatcgcgctgataacaatggcaatcctccagagcccgcacaagaggttgacgctttctgggatttgcgcgtttatttctggtcggttcccatattatcgacgaaagttccccgcatggcagaactcaatacggcacaacctgtcgctgaatgactgtttcgtcaagattcctcgggagccaggtcaccctgggaaaggtacttattggtcacttgacccagcctcccaagatatgtttgataacggtagcttccttcggaggagaaagcggttcaagagacaccagttgaccccaggggcacacttgcctcatcccttcccgctccccgccgcacacgcagccttgcacaaccccaggccagggcccctgctcggggcccccgctctcccccagcccgttcccggtgcctaccccaacaccgcccccggtcggcgaccctatgcgttactgcaccctcacccccctcggtacttacttctgtctgcccctgcctatgcgggtgcccctaaaaaggcagaaggcgccgacctggctacacctggtactctgcccgttttacagcctagccttggaccacagccatgggaagagggcaaaggactggccagccccccgggaggcgggtgtatttccttcagcattgagagtatcatgcaaggcgtacgaggggcaggtaccggggctgcacagtctctgtctcctacagcctggagctattgtccccttctgcagagacccagcagtcttagcgataacttcgcggctacggcagccgcttcgggcggtggactgcgccagcggctgcgctctcatcaagggcgcggtgctggcagagcccctgttgggcgcgtgggcgccgccgccgtgagcggcggcggtaggggtctttag

SEQ ID NO: 117331 - DNA, 1251 bp, synthetic construct
  misc_feature 1..1251: note = Description of Artificial Sequence: Synthetic coding sequence
  source 1..1251: mol_type = other DNA
atgaatctgcccagagccgaacgcccacggagtacaccccaaagatccttgcgggactccgacggcgaggacggcaagattgacgtactcggggaggaggaggacgaggacgaggttgaggatgaggaagaagaggccaggcagcagtttctcgaacaatctctgcagcccggtctccaggttgccagatggggcggagtcgcgttgccccgcgagcatattgaaggcgggggcggaccgagcgatcccagcgaattcggaaccaagtttagggcccccccacggtctgcggccgcatccgaggatgcaagacagcccgcaaaacctccctattcctatattgcactgatcacaatggcaattttgcagaaccctcacaagcgactcaccctttcagggatatgtgccttcattagtggtcgttttccttattatcgacggaaatttccggcctggcagaatagtattagacataatctcagcctgaatgattgcttcgtgaagatcccgagagagccaggtcaccctggtaagggcaactattggtcacttgatcctgcctctcaggatatgttcgataatgggtcgtttctacgcaggaggaagcggttcaagagacaccagttgacaccaggcgctcatctgcctcatccatttcccctcccagcagcccatgccgccctccacaatccacatcccggtccccttcttggggcaccagctccaccccagccagttccaggcgcatacccaaacacagctcccggcagacggccctacgccttgctccacccacatcccctccgatacctcttactctcggctagagtgtacgctggcgcaccaaagaaagcagagggtgcggatctggctacacctgcgccttttccttgttgctcaccccatctcgttttgtccctgggacgccgagcccgggtctggagacgccacagggaagccgatgctagtctgtctgctctacgggttctctgtaaaggctcaggagagcgggtgcagggacttagacgtgtgtgtccccggccacgaggcgcaactgccacatgttctagtgaccaccaggcttgttgtattcccaaacctctgcctctgtgctgtaagtgcccccctcccctccttcttggacaattctgctcaaacagctcatccattaggcggacagccccaacggcggcccttccgccaagggctcgatgttgggctgggacatgccgacccaggagaagatgttag

SEQ ID NO: 117332 - DNA, 1254 bp, synthetic construct
  misc_feature 1..1254: note = Description of Artificial Sequence: Synthetic coding sequence
  source 1..1254: mol_type = other DNA
atgaacttacctagggctgagaggttgcggtccactcctcagcggagcctacgcgattcagacggggaagacggcaagatcgatgtcctcggagaagaagaggacgaagacgaggtggaggacgaagaagaggccgccagtcagcagttcttggagcagagtctccagcctgggctccaggttgcccggtggggcggggtcgccctgccacgcgaacacattgaaggaggcggcggtccctccgaccctagcgaatttggcaccaagtttcgggccccacccaggagtgctgccgcttctgaggatgctaggcaaccagccaagcctccatacagttacattgctctcattaccatggccattttacagaaccctcataaacgactcacccttagcggcatctgcgctttcattagcggcaggttcccctattatagacgaaagtttcctgcatggcagaactccatcagacataacttatcccttaacgactgtttcgttaagatcccacgcgagcctggccatcctggtaaggggaattactggagtttagatccggcatcacaagatatgtttgacaatggctcattccttagaaggcgaaaaaggtttaagcgccaccaactgactcctggagctcacctgccgcatcccttccccctaccggccgcccacgcagcactgcataatcctcgtccaggccccttgctcggggcccctgcccctcctcagcccgtacctggcgcgtatcctaataccgcaccaggccgccgaccatatgcactgctgcacccccatcctctgcggtacttgttgctctccgccccggtgtatgctggcgcacccaagaaagcagagggcgcagcactggccacaccggcaccatttccttgctgtagtccccacctagtactatcattgggaagacgcgcccgcgtgtggagaaggcaccgtgaagcagacgcatcacttagcgcgctgcgcgtcctttgcaagggctctggagaaagggtgcagggcctacgacgcatttgtcctcgccctagaggggcaactgccacttgtagctcagatcaccaagcctgttgcatccctaggcctctccccctgtgctgcaagtgtccccctcccccattgctagggcaattctgttcaaactcaagtagtatccggcgaaggaccgctcccactgccgccctgccgccacgcgcccgctgttgggctggaacatgtcgacctagacgcccctgctag

SEQ ID NO: 117333 - DNA, 1122 bp, synthetic construct
  misc_feature 1..1122: note = Description of Artificial Sequence: Synthetic coding sequence
  source 1..1122: mol_type = other DNA
atgactgcagagtccggcccaccaccaccacagcctgaggtgctggccacagtgaaagaggagagaggcgaaaccgcagcaggagccggggttccaggagaagctacgggcaggggagccggcggccgcagaagaaagaggccactgcaacggggaaaacctccttacagctatatcgctttaatcgcgatggcaatcgcacatgcaccagagcgcaggctgaccttgggagggatttacaaattcataactgagcgcttcccgttttatcgagataaccctaagaagtggcagaatagcattagacataaccttactctcaatgattgttttctgaaaattcctcgtgaggccgggcggcctggtaaaggcaactactgggcactcgacccaaacgccgaggacatgtttgaatccggcagtttccttaggcgcaggaaacggttcaaacgcagcgatttaagtacttacccagcttacatgcacgacgcagccgctgccgctgccgccgcggccgccgctgccgccgccgcggccattttccctggtgctgtaccagccgcacgacccccatacccaggggccgtttatgcaggctatgctcccccaagcctggctgcacccccccccgtttactatccagctgctagcccaggtccgtgccgggtgtttggcctagtgcctgagaggccattgagccctgaactggggcccgctccctccggcccaggtgggagttgtgcattcgcaagcgcaggcgctccagctacaacaactggctatcaaccagccggatgtacaggagcgcggcctgccaaccccagcgcctacgccgcagcatatgccgggccagacggggcttacccccagggcgcgggatcagcaatatttgctgctgcggggcggttggcaggtccagcatccccacctgcggggggaagctctggcggcgtggagaccacggttgatttctatggtcgtacatcccccggacagttcggggccctgggtgcatgttacaatcccgggggccagctcgggggggcgagtgccggcgcttaccatgctcggcatgcagccgcttatccgggaggaattgaccgctttgtgtctgctatgtag

SEQ ID NO: 117334 - DNA, 960 bp, synthetic construct
  misc_feature 1..960: note = Description of Artificial Sequence: Synthetic coding sequence
  source 1..960: mol_type = other DNA
atggccgggagatccgacatggatccgcccgctgctttctcaggtttccctgcattgccggctgtagcaccctccgggcctccgcctagccctctcgccggcgcagaacctggccgtgagccagaggaggctgctgccggtcgcggggaagccgcacccacccccgccccgggtcccgggcgccgccggagaagacctctgcaaagaggtaaacctccctactcctatatagctcttatcgctatggcccttgctcacgcccccggacggcgccttactctggctgccatctatagattcataaccgaaagattcgcattctacagagatagcccacgcaaatggcaaaactccattagacacaatctgactctcaacgactgtttcgtgaaggtcccgcgcgaacccggcaaccctggtaagggcaactattggacattagatcccgctgccgcagatatgttcgacaacgggtcttttttaaggcgtcgaaaaaggttcaagcgggccgagctgcccgcacatgctgctgccgcacccggtccacccctgcctttcccctatgctccctatgctcctgcccctggaccggccctcctcgtgccacccccttctgccggccccgggccaagtcccccggcccggctgttctctgtggactctctcgtgaaccttcagcccgaactggctggcctaggagccccagagcccccctgctgtgctgctccagatgccgccgccgcagccttccccccgtgtgcagccgccgcctcacccccgctgtactcccaggttcccgacagactcgtgttaccagcaactagacccggacctggacccctccctgctgaacctcttctggcgctggctggcccagctgctgccctcggccccctgtcaccaggcgaggcatatctgcgccagcctggattcgcttctgggctggaacgatatttgtag

SEQ ID NO: 117335 - DNA, 1335 bp, synthetic construct
  misc_feature 1..1335: note = Description of Artificial Sequence: Synthetic coding sequence
  source 1..1335: mol_type = other DNA
atgaccacagagggggggccccctccggctccccttagacgcgcctgcagtccggtacccggcgccctgcaggccgcgctgatgtctccacctcctgcagctgctgctgcagccgcagcagcccccgagaccacttccagcagttcttcctcatcctccgcttcttgcgccagctctagttccagctccaattcggccagtgcgccatctgctgcatgtaaatccgcaggtggcgggggcgcaggtgctgggtccggtggcgccaaaaaggcaagtagcggtctgcggagacccgagaaaccaccttactcttatattgccttgatagttatggctatccaatcaagtccatcaaagagactcaccctcagtgaaatctaccagtttctgcaggctcgctttcccttttttcgcggtgcctaccagggctggaagaactcagtcaggcacaatctgtctctaaatgaatgttttatcaagctgcccaagggactggggcgacctggaaaggggcactattggaccatagaccccgccagtgaatttatgttcgaggaagggtcgttccggagacgacctaggggatttcgcaggaaatgtcaagccttgaagccaatgtaccaccgggtcgtgtcaggcttaggctttggtgcgtctctgttgcctcagggcttcgacttccaggcaccacccagcgcgccactgggatgccactcccaggggggatacggaggactggacatgatgcctgccggatatgacgctggagcaggggctcctagccacgcccatccacaccatcaccatcaccaccatgtgcctcacatgagtcccaaccccgggtctacatacatggcctcctgcccagttcccgccggacccggtggcgtgggggcagctggaggcggaggcggtggagattacggtcctgactctagctctagccccgttcctagcagtcctgctatggcaagcgccatagagtgccatagtccttacacctcccccgccgcacactggtccagtccaggggcaagcccatatctgaaacagcctcccgctctgaccccttcgagtaatcctgcagcttccgccgggctgcactcttcaatgagctcttattcgctggaacagtcttatctgcaccagaatgcacgggaagacctgtccgtcggcttaccccgctatcagcaccacagcaccccagtatgtgacaggaaagattttgtcctcaatttcaacggaataagctcgtttcatcccagtgctagcggtagctactaccatcaccatcaccagtcagtctgccaggatattaagccctgtgtgatgtag

SEQ ID NO: 117336 - DNA, 1470 bp, synthetic construct
  misc_feature 1..1470: note = Description of Artificial Sequence: Synthetic coding sequence
  source 1..1470: mol_type = other DNA
atgctggatatgggagatagaaaagaagttaaaatgattcctaagtcatctttcagtatcaatagtctggtgcccgaggccgttcaaaatgacaatcatcacgcgagccacggccaccacaatagccaccacccacagcaccatcaccatcatcaccatcaccaccatcaccctccaccccctgccccccagccccctcccccaccacaacagcagcagccgccccctcctcctccccccgctccccagccgccccaaacacgtggagccccggcagcagatgacgataaggggccccagcagttgttattgccaccaccccccccgccaccacctgctgcagccttggatggggccaaagccgacgggttgggcggcaaaggagagccgggcgggggcccaggcgagctcgctcccgtcggcccagatgaaaaggagaagggcgcgggcgctggcggcgaagagaaaaaaggtgctggggagggtggtaaggatggggaagggggtaaggaaggagagaagaagaatggtaagtacgagaagccacccttctcttacaatgcccttatcatgatggccatccggcaatcacccgaaaagcggctcacgctaaatggcatctacgagttcattatgaaaaatttcccctattatagagaaaataagcaggggtggcagaatagcatcagacacaatttgtccctcaataaatgctttgtgaaagtcccccgccattatgatgatccaggaaaagggaactactggatgctggatccctccagcgatgatgtgttcattggcgggacgactggcaagctgcgcagaaggtccactacaagtagagcaaagttggcattcaaacgaggggcacgtttaacctcaacaggtttgacgttcatggacagagctgggtcgctgtattggcccatgtcccctttcctgtcactacaccaccctagagccagttccactttgagctataacggcaccacaagtgcttacccctcccatccaatgccctatagttctgttctgacccagaattccctgggcaacaatcactcctttagcaccgcaaatggtctctccgtcgatcgtctggtgaacggtgagatcccatatgcaacacaccatcttacagcggccgctctggccgcgagcgtgccgtgcggtctcagtgtaccgtgctctggcacctattccctcaacccctgttccgttaatcttctcgcagggcagacatcatatttcttcccccatgttccccacccctctatgacttcccagtcaagcaccagtatgtccgcacgagcggcgagtagttccacgagcccccaggcacctagcactctgccttgtgaatcactgcgccctagtctgcccagctttacaaccgggttatcaggcggtttatcagattactttacacaccaaaaccaggggtctagttccaacccactaattcattag

SEQ ID NO: 117337 - DNA, 1470 bp, synthetic construct
  misc_feature 1..1470: note = Description of Artificial Sequence: Synthetic coding sequence
  source 1..1470: mol_type = other DNA
atgcttgacatgggtgatcggaaagaagtgaagatgatccccaagtcatccttcagcattaacagcctcgtgccggaggctgtgcaaaacgacaatcatcatgcttcccatggccatcataacagccatcacccacaacatcatcaccaccaccaccaccaccatcatcaccctcctccccccgcaccgcagccccctcccccgcctcagcagcagcagccacctccgccgccaccaccagctccgcagccgcctcaaacacgtggagcgccagcagcggatgacgacaagggcccacagcagcttctgcttccccctcctcctcccccaccacccgcagccgcattagacggggctaaagcagatgggttgggcggcaagggtgagccaggaggcggaccgggagaacttgctcctgtcggcccggatgaaaaagagaagggcgcgggagccgggggcgaggagaagaaaggggcgggtgaggggggtaaggatggggaaggaggaaaagagggagagaaaaagaatggtaaatatgagaaacctcccttttcatataacgccttgataatgatggctattcgtcagagcccagaaaaacgattgaccttgaatgggatttacgaatttattatgaagaattttccctactatcgagaaaacaagcagggatggcagaactctatccggcacaacctgagtcttaacaagtgctttgtgaaggtgccccgtcactacgacgacccaggcaagggcaattattggatgctggacccctccagcgacgacgtgtttatcggggggacaacaggaaagttgcgccgacggagcactactagccgcgccaaacttgcgtttaagaggggagcccggctgacaagtacaggcctcaccttcatggatagagccggtagcctttactggccaatgagtcccttcctatcattgcatcaccctagagcctcatccacccttagctataacggcaccacttcagcatacccttctcatcctatgccctacagcagtgttctgacacagaatagcctgggcaataaccactctttctccacagcaaacggattgtccgtcgatcggttggtgaacggggagataccatatgctacccatcatctgaccgccgccgccttagctgccagtgttccatgcgggctgagtgtgccatgctctgggacatattcactgaacccttgttccgtgaacctactcgccggacagacctcctatttttttcctcacgtcccacatccctctatgacttctcagagctccacctccatgtccgcccgggcagcaagttccagcactagccctcaggctcctagcacactcccatgtgaatccctgcgcccatcgctccccagcttcacaacaggattgagtggcggtctgagtgattactttacacaccaaaaccaggggagctctagcaaccctctgatacactag

SEQ ID NO: 117338 - DNA, 1137 bp, synthetic construct
  misc_feature 1..1137: note = Description of Artificial Sequence: Synthetic coding sequence
  source 1..1137: mol_type = other DNA
atgagtagctttgatctccctgcaccaagcccaccacggtgtagccctcagttcccaagtattgggcaagaaccacccgagatgaacctgtattacgagaactttttccacccacagggtgtgcctagcccccaaagacctagtttcgagggtggaggcgaatacggcgcaactcctaatccatatctttggtttaacgggccaaccatgacccctcctccttatctgcctggaccaaacgcttccccctttctgcctcaggcttacggggtccagcgacccttgttgccctctgtgtcaggactgggtgggtccgacctcggctggctgccaatccccagtcaggaagaattaatgaagctggttaggcccccctactcgtattcagctctgattgctatggctatccacggggccccggacaaacggctcacactctctcagatctaccaatatgtggcagataacttccctttctacaataagagtaaggcaggatggcagaattccatcaggcataatctgtctctgaatgactgctttaaaaaggttcctcgcgacgaagacgaccctgggaagggaaactactggacccttgaccccaactgtgaaaaaatgtttgataacggaaacttccgtcggaagcgtaagagaaagtctgatgtaagctctagcaccgcgtccctggccctggagaaaactgaatctagcctgcccgttgactctcccaaaaccaccgagcctcaggacatcttagacggcgcctccccgggtggaacaacgtccagcccagaaaagcggccctctcctcctccctcaggcgctccttgtctcaactcatttctttcaagtatgacagcttacgttagcggcggatccccgacgtctcaccccctggtgacccccggtctgagtccggaaccaagcgataagacaggacaaaacagcctgacattcaattcattttccccactaactaatctgagcaatcacagcggtggaggcgactgggccaacccgatgccgacaaacatgctgtcctatgggggctcagttctgtcgcagttctctccacacttttacaattctgttaacacaagcggtgtgctgtatcccagagaggggaccgaggtgtag

SEQ ID NO: 117339 - DNA, 852 bp, synthetic construct
  misc_feature 1..852: note = Description of Artificial Sequence: Synthetic coding sequence
  source 1..852: mol_type = other DNA
atgtccagctttgatctccctgcccccagccccccacgctgttcaccgcaattcccctctattggacaagagcctcccgaaatgaacttatactacgagaactttttccaccctcagggcgtaccgtctcctcagcgcccgagcttcgagggcggtggcgagtacggtgcaacacccaatccttatctctggttcaacggccctacaatgacacccccaccatacctgcctggccccaacgcctctccattcttgccccaggcatatggagtgcagcgccctctcctcccctccgtgtccgggctaggtgggtctgatctgggctggctgcccatcccatctcaagaagaactgatgaagttagtgcgacctccttactcatattctgctctaatcgctatggccatccacggagcgccagataagagactgacactcagccagatttaccagtacgtagctgataactttccattttacaataagagcaaagctggctggcaaaactctatccggcataatctgagtctaaatgattgttttaaaaaagtgcccagagatgaggacgatcccgcttatgtgtcaggtggctctccgactagccacccactggtgacgccagggttatcaccagaaccttcggacaaaactgggcagaactcactcaccttcaatagcttttcacccctcaccaaccttagcaatcacagtggcggaggcgattgggcgaatcccatgccgacaaatatgctgagttatggcggaagcgtcttgtcccagttctccccccacttttacaactccgtgaatacatccggggtgctgtaccctagggagggcacagaggtgtag

SEQ ID NO: 117340 - DNA, 1266 bp, synthetic construct
  misc_feature 1..1266: note = Description of Artificial Sequence: Synthetic coding sequence
  source 1..1266: mol_type = other DNA
atggcagaaagttggctgcgcctgtctggggcggggccggcagaggaggctgggcctgagggtggcctggaggagcccgacgcgttagacgatagtctgacttctctacagtggctgcaagagttttctattctgaatgctaaggctcctgctttgcctcccggtggtaccgaccctcacggttatcatcaggttccggggtccgctgccccaggtagcccattagcggcggatccagcctgtctgggacaaccccacacccccgggaagcccacgtccagctgtactagtcgatctgcaccccccggccttcaggcgccccctccggacgacgtggactatgcaaccaatcctcacgtcaagccaccttacagctacgcaacactgatctgtatggccatgcaggcctctaaagctacaaagatcactctgagtgctatttacaaatggatcaccgataacttctgttacttccgacacgcagatcccacttggcagaattcaattcgccacaatctttccctcaacaaatgtttcatcaaggtgccacgggaaaaggatgagcctggtaagggcggcttctggaggatcgatccgcagtatgccgaacggctgctgagcggagccttcaagaaaagaaggctgccccccgtacacattcatcccgctttcgccagacaggcagcccaggaaccgtctgcggtcccacgggccgggccactgactgtgaacacggaagcccagcagctattacgcgaatttgaggaggcaacaggagaagcaggttggggagccggagaggggcgcctcggccacaaaaggaaacagcctctgcctaagagggtcgccaaggtgcctcggccaccatcaactcttctgcctacccccgaggagcaaggcgagctggagccactaaaaggaaactttgattgggaagctatcttcgacgctggcactctgggtggagagctgggggcacttgaggccctagaactgagccctcctctttctcctgcttcccatgtggatgtcgatctcacgattcacggccggcacatagactgccctgcgacatggggcccttctgtggaacaggcagccgacagcctagatttcgatgaaacctttttagcgacctcattcctccagcacccatgggacgagagcggatcaggatgtctccccccagagcctctgttcgaagccggtgacgccaccctggctagcgacctccaggactgggctagtgtgggtgctttcttgtag

SEQ ID NO: 117341 - DNA, 987 bp, synthetic construct
  misc_feature 1..987: note = Description of Artificial Sequence: Synthetic coding sequence
  source 1..987: mol_type = other DNA
atggcagcagcagccgctgctttgagtggagcaggaaccccccctgctggaggcggagccggcgggggtggggctggtgggggagggtcgcctccaggaggttgggcagtggctaggctcgagggcagagaatttgaatacctgatgaaaaagcggtcagttacgatcggacgcaacagcagccaaggatccgttgatgttagtatggggcactcctccttcatttcgagacgccacctggagatcttcacaccacccgggggaggcgggcatggcggagctgctcccgagcttcctcccgcccagccccggccagacgctggcggagacttctacctcagatgcttgggtaagaacggagtattcgttgatggtgtgtttcaacgccgaggcgcaccccccttacagctgccccgggtctgtacgttccgcttcccctctacaaatattaagataaccttcactgcgttatccagcgaaaagcgagagaaacaggaagctagcgagtccccagtgaaagccgtccagccccatattagcccattgaccattaacatacctgatactatggcgcatctcatcagccccctgcccagccccacagggacaatcagtgcagccaatagctgccctagctcccccagaggagccggtagctcaggctataaggtggggcgagtcatgccaagcgatctgaatctcatggccgataactcccaaccggaaaacgagaaagaggctagtgggggggattctccgaaggatgactcaaaacctccttattcctacgcccagttgattgtacaagctattaccatggctcctgataagcagctgacccttaatggaatatatacccacatcacaaagaattacccctactaccggaccgctgacaaaggttggcaacggggggagagctttgcccacgtgggaaacacacgaattagaatcggcttgccagcccacaaagcaccccaaagatag

SEQ ID NO: 117342 - DNA, 1983 bp, synthetic construct
  misc_feature 1..1983: note = Description of Artificial Sequence: Synthetic coding sequence
  source 1..1983: mol_type = other DNA
atggccgcagctgcggctgctctctcaggggcgggcacacctcccgccggcggcggtgctggaggaggcggtgcgggcggcggcggttccccacccggtggttgggccgtagctagactggaaggaagagaattcgaatatctgatgaagaaacgaagtgtaacaataggcagaaacagcagtcagggcagtgtggacgtgagcatgggacattcaagttttatatctaggagacatcttgaaatttttacaccccctggaggaggcggtcatggtggagccgctccagaactgccaccagcgcagcctcgccccgacgctggtggcgatttctaccttcgttgtctcgggaaaaacggggtgtttgtcgatggcgtatttcagcggcgtggagctccacccttacagctgccaagagtatgtacattcaggttcccatctactaatatcaagataacttttaccgcgttgtcttccgaaaagcgagagaagcaggaggctagtgaatctcctgttaaagcagtgcagccccatatctcaccgctgaccataaacatccccgatacaatggcccacctcatttctccacttccttcccctaccgggactatttcggcagcaaactcctgccccagcagccctcgcggggccggctccagtggatataaggtagggcgggtcatgcccagcgacctgaatctcatggctgataattcccagcctgaaaacgaaaaggaagctagcggtggagacagccctaaggacgactcaaagccaccttactcttacgctcagttgatcgtgcaggccatcaccatggcccctgacaaacagctgactttaaatgggatatatactcatattactaaaaattacccatactaccggacggctgacaagggctggcagaactccatcaggcacaatttaagtttaaatcgatatttcattaaagttcctcggtctcaggaagaacccggcaaggggtcattctggcgcattgaccccgcgagcgaaagcaagctcatcgaacaagcctttcggaagcggcggcccaggggcgtgccctgcttccgaactcccctaggtcccctctcatccagatctgcacctgcgagcccaaaccacgcaggggtgctctccgcccatagcagcggagcacagacgccagaatctctttccagggagggtagccctgcaccgttggaaccagagcccggggccgctcagcctaaactggcagtgatccaggaggctcgattcgctcagtccgctcccggaagcccgttgagcagccagcctgttttgataacggttcagcgacagcttccgcaggccatcaagcccgttacatacaccgtcgccacccccgtgaccactagtaccagccagccccccgttgtgcaaacagtgcatgtggttcatcagattcctgctgtttcggttacatccgtggccggattggccccagcaaacacatacacagtaagtgggcaagccgtggtgacccctgcggccgtcctcgctcctcctaaagcagaagcacaggaaaatggagatcaccgcgaggtgaaggtgaaagtggagcccattcctgccattggtcatgcaaccctcggcacggcatctaggatcattcaaactgcccagacgacccccgtgcagactgtcaccatcgtccagcaggcccccctggggcagcaccagctgcctatcaaaaccgtgacacagaacggtacacacgtcgcatctgtgcctaccgccgttcacggccaggtaaataacgcggctgcctcccccctgcatatgcttgccactcatgcctcggcaagcgcctccctgcccaccaaacggcacaacggcgatcagccagagcagccagagctgaagcgcattaagactgaggatggggagggcattgtcattgctctgtcagttgatactcctccagccgctgtgcgcgaaaagggcgtccagaactag

SEQ ID NO: 117343 - DNA, 1833 bp, synthetic construct
  misc_feature 1..1833: note = Description of Artificial Sequence: Synthetic coding sequence
  source 1..1833: mol_type = other DNA
atggctgccgcccgtcgcgcgctcggcgcaggaacgccccgtgcaaggggtcgaggtagaggcgctggcggtggcggatcccgtcgcgccctcgggcgcggggcacccggaggcccgcgcgtacgtgtttctgatgaggaggcgcttggcgaccatagacctcagctggtggcaggactgggcggacgagagcacggcccgctcgagctgcatttgcccgcccctccccgtgacctgcacgcccccggcagaaggggccacggcggggcggctcccgagttgccacctgcccagcccaggcctgatgccggcggcgatttctacttgagatgcctcggcaaaaatggagtgtttgtggatggggtttttcagcgtaggggtgccccgccgctgcaacttccccgcgtgtgtacgttccgctttccaagcactaacatcaagatcaccttcacagccctttcttctgaaaagcgggaaaaacaggaggctagcgaaagtcccgtgaaggccgtccagcctcacatctcgcctctgacaatcaacatcccggatacaatggcccacctaatctccccattacccagcccaacggggaccatcagcgctgctaattcatgcccttcatcaccaaggggcgctggttcttccggatacaaggtcggccgtgtcatgccttcggatctgaatctcatggccgataattcccagcccgagaatgaaaaagaggctagtggtggtgatagccctaaagacgacagtaaacccccctacagctacgcccaactgattgttcaggcgattacaatggccccagacaagcaacttaccctgaacggtatctatacacacattacaaaaaattatccttactacagaacagccgacaagggttggcaaaactcaattcgacataatctcagcttgaataggtacttcattaaggttccgaggagccaagaagagcccggtaaaggcagcttctggcgaatcgatcccgccagcgaaagtaagcttatcgaacaggcttttagaaagaggaggcctcgaggcgtcccttgcttccgcacccctctcgggccactgtcctcccgaagcgctcccgcctccccgaaccacgcgggcgtgctgtctgcgcattcgagtggggcacagacaccagaaagcttgagccgggaaggctctccggccccactggaacccgaaccaggtgcggcccaacctaaactggcagttatacaggaggctaggtttgcacaatcagcccctgggtcaccgctgtcctctcaaccagtgctaattaccgtgcagaggcagctgccgcaggctataaagcccgtgacctacactgtagctaccccggtaactacttcaacgagtcagccaccagtggttcaaactgtgcatgtcgtacaccaaatccctgcggtgagcgtaacttctgtagctggcctggcccccgcaaatacatataccgtgagcggccaggctgtggtaacccctgcagctgtgttagcccctcctaaggccgaggcacaggagaacggtgatcatcgcgaagttaaagtaaaggtggaacctatccccgcaatcggccacgcgactctcggtaccgctagcaggattattcagaccgctcagacaactcccgtgcagacagtgaccatcgttcagcaagccccactaggtcagcaccagctcccgatcaagaccgtcacccagaacggtacacacgttgctagcgtgccgaccgccgtgcacggccaggtgaataacggaccgctgggtctccgtcgtcccccatgcgcatcctcagattggtcttgcctgagctag

SEQ ID NO: 117344 - DNA, 1038 bp, synthetic construct
  misc_feature 1..1038: note = Description of Artificial Sequence: Synthetic coding sequence
  source 1..1038: mol_type = other DNA
atgtcccatctgttcgatccaaggctacccgctctagcggcgtcacctatgctgtatctgtacgggcctgaacgccctggcctacccctcgccttcgccccggccgccgcccttgctgcttccggccgcgccgagactccacagaaaccgccatatagctatatcgccctaatagctatggccatccaggacgcgcctgaacagagggtgacattgaatggcatataccagttcataatggaccgatttcccttctatcacgacaaccgacaaggatggcagaatagcatccggcacaatctctctttgaacgattgcttcgtcaaggtgcctcgagaaaagggaagacctgggaaaggctcgtattggactcttgaccctagatgcctggacatgtttgaaaacgggaactatcgccggcgcaagcgcaaacctaaacctggcccgggagcgcctgaggctaagcggccgagagcagagacgcaccagaggtctgctgaggcacagcctgaggccggcagcggtgccggaggcagcggacccgcaataagtaggttgcaggccgctcccgctggaccttcacccttgctggacggccctagcccgccggctcctctgcattggccaggaacagcaagtccaaacgaggacgccggggacgccgcacagggcgcggccgcggtggccgttggccaagccgctcggacaggagacggacccgggagcccccttcgaccagccagcagatccagcccaaaaagcagcgacaagagcaagtcctttagcatagattctattctcgccggaaaacaaggtcagaagcctccatcaggcgacgagcttctcgggggcgctaagccgggcccaggcggccggctgggcgccagccttttagccgcaagtagtagcctccgtcctccattcaatgcgtcactgatgctcgatccacatgttcagggcggcttctatcagctgggcattccattcctatcctatttccccctccaggtccccgacacagttctgcactttcaatag

SEQ ID NO: 117345 - DNA, 1131 bp, synthetic construct
  misc_feature 1..1131: note = Description of Artificial Sequence: Synthetic coding sequence
  source 1..1131: mol_type = other DNA
atgatggcatcatacccagagccagaggacgccgctggggccctgttggccccagagacggggcgcaccgtgaaagaacccgagggccccccccccagccccggcaagggagggggggggggaggaggcaccgcccccgagaaaccagacccagctcaaaagccaccttactcttatgttgctcttatagcgatggcgataagggaaagcgccgaaaagaggctgacactgagcggcatataccagtatatcatagcaaagttccctttctacgagaaaaataagaagggttggcaaaactccattcgccataatttatctctgaacgagtgcttcataaaggttcccagagagggcggcggggagcggaaagggaactactggacactggaccctgcctgcgaggacatgttcgaaaagggaaactaccgcaggagaaggcgcatgaaacgccccttccggcctcccccagctcattttcagcctggaaaggggttgttcggcgccgggggagctgctggtggttgtggcgtggcaggcgcaggagctgatgggtacgggtacctagcccctccaaaatacctgcagagcggatttcttaataactcttggccattgcctcagcccccttctccaatgccctatgcatcttgccaaatggctgctgcggctgctgccgctgcagccgccgccgctgcagcgggaccggggtcacccggagcggctgccgtggtgaaggggctagctgggcccgccgcctcatatggcccatacaccagggtgcagagtatggccctgcctcccggcgtagtcaacagctataacggcttaggcggaccaccagccgcgccgcccccccctccacatcctcacccccatcctcatgcacaccatcttcacgcagcagcagcccctcccccagcaccccctcaccacggggcagcagcccctccgcccggacagctgagcccagccagtccggcaactgctgctccccccgctcccgcacccacttcggctcccggcttgcagtttgcttgtgccaggcagccagaactggccatgatgcattgcagctactgggatcatgatagcaagacaggtgcactacatagccgtctggacctgtag

SEQ ID NO: 117346 - DNA, 810 bp, synthetic construct
  misc_feature 1..810: note = Description of Artificial Sequence: Synthetic coding sequence
  source 1..810: mol_type = other DNA
atgatggcctcataccccgagcccgaagatgccgccggtgcactgctggcacccgaaactgggaggacagttaaggagcctgagggacccccacccagtcctggcaagggcggaggagggggcggaggcacagccccagagaaacctgaccccgcccagaaacccccttacagttacgtggccctgatcgccatggctatcagagagtccgcggagaagaggcttacactctccggcatttatcagtatattattgcaaaatttcccttttatgaaaaaaataaaaagggatggcagaatagtatcaggcataacctatccctgaatgaatgcttcatcaaggtcccacgcgagggggggggggagcgaaagggcaactattggactctggaccccgcctgcgaggatatgtttgaaaaaggcaattaccggaggaggcgtagaatgaaaaggccatttcgccctcctcccgcccatttccagcctggcaagggcctttttggcgccggaggcgcagcaggcggctgtggtgtggccggagcaggggccgacggatacggatatctggccccgccaaagtacctccagtcagggttcctcaacaattcttggcctttacctcaacctccgtctccgatgccgtacgcctcctgtcagatggccgcagccgctgccgcagccgccgccgccgccgccgccgctggtcccggtagcttagcccgccctctgtggagtagaggttggagagctaggcccccaaggacaggcaggacccacgcttgcagagcctggcggtgcccacctgcgtag

SEQ ID NO: 117347 - DNA, 2406 bp, synthetic construct
  misc_feature 1..2406: note = Description of Artificial Sequence: Synthetic coding sequence
  source 1..2406: mol_type = other DNA
atgaagacctctcccagacgccccctcattctaaagcggcggcgactgcctctccctgtgcaaaatgccccctccgagactagcgaggaggaaccgaaacgtagtccagcccaacaggagagtaaccaggctgaagccagcaaggaggtcgcagaatctaattcttgtaagttccctgccgggatcaagatcattaaccaccccaccatgccaaatacccaagtggtggcaatccccaacaatgccaacatacattcaataatcactgcactgaccgctaaggggaaggaatcagggtcgtctggtcctaataaattcatcctcatcagttgcggcggcgcaccaacacagcctccggggttaagaccgcagacacagacgtcctatgatgcgaagagaactgaggtcacactggagacactgggacctaagcctgcggcacgcgatgttaacttgccacgccccccaggagcactgtgcgaacagaagcgcgaaacatgcgccgacggcgaggccgctggatgcacaattaataattcgctctctaacatccaatggctccggaagatgagtagcgatgggctgggatcaaggagtatcaagcaggagatggaggagaaagagaactgtcatttggagcagagacaggtgaaagtggaagaaccttcccgcccttcagcaagctggcagaatagtgtgtcggaacgccctccatattcatacatggccatgattcagtttgctattaattctacggagcggaaaagaatgacattgaaggacatatatacttggatcgaagaccacttcccctacttcaaacacatcgcaaagcccggatggaaaaatagtatcaggcataatctctcactgcacgacatgttcgtgcgagagacgtcagcaaacggcaaggtctccttctggacaattcacccatcggctaacagatacttgacgctggatcaggttttcaagccgctggatccagggagccctcaacttcccgagcacctcgagtctcagcaaaagaggccaaatcccgagctgcgcaggaacatgactataaagacagagttgcctcttggagccaggcgaaaaatgaagcctctacttccccgggtatccagctacttggtgcctattcaatttcctgtgaaccagtctctggtactgcagccaagtgtcaaggtccccctgccactcgctgcttccctaatgtcctcagagctggcgcggcattctaagcgcgtgaggatcgcacctaaggtgtttggcgagcaggtcgtgtttgggtatatgtctaagtttttctccggtgacctgcgggactttgggactccgataactagcctctttaattttatctttctgtgcctgtcggtgctcctcgccgaagaggggatcgctccgttgtcttccgcaggccccggcaaggaggagaagcttctctttggagagggtttctcacctttgctacctgtccagactatcaaggaggaggagatccagcccggtgaagagatgccgcacctcgccaggccgattaaagtagagagcccccccttggaagaatggccctcccccgccccgtcatttaaagaggagagtagccattcctgggaggactcttcccagtcccccaccccgcggcccaaaaaatcttattctggtttgcgctccccaactaggtgtgttagcgaaatgttagtgattcaacatcgagagcggcgtgaaagaagccggtccaggaggaaacagcacttgttgccaccttgcgtggatgagccggagctcctcttttcagaagggccatccaccagcaggtgggccgccgaactcccttttcccgcagactcgtctgatccagcaagtcagctgtcctactcccaagaggtaggggggccatttaaaactcctattaaagaaactctccctatctcctctactcctagcaagtctgtgctgccgcgcacacctgagtcttggcgcctgacacctcccgccaaggtcggcggcctggatttttcacctgtccagactagccaaggggcaagcgaccccttgcctgacccgctgggtctgatggacctgagtacgacccccctccagtcagccccacccctggagtcacctcagaggctgctttccagcgagcccctagatctcatatccgtccctttcggcaatagtagcccaagtgatattgatgttcctaaacccgggtctcccgaacctcaggtaagcggcttagccgccaaccgctccctcaccgaaggactggtcttggacactatgaatgacagtctctctaagatattacttgacatcagtttccccgggctggatgaggatccgctcgggcccgataatatcaattggtcacagtttatccctgagcttcagtag

SEQ ID NO: 117348 - DNA, 2292 bp, synthetic construct
  misc_feature 1..2292: note = Description of Artificial Sequence: Synthetic coding sequence
  source 1..2292: mol_type = other DNA
atgaagacctcacctaggagaccccttattttaaaaagaaggcgacttcccctccctgtacaaaacgcgccatctgaaacatctgaggaagaacccaaacggtccccggcccagcaagaaagcaatcaagcagaggcatcgaaggaggtcgccgaaagtaactcatgtaagttccccgccggcatcaaaattataaaccaccccacgatgccaaatacgcaggtcgtggcaattcctaacaacgccaatatacattccattatcaccgcccttacagccaaggggaaagagtctggttcatccggcccaaacaagtttattcttatctcttgcggcggggcaccgactcaaccgccaggccttcggcctcaaacccagacttcatacgacgccaagagaacagaagtgactctcgagacccttggcccaaaacctgctgccagagacgtcaacttaccgagaccccccggggctctgtgtgaacagaaacgcgagacgtgcgctgacggggaagccgcagggtgcacgattaataactccctaagtaatattcagtggctgaggaaaatgtcgagcgatggccttggaagccggtctattaagcaggagatggaagagaaggagaactgccacttggagcagcgccaggtgaaagtagaggagccttccagaccaagcgctagttggcagaacagcgtctctgagcgacccccttatagctacatggccatgattcagttcgcgatcaatagcacggagagaaaacggatgaccctgaaggatatttatacatggatagaggatcattttccatatttcaaacatattgctaagccgggctggaaaaactctatccggcacaacctatctctccacgatatgttcgttcgagaaacctcagcaaacggcaaagtgtctttttggaccattcacccatcagccaacaggtatttgactctggaccaggtttttaaaccccttgatcccggctcacctcagctgcccgaacacttggagagccagcagaaacgaccaaaccccgaactgaggcggaacatgactatcaagactgagcttccactcggagccagacgcaagatgaagccacttctccctcgggtgagtagttacctcgtgcctatccaatttcccgtaaaccagagcctggtgctccaaccaagtgtgaaagtccccctgcccctcgcggcctctttgatgagctcagagttggcaaggcactccaagcgagttagaattgcacctaaagtcctcctggctgaggaaggtattgctcctctgtccagtgctgggcctggcaaggaagaaaagctgctgtttggagagggcttcagcccactgctgccagtacaaaccatcaaggaagaagagatccagccaggtgaggagatgccgcacttggcacgccctattaaagtagaatctccacctctggaggagtggccttcaccagcgccctcattcaaggaggagtcttcccacagttgggaggattcttcccagtcccccacaccccgacctaagaagagctacagcggccttcggagtcccacaagatgcgtgtcagagatgctggttatccagcaccgcgagagacgagagaggagcaggtctcggagaaaacagcacctcttgccaccatgtgtcgacgagcctgagcttctcttctctgaaggcccttccacaagtaggtgggccgccgaactgccttttcctgccgacagtagtgaccccgcatcacaactcagctattcccaggaggtgggcgggccgttcaaaacgcccatcaaagagactctccccatcagctccactccctccaagagtgtgttacctaggactcctgaaagctggaggctgaccccacccgctaaggttggcgggctagactttagcccagtccagaccagccagggtgcgagcgatccactccctgaccctcttgggctcatggatctgagcaccactccactacagagtgctccgcccttggagtcaccccagcgactcctgtctagcgagcctctggatctaatttccgtgccattcgggaatagctccccatcagacatcgatgtgcctaaacctggttcccctgaaccacaagtctccggcttggccgccaatcgttctctgacggaaggtttagttctagatactatgaacgacagcctgagcaagattctcttggacatttcctttccgggacttgacgaggacccgctaggaccagataacattaactggtcccagttcatcccggaactgcagtag

SEQ ID NO: 117349 - DNA, 2247 bp, synthetic construct
  misc_feature 1..2247: note = Description of Artificial Sequence: Synthetic coding sequence
  source 1..2247: mol_type = other DNA
atgaagacctcgccaagaagacctctcattttaaaaaggcggaggctgcccttacccgtccaaaacgcgccaagcgagacatccgaagaggaacctaaaaggtcaccagcccagcaggagagcaatcaagccgaggcaagtaaggaggtggctgagtccaactcttgtaagttccctgcgggaattaaaatcatcaaccacccaactatgcccaatacacaggtcgtggccattcctaacaatgctaatatccactccattatcaccgctctgacggcaaagggcaaggaaagcggatcgtcgggacctaataaatttatcttgattagctgcgggggcgctccgactcagcctcctgggttgcgccctcaaacccagacctcctatgacgcaaaaagaaccgaggtcacgcttgaaaccctcggcccaaagcccgccgcaagagatgtaaatctcccgcgtccccctggcgctctctgtgagcagaaacgagagacgtgtgccgatggagaagccgcggggtgcacgatcaacaatagcctgtctaacatccagtggctgagaaagatgagctctgacgggctaggctctaggtccattaagcaagagatggaagagaaagagaactgccaccttgaacagcgtcaggtgaaggtagaagagccttccaggccgtcagcttcctggcagaactcagtgtcagagagaccaccctactcttatatggcaatgattcaattcgccatcaattcaaccgaaagaaaaaggatgactttaaaagacatctatacctggatcgaagatcattttccatacttcaagcatatcgctaagcctggttggaagaacagcattagacacaacctgagcctgcacgatatgtttgtgcgcgagacatccgctaacggcaaagtctcgttttggactatacatccatccgccaatcggtatctgacgctcgatcaggtatttaagcaacagaaaaggccgaatccagagcttcggaggaatatgacgatcaagactgaactgcctctgggcgcccgtcgaaagatgaagccactcctccctcgggttagcagttacctggtgcctatacagttccccgtcaaccagtcactagttcttcagccatccgtaaaggttccgttacctctggccgccagcctgatgagttccgaattggctagacactctaaacgtgtgagaatagcgcctaaggtgctcctagcagaagaaggcatagcccccttatccagcgcaggaccagggaaggaagaaaagctactttttggagagggatttagccccctattgcctgttcagaccattaaggaggaggaaatccagcccggagaagagatgccccacctggcccgtcccatcaaggttgaaagtccaccccttgaggagtggcccagcccagctccttccttcaaggaggaaagtagccatagctgggaggactcgtcacagagtcctacaccgcggccaaaaaaatcatactcagggttgcggtcacccactaggtgtgtctcggagatgctggtaatacagcatagagagcgcagagaacggtccaggtcccgacgcaaacaacatctgcttcctccatgtgtggatgaacctgagttacttttctccgagggcccttcaacaagccgttgggccgcagaacttccattcccagccgattctagtgacccagcctcccagctgagctacagccaggaggtgggggggcccttcaaaactcctattaaagaaacactgcccatatctagtacaccttccaagagtgtgctgccaagaacccccgagagctggagactgacccctcctgcgaaagtcggcggcttggatttctcaccagtgcagactagtcagggcgctagcgaccctctgcctgaccccttggggctgatggacctatccactacacctttacaatccgccccacctctagagtctccacagcgcctattatcgagcgagcctttggacctgatttctgtgcctttcggtaacagctccccatctgatatcgacgttcctaagccaggtagtccagagccgcaggtgtctggtctggccgccaatcggtcattgactgaggggctcgtactggacactatgaatgatagtttaagcaaaattctcctggacatctcctttcctggactggatgaggacccactcggcccagacaatatcaactggtcccaatttattccggaactacaatag

SEQ ID NO: 117350 - DNA, 531 bp, synthetic construct
  misc_feature 1..531: note = Description of Artificial Sequence: Synthetic coding sequence
  source 1..531: mol_type = other DNA
atgggagctcctgctacacgtcgttgtgttgaatggcttctgggactttattttctgagccacatcccaatcaccctgttcatggatctccaagccgttctgcctagggagctgtacccagttgagtttagaaaccttttgaagtggtatgccaaagaattcaaggaccccctgctgcaggaaccccccgcctggttcaaatctttcctgttttgtgaactggtcttccagctgccttttttccctatcgccacatacgcctttttgaagggcagctgcaagtggattcggaccccggccattatctatagcgtgcacaccatgacaaccctgattcccattctgagcactttcctatttgaggatttctccaaggcttcaggtttcaaaggccagcgacccgagacactgcatgaacgcctgactctggtctccgtctatgcaccttatttgctcattcctttcattctgttgatattcatgctgcggtctccatactacaagtatgaagagaaacgcaagaagaagtag

SEQ ID NO: 117351 - DNA, 1473 bp, synthetic construct
  misc_feature 1..1473: note = Description of Artificial Sequence: Synthetic coding sequence
  source 1..1473: mol_type = other DNA
atggggcctgtaatgccaccttcaaagaagcctgagagctcaggcatttcagtcagcagcggattgtcccaatgttacggcgggtctggtttcagtaaagccctgcaagaagatgatgatttggatttttcgctgcctgatattcgcctggaagagggcgccatggaggatgaggagctgacaaacttgaactggctccatgagagcaagaacctgctcaaatcttttggggagagtgtcctcaggtccgtctcaccagtgcaagacctcgatgacgataccccgccatctccagcccattcagatatgccgtatgatgctaggcagaacccgaactgcaagcctccatacagctttagttgcctgattttcatggccattgaggacagccccacaaaacgactacccgtcaaagacatatataactggatcctggagcactttccttacttcgccaacgccccaactggatggaaaaactccgtgaggcataacttgagcctgaataagtgttttaagaaagtggacaaagagaggtctcagagtatcggaaaagggagcctttggtgtatcgacccagagtatcggcaaaatctgatccaagccctaaagaagactccataccacccacatccccacgtgttcaacaccccaccaacttgcccccaggcctaccagtccacaagcgggcctcctatttggcctggctccactttcttcaagagaaacggcgccctccttcaggatcctgacattgacgcagctagcgcaatgatgctgttaaacaccccgcctgaaattcaggctgggttcccccccggggtgattcagaatggagccagggtcttaagtcgcggcctgttcccaggcgtgagacctctgcctatcacacctattggggtgactgccgccatgcggaatggcattacctcttgtcggatgcggacagagagcgagccatcatgcggatcccccgtggtgagcggtgatcctaaggaggatcataattatagctctgctaagtcatctaacgcgcggtctactagccccacctctgactccattagtagctccagctcaagtgccgacgatcactatgaatttgccactaagggctctcaggaaggctccgaagggtctgagggatccttcaggagccatgaaagcccgagcgataccgaggaggacgacaggaagcactcacagaaagaacctaaagatagcctgggggattctggatatgcctctcagcacaagaagcgccaacacttcgccaaggcgcggaaggtcccatcagatacactcccactgaagaaacggcgcacagagaaaccacctgaatctgacgatgaggagatgaaggaggctgccggatctctccttcatcttgcgggaatacggtcctgcctgaacaacatcacaaacaggactgccaaagggcaaaaggagcagaaggaaacgaccaagaattag

SEQ ID NO: 117352 - DNA, 1473 bp, synthetic construct
  misc_feature 1..1473: note = Description of Artificial Sequence: Synthetic coding sequence
  source 1..1473: mol_type = other DNA
atggggcccgtcatgcctcctagtaaaaaacctgagtccagcggtatctctgtgtccagcggcctgagtcagtgctacgggggctctgggtttagcaaggccctacaggaggacgatgatctagatttttcactgcccgacatccgactggaggaaggggcaatggaggacgaagagttaacaaacctgaactggctccatgagagcaagaatttgttgaaatctttcggtgagagtgtcctgagatctgttagtcccgtgcaggatctggacgacgatactccaccctcccctgcgcattcagatatgccatatgatgcccggcaaaacccaaattgcaagccaccctactcctttagttgtttgatttttatggctattgaggactcgcctacaaaacggctccctgttaaggacatctacaattggatccttgaacactttccctatttcgcaaacgccccaacgggctggaaaaatagcgtgcgacacaacctgtcgctgaataagtgcttcaagaaagttgataaagaaaggtctcagtccatcgggaaaggtagtttgtggtgcattgatcctgagtatagacagaacctgattcaggcgcttaagaaaacaccctatcacccgcaccctcatgtgttcaatacgcctcctacttgcccccaggcttaccaaagtacctctggcccacctatatggccaggctcaacattctttaaaagaaacggtgctctcctgcaggaccctgatatcgacgccgccagtgccatgatgctacttaataccccaccggagattcaggcaggctttccgcctggcgtgatccagaacggagcccgcgtattgagccgggggctttttccaggtgtgcgccccctccctatcacacccatcggggtgaccgccgcaatgcgcaatgggattaccagctgtagaatgcgtaccgagagcgaaccctcatgtggcagccctgtggtttcaggcgatcctaaagaggaccataactactcatctgcaaagtcatctaacgcacggtctacatcccctacttctgactctatctctagcagcagctcttccgctgatgatcattacgaatttgcaactaaggggtcccaggagggatccgagggaagcgagggaagcttccgttctcatgagagtccaagcgacaccgaggaagacgaccggaagcacagccagaaggagcccaaagactcactcggcgattccggatatgcctcccagcataaaaaacggcagcactttgccaaggctcggaaggtgcctagcgacaccctgcccttaaagaagcggagaaccgaaaaaccaccagagtcggatgatgaggaaatgaaggaagccgcagggtcacttttgcacctggcaggaattagaagctgtctgaacaacataaccaataggacggccaaaggacagaaggaacagaaggaaactaccaagaattag

SEQ ID NO: 117353 - DNA, 165 bp, synthetic construct
  misc_feature 1..165: note = Description of Artificial Sequence: Synthetic coding sequence
  source 1..165: mol_type = other DNA
atgggcccagtgatgcctccaagcaagaaacccgagtctagcggcatttcggtgtcatcaggcctgtcccagtgttatggcgggtcaggcttctctaaggctctccaggaggatgatgatctggactttagcctccctgatatccgtttggaagagggtgcttag

SEQ ID NO: 117354 - DNA, 282 bp, synthetic construct
  misc_feature 1..282: note = Description of Artificial Sequence: Synthetic coding sequence
  source 1..282: mol_type = other DNA
atggggccggttatgccacctagcaaaaagccagagagcagcgggatctccgtctcatcaggcctgtctcaatgttatggcggatctggattcagcaaagcactccaggaggatgatgatctggactttagtctcccggatatccgcttagaggagggcgccatggaggacgaggaactgacaaacctcaactggttgcatgagtccaagaatctgctgaagtcttttggggagagcgtgttgcgtagcgtctctcccgtgcaagacttggacgacgactag

SEQ ID NO: 117355 - DNA, 1407 bp, synthetic construct
  misc_feature 1..1407: note = Description of Artificial Sequence: Synthetic coding sequence
  source 1..1407: mol_type = other DNA
atggggcccgtgatgcccccatccaaaaaacccgaatccagcgggatatctgtcagctcagggctctcccagtgttacgggggctcagggttttcaaaagcgctgcaggaagacgacgacctggatttttccctgcccgacatcaggcttgaagaaggggccatggaggacgaggaactaaccaacctcaattggcttcatgagagcaaaaacctcctcaagtccttcggcgagagcgtcctgcggtccgtttccccagtccaagacctggatgacgatacacctccctctccggctcattcagacatgccttatgacgctcgacagaatccaaactgtaagcccccatactccttctcatgtctcatcttcatggcgattgaagactccccgaccaaacgcctgccagttaaagacatctacaactggattctggagcatttcccctattttgcaaatgcccctacaggctggaagaacagcgtccgccataacctctccctgaacaagtgctttaaaaaggtggataaagaaaggtcccagtctatcggtaagggaagtctctggtgtatcgacccagagtaccggcagaatctgatccaggcattgaaaaagaccccctatcacccccatccccacgtgtttaacactccgccaacctgtcctcaggcatatcagtccacctcagggccccctatatggccgggctctactttcttcaagcgtaatggggccctattgcaggtccccccaggggtgattcagaacggggcacgcgtgctttccaggggattgtttcctggagtgcgccctctgccaattacgcctatcggcgtgaccgctgctatgagaaacggaatcaccagctgcaggatgcgcaccgagtccgagccctcctgcggcagccccgttgtgagcggtgatcccaaagaagatcataattacagcagcgccaagtcttcaaacgccaggtctacaagtcccacaagtgactcaatcagctccagtagctcctccgctgatgaccactacgagttcgcaacaaaaggaagtcaggagggatccgaagggagcgaaggaagtttccggtcccacgaatccccctctgataccgaggaggacgatcgaaagcactcgcagaaggagccaaaagattctctcggcgatagcgggtatgcctcacagcataaaaaaaggcagcacttcgcgaaggctcgaaaggttccctccgatacgcttcctcttaaaaaacgtcgcacagagaagccgcccgagagcgatgacgaagagatgaaggaggctgcgggctccttgctccacctggcggggatcaggtcttgtcttaataacatcacaaacagaactgcaaaagggcagaaggagcagaaagaaaccacaaagaactag

SEQ ID NO: 117356 - DNA, 627 bp, synthetic construct
  misc_feature 1..627: note = Description of Artificial Sequence: Synthetic coding sequence
  source 1..627: mol_type = other DNA
atgggacccgttatgccacccagcaagaagcctgagagctccggtattagcgttagcagtggtctatctcagtgttacggcggttcggggttctctaaggcattgcaggaggatgacgatttggatttctctctgcccgatatacgtcttgaggagggagcaatggaagacgaggaattgaccaacctgaactggttacacgagtctaagaacctcttgaaaagtttcggcgaaagcgtgttgagaagtgtcagcccagtacaggacctcgacgatgacactcctccatcgcctgcacattctgacatgccgtacgacgcgcgacagaatcccaactgcaagccaccctacagcttttcttgcctcatctttatggcgatcgaggacagccccacgaagcggctgcccgttaaagatatttacaactggatcctggagcacttcccatatttcgcaaacgcgcctaccggatggaaaaattccgtcagacataacctgtcactcaataaatgctttaagaaggtggacaaggagcgcagccagagtattggaaagggatctctctggtgcatcgatccagaatataggcagaaccttatacaggcactcaaaaagaccccttattag

SEQ ID NO: 117357 - DNA, 1407 bp, synthetic construct
  misc_feature 1..1407: note = Description of Artificial Sequence: Synthetic coding sequence
  source 1..1407: mol_type = other DNA
atgggccccgttatgcccccttccaagaaaccagaatcctcaggcatctccgtttcctccggtctgtctcagtgttacggcggatccggctttagtaaggcgctgcaggaagatgacgacctcgattttagcttgcccgacatccgcttggaggagggagcgatggaggatgaggagctgacaaacctcaactggctgcacgagtctaagaacctgctcaaatccttcggagaaagtgtccttcgcagcgtgtctcctgtacaggacctggacgatgatacaccacccagccccgctcactcagacatgccatacgatgcacgccagaatcctaactgcaagccgccttactcattttcctgcctgatattcatggccatcgaagacagccctacaaagagactgccagtgaaggacatttataattggattttagagcactttccatattttgccaatgccccgaccggctggaagaattccgtgaggcataacttatcccttaacaaatgttttaagaaggtcgacaaagaacggtcccaatctatcgggaaggggagcctgtggtgtattgatcccgaatatcgacagaatctcatccaggcccttaagaagaccccgtaccacccccatccccatgtcttcaacacgcctccaacgtgccctcaggcctatcagtcgacgtccggaccaccgatctggcccggcagcaccttctttaagcgcaacggggccttgttacaggtccctccgggggtgatacagaacggggccagagtgctgtccagaggacttttccctggcgtacgcccattacctataacacctattggcgtcacggccgccatgcgaaatggaataacttcctgtagaatgcgcaccgagtcagagccctcttgcgggagccccgtggtgtccggcgaccccaaggaggatcataactattcctccgctaagtcttccaatgccagatctacttcaccaacctctgactcaatctcatctagttccagttctgccgatgatcactacgaattcgccacaaaggggagccaagagggctcagagggatcggagggtagctttcggtcacacgaatcacccagtgatacagaagaggacgataggaaacattctcagaaggaacccaaggattcgctaggcgactccggctacgcctctcagcacaagaaacggcagcacttcgctaaggcccgcaaagttccttcagatacactgccgttaaaaaagaggcgaacagagaagcctccagagtccgacgatgaagagatgaaagaagccgccggatcactcctccatttggccgggatccgcagctgtctgaacaatatcactaaccgcacagccaaggggcagaaggaacagaaagaaacgacaaagaattag

SEQ ID NO: 117358 - DNA, 777 bp, synthetic construct
  misc_feature 1..777: note = Description of Artificial Sequence: Synthetic coding sequence
  source 1..777: mol_type = other DNA
atgatagaaagtgacacatctagcatcatgtcaggcattatccgaaattcgggacagaatcaccatccatcaccgcaggagtatcgcctcctggcaaccactagcgacgacgatcttccaggggacctgcagtcactgagctggcttactgcggtggatgtgccacgcctgcaacaaatggcatcaggacgcgttgatctcggcggcccatgcgtcccacacccgcacccgggcgccctggccggcgtcgccgacctgcatgtgggcgcaacccccagccctttgctgcatggtcctgccggaatggcaccccgtgggatgcctggattgggacccatcacgggccaccgtgatagtcagatgagccagttcccagtgggcggtcagcctagcagtggccttcaggaccctcctcatctttattctcccgcaacacagccccaattccccctcccgcctggcgctcagcaattgtctgacaggcacggacctgaggaacagcaggaccgccaaccagcatgcgaacgcgacctgcagttacatgagggggcccttcccttgctccaggacgggccccgccgggtggaggagcttggggctgcccagccagtgtcagaacaagtcctcagagaaggaggtgagcaggatgagaggttgctccctcagggactacccgtgggctccgagccaggaccgcataggcaggatggtggaggggacgcccaagtcgaagaggaggggccagggtgtcatccaccggagtacgggcaaccctag

SEQ ID NO: 117359 - DNA, 1554 bp, synthetic construct
  misc_feature 1..1554: note = Description of Artificial Sequence: Synthetic coding sequence
  source 1..1554: mol_type = other DNA
atgatcgagtccgacaccagctcaattatgagtgggattatacgaaattccggccagaaccaccacccttccccccaggagtatagacttcttgcgactactagcgacgatgacctgcccggagacttgcagtcactcagttggcttacagcggtggatgtcccccgcctgcagcagatggcatcagggagagtcgaccttggaggaccttgcgtgccacatccacatcctggcgccctagctggcgtggccgatctgcatgtcggcgctaccccaagccccttactgcacgggcctgccggcatggctcctcgcgggatgcctggcttgggaccaattaccgggcatcgggactcaatgtctcagtttcccgtgggaggccagccttctagtgggcttcaggatcctccccacttatacagccccgcgacacagccacagttccccctgccgccaggcgctcagcagtgtccccccgtcggtctctacggcccgccgtttggtgtgcggcccccctaccctcaacctcacgtagcagtccattcgagtcaggagcttcatccaaagcactaccccaaaccaatttatagctacagttgcctaatcgccatggctctgaaaaatagcaaaaccggtagccttcctgtttcggagatatacagcttcatgaaggagcatttcccatatttcaaaactgctccagacgggtggaagaattccgtgaggcataatttgtccttaaacaagtgcttcgaaaaggtcgagaacaagatgagcggcagttccaggaaggggtgcctgtgggcgctcaacttggcccgaatcgacaagatggaagaagaaatgcacaagtggaaaagaaaggaccttgcagccattcacagatctatggctaatcctgaagaattagataagctgatctcagaccgacccgaatcatgccggaggcctgggaaaccgggggaaccggaggccccagtcctgactcacgctacaactgtcgcagttgcccacggctgcttagccgtgtctcagttacctccccagcccttgatgactctttcgctgcagtcagtccccttgcatcaccaagtccagccgcaggcccacctagcccccgacagccccgctcctgcccagaccccccccttgcatgctctgccagacctttctcctagcccacttcctcaccctgccatgggcagggcaccagtagacttcatcaatatcagcaccgacatgaacaccgaggtcgatgctctggatccgtcgatcatggactttgccctgcagggtaatttgtgggaggagatgaaggacgaggggttttcattggacaccctgggcgcttttgcggactctccattgggctgcgatctgggggcctctggccttacaccagcttcgggagggtccgatcaaagctttccagatctccaggtgacgggcctctatactgcctacagtactcccgacagcgtggcggcctcagggacttcaagcagctcccaatacctgggtgcccaaggtaacaaacccatcgccctcctttag

SEQ ID NO: 117360 - DNA, 1014 bp, synthetic construct
  misc_feature 1..1014: note = Description of Artificial Sequence: Synthetic coding sequence
  source 1..1014: mol_type = other DNA
atgcccggtttgccatgtccagctctgccttgtccagccccacctccagccccaagctgtctaatcgccatggccctgaaaaattctaagaccgggtcacttccagtgagcgagatttactcgtttatgaaggagcatttcccctattttaagaccgctccggacggatggaagaatagcgtgagacataacctgagtctcaacaaatgtttcgaaaaggtggagaataagatgtcagggagttcaaggaagggctgtttgtgggctttgaatctggctagaattgataaaatggaggaggaaatgcacaaatggaaaaggaaagatctagctgcaatccatcggtccatggccaatccggaagaactagataaactgattagcgatcggcctgaatcatgccggcgacccggtaaacctggggagcccgaggccccagtcctgacgcatgctaccacagttgctgtggctcacggctgccttgctgtctcccaactaccaccccagccactcatgaccctttccttgcagtcggttcctctgcaccatcaagtccagcctcaagcccacctggccccagattctccggctcccgcgcagaccccgccactccatgcactgcccgacctgagtccgtcaccactgccccatcccgctatggggcgagcgccagttgactttatcaatatttctactgatatgaataccgaggtggatgcgctggaccctagcatcatggatttcgcactgcaggggaatctttgggaggagatgaaggacgagggcttctcactggatacccttggcgctttcgctgattccccacttggctgcgacctgggggctagtgggcttacaccagccagcggagggagcgatcagtccttccctgatctgcaagtgaccggtttgtacaccgcctattctacccccgactctgtcgctgcctccgggacctcaagctcatcacagtacttgggcgcgcaggggaacaaaccgattgccctcctgtag

SEQ ID NO: 117361 - DNA, 1680 bp, synthetic construct
  misc_feature 1..1680: note = Description of Artificial Sequence: Synthetic coding sequence
  source 1..1680: mol_type = other DNA
atggccgctaagttacgcgcgcatcaagtggacgtcgatcccgactttgccccacagtcgcgacctcggtcatgtacttggcctctgcctcagcccgatctcgccggcgatgaagatggggccctgggtgctggggtcgccgaaggggcagaggattgcgggccggagaggcgtgccacagcacccgcaatggcccccgcccccccactcggcgcagaggtagggcctttgaggaaagccaaatcaagtcggaggaacgcgtggggtaacttgagttacgccgacctgatcactaaagcaatcgaaagcgcaccagacaaacgcttgaccctctcccagatttacgactggatggtgcggtacgttccatacttcaaagataagggtgatagtaattcatccgctggatggaagaactcaattaggcacaatctgtccctgcacaccagattcattcgtgttcagaatgagggtaccggaaagagctcctggtggatgctgaacccagaggggggtaagacagggaaaactcctagacgcagagccgtgtccatggataacggagcaaaattcctgcgtatcaagggcaaggcgtccaagaaaaaacaattgcaggcacctgagaggagcccggacgacagttccccctcagcgccagccccaggtccagtgccagccgccgctaagtgggccgcctcacccgcctctcacgcttctgacgattatgaggcttgggctgactttagggggggcggccgccccctcctgggcgaggctgccgaattagaagatgacgaggcactggaagctttggccccctctagcccccttatgtacccaagcccggcttctgccctttcccctgccctaggcagccgctgtccgggcgagctccccagactggccgagctcgggggcccactgggccttcacgggggaggcggtgcaggactcccagaggggcttctggatggcgcccaggacgcttatggcccgagagcccgcgcccaggcccgcccaggtgccggctgcgccggaggggccggggccgggggtcgaagccgaagactccccaggcagagaggggggcctgtacgcgctgcaagggccttggctcagtgcctttcaccgcctcaccagccctatgacgctgctaggcggggcggaagacgtggacccggcacagcggggcctaggagaagactgcgcggaccggctcgaagaccacccgctggaagaagcgccggcgcactgcggtgccggcgacgcagggccgccggccgccgtgcgcgtccgcttccagggaggcctggacctcggcacgtgcagcgtgagccccgggtgcgtcgtggtgttcaccatccccagcggctgcacggacagcggcgaaacggcctgcagctccggtttggccccgcaagtgccgcagcagggcccggacggggacctgcaccccagcccgagttaggtgccggcctcagagcagcatccaggctcagagcccccaggcctgtcccgcgcgggcccctttcctcacacccagatagtcgggttcctgctcctgattctagttctccaggtggagggccttccccggcacgagatcccagccgccgccccgccgccggggaaggcgaaggcggagctggggcccctcactgctcttgtcctcatagctag

SEQ ID NO: 117362 - DNA, 2034 bp, synthetic construct
  misc_feature 1..2034: note = Description of Artificial Sequence: Synthetic coding sequence
  source 1..2034: mol_type = other DNA
atgatgcaagagtctggaactgagacgaaatcgaacggctcggccatccagaatggaagtggagggtccaaccatctgcttgaatgcggggggttaagagagggtaggagtaacggcgagacgccggctgttgacatcggagccgcagatttggcccatgctcaacagcagcagcagcaggccctgcaggtagctcgacagctgcttctgcaacaacagcaacagcagcaagtgagtggactcaagtctccgaaaagaaatgataaacagcccgcactacaggtgcccgtgtccgtcgcaatgatgacacctcaggtaataaccccccaacagatgcagcagatcctacagcagcaagtgctgtcaccccagcagctgcaggtgctcctgcaacagcaacaggctctcatgttgcaacaacagcagctgcaggagttttataaaaagcagcaagagcagctacagctgcagctgttgcagcagcagcacgccggcaagcagcctaaggaacagcagcaggttgccacccagcagctcgcctttcaacagcagcttctgcaaatgcagcagctccagcagcagcatctcctatctcttcagagacagggactgctgacaatccagcccgggcaacccgctctgcctttacaaccgttagcccaggggatgattcccacagagctccagcagctgtggaaagaggtgacctcggcccacaccgccgaggaaactacgggtaacaatcattcttctctcgatctgaccaccacttgcgtgtcaagctccgcccccagtaaaacttcactaattatgaacccccacgcatctaccaatggccagctgtccgtgcacacccccaagagggagtctctgtcccatgaggagcacccccatagccatcccctctatgggcacggtgtatgtaagtggcctgggtgtgaagctgtgtgtgaggatttccagtcatttcttaaacatctgaattctgagcacgccttagatgatcgcagcacagctcaatgcagagtgcagatgcaggtagtccagcagctggaactgcaactggctaaggataaggaacgcctgcaggccatgatgactcacctgcatgtgaaaagcacggaacctaaggcagcaccccagccgttgaaccttgtgtctagcgtcaccctgtctaagtcggcatctgaagccagccctcagtcactccctcataccccaaccacacccacagcccccctgacccctgtgacccagggcccttctgtgattacaaccacgagcatgcacactgttggcccaattagaaggcggtattctgataagtataatgtgcccatcagctccgctgatatagcacagaaccaggaattctataaaaatgcggaagttagaccacccttcacatacgcaagtctaatacgccaagccatcctggagagccccgaaaagcaactgacactcaatgagatttacaactggtttacccgcatgtttgcttatttcagacgcaacgccgcaacctggaagaacgcggtgagacataacttatcgttgcacaagtgctttgtgcgggtcgagaacgtcaagggtgccgtatggacggtagacgaagtcgaatttcagaagaggaggccccaaaaaatatcaggcaatccaagcttgattaaaaacatgcagagctcccacgcatattgcactcccctgaacgctgcattgcaggcctccatggcagaaaactcaatacccctgtatacaacggctagcatgggaaatcccactctggggaacctggcgagcgctatcagagaggagctcaatggagccatggaacatactaatagcaatgagagtgatagctctccaggccgtagtccaatgcaagctgtgcatccagtgcacgtgaaggaggaaccattggaccctgaggaagcagagggacctctcagcctcgtgacgaccgcgaaccacagcccagattttgatcatgacagggattacgaagacgagcccgtgaacgaggacatggagtag

SEQ ID NO: 117363 - DNA, 1077 bp, synthetic construct
  misc_feature 1..1077: note = Description of Artificial Sequence: Synthetic coding sequence
  source 1..1077: mol_type = other DNA
atgatgaccccacaggtgatcacaccgcaacaaatgcaacagatccttcaacagcaggtgctgtcgccgcagcaactgcaagttctgctccagcagcagcaggcattaatgctgcagcagcagcagctacaggagttttacaaaaagcagcaggagcaattacagctccagctattgcaacagcaacatgcagggaaacagcccaaggaacaacagcaggtagcaacccaacaactcgcatttcagcagcagctgctccaaatgcagcagctgcagcagcagcatctcttgtcacttcagcgacagggacttctgaccatccaacctggccagccggcactgccactccagcctctcgcgcagggaatgattcccactgagctccagcaactttggaaggaagtaacaagcgctcacacagccgaggagacgacagggaataatcacagtagccttgatctgactactacctgtgtgtcgagctcagcccccagcaagacgagcctgataatgaacccccacgccagcacaaatggtcaactcagtgtacatacacctaagagggagagcctgtcgcatgaggaacacccccactctcatcccttgtacggccacggagtgtgtaagtggccaggatgtgaggcagtgtgcgaagattttcagagttttctgaagcaccttaactctgagcatgccctggacgacaggtccactgctcaatgtagagtgcagatgcaggtcgtacagcaactggaattgcagctggctaaagacaaggagaggttacaggccatgatgacccacttacacgtcaagtctactgagcccaaagccgctccgcagccactgaacctggtgagtagcgtcacgttgagcaagtccgcatctgaagcgtcaccacaaagcctccctcacaccccaaccacccccacaccccctgacagcagacaccccaggccactctgtcatcataatcaccaacacgcccacggaggcacacacccccaagccgtcctgcgtcagattcagagggcgcacttcgtgtctcgttactgtgcagaaccccggatcttgtag

SEQ ID NO: 117364 - DNA, 1509 bp, synthetic construct
  misc_feature 1..1509: note = Description of Artificial Sequence: Synthetic coding sequence
  source 1..1509: mol_type = other DNA
atgatgcaggagtccggtacggaaacaaaatctaacggtagtgctatccaaaacggctccggaggctctaatcacctgcttgaatgcggaggattaagggaggggaggagcaatggagaaactcctgctgtggatattggcgctgcagacctggcgcacgcacaacaacaacagcagcaggccctgcaggtggctcgccagctcctgttgcaacagcaacagcagcagcaggtgagcgggctgaaatcccctaagcgaaacgacaagcagcctgccttacaggtcccagtctctgttgccatgatgacacctcaggtgataacgccacagcagatgcaacagattctgcaacagcaggtgctttctccccaacagctgcaggtgctgttgcaacagcaacaagcacttatgctgcagcagcagcaactgcaggagttttataaaaaacagcaagagcagcttcagttgcagcttctccagcaacagcacgccggaaagcagccaaaggagcagcagcaagtggcgacccagcagttggcatttcagcaacagttgttgcagatgcagcagctgcagcagcaacacttgttatcactgcagcgacaggggctacttaccattcagcccggacaacccgcactccccttgcagcctttggctcagggtatgatccctacagaattgcaacagctctggaaagaggtcacatctgcacataccgctgaggaaacaacgggcaataatcattcctctctcgatctaactaccacttgcgtttcttccagcgccccctccaaaacttctctgataatgaatccacacgcctcaaccaatggccaactgtccgtgcacacccctaagcgagagagcctaagccatgaggaacatcctcacagccaccctctgtacggacacggggtgtgtaaatggcccgggtgcgaagccgtctgcgaggacttccagtcttttttgaagcatcttaatagcgaacacgcattagatgacagaagcacagcccaatgccgggtccaaatgcaagtggtgcagcagctcgaactgcaactagctaaagacaaagaacggctgcaggccatgatgacccatcttcatgtgaagtccaccgaaccaaaagccgccccgcagcctctgaacctcgtgagcagtgtgacgctgtcaaagtctgccagtgaagcatcaccccagtcattaccccacactcccaccacgcctactgcccccctcacacccgtaacacagggcccatctgtaatcaccacaactagcatgcatactgtcggacccatacgaagaaggtacagcgataagtataatgtgcctatatctagtgccgacattgcccagaatcaggagttctataaaaatgccgaggttagacccccattcacatacgcctctctcattcgccaggccatcctggagtctccagagaagaagaagaaagaacggcaaacactgggaaccatgcctatccactcaactcagcagtag

SEQ ID NO: 117365 - DNA, 1470 bp, synthetic construct
  misc_feature 1..1470: note = Description of Artificial Sequence: Synthetic coding sequence
  source 1..1470: mol_type = other DNA
atgatgacgccacaggttatcaccccccaacagatgcagcaaattctgcagcagcaggtgttatcaccacagcagttacaggtgttgctacagcagcagcaggccctcatgctgcagctgcagcaactatggaaggaggttactagtgctcacactgcggaggaaaccaccggaaataaccacagctcgctcgatcttacaacgacgtgtgtttcatcctcagcgccaagcaagacatcgctaatcatgaatccgcatgcctcgactaatggacagctgtcggtgcacaccccaaagcgagaatcactatctcacgaagagcacccccactctcatccgctgtacgggcatggtgtctgcaagtggccgggctgtgaggccgtttgcgaggatttccagagctttctgaaacacttaaatagcgaacacgcgctggatgatcggagcactgcccaatgtcgggttcagatgcaggtcgttcagcaacttgaactgcagctcgccaaggacaaagagcggttgcaggcgatgatgacgcacttacacgttaaatcaacggaaccaaaggcagctcctcagcctttgaatctggtctccagtgtaactttgtcaaaatccgcctccgaggcctccccccagtcacttccccacacacccaccacaccgaccgcccctctcacgcccgtcacgcagggaccgagcgtcataacaaccacatccatgcataccgtgggcccaatcaggaggaggtattccgacaagtacaacgtgcccattagcagcgctgatatcgcgcagaatcaagagttctacaaaaacgcggaggtccgtcctccctttacatatgcatctcttattcgtcaagccattctggaatcacctgagaaacagcttaccttgaacgagatatataattggttcaccagaatgttcgcatattttcggcgcaatgccgcaacatggaagaacgctgtccgccataacttgtctctgcacaaatgttttgttcgagtggagaatgtgaaaggcgcggtatggaccgtcgatgaggttgaattccagaagcggaggcctcagaagatctctggaaatccatcattaattaagaatatgcagtcttcacacgcctattgcaccccgctgaatgcagcactacaggcgtcaatggctgaaaacagcatccctctgtacaccacggcttccatgggaaacccaaccttgggcaatctggccagcgcaatacgagaagagctgaacggcgctatggaacacaccaactctaatgagagcgacagcagtcctggccgcagccctatgcaagctgtgcatccagttcatgtcaaggaggagcctctcgaccccgaggaggctgaaggccctctgtcgttagttactactgctaaccactcacccgattttgaccatgatcgggactatgaagacgagcctgtgaacgaagacatggaatag

SEQ ID NO: 117366 - DNA, 2034 bp, synthetic construct
  misc_feature 1..2034: note = Description of Artificial Sequence: Synthetic coding sequence
  source 1..2034: mol_type = other DNA
atgatgcaagagtcagggactgagaccaaatcaaatggtagtgcgatccagaatggcagcggaggcagtaaccacctgttggagtgtggcgggctccgagagggaagaagtaatggagaaacacccgcagtggacatcggcgctgcggatcttgcccatgctcagcagcaacagcagcaagctctgcaggtggcaagacaactgctcctgcagcagcagcagcagcagcaggtgagcggcctaaagtctcctaaaaggaatgataagcagccagccctgcaggtgcccgttagcgtggctatgatgactccccaggtcataaccccccagcagatgcaacagatcctccagcaacaagttttgtccccacaacagctccaggtgttacttcaacagcagcaagccctcatgttgcagcagcagcagctgcaggagttctataagaagcagcaggagcagcttcaattacaactgcttcagcaacaacacgccggcaagcaacctaaagagcagcagcaggtggctacgcagcaacttgcattccagcagcagctgctgcagatgcagcagctccaacaacaacatctcctgtctttgcagcgacagggcctgctgacgatccagccaggacaacccgctctgccccttcagcccttagctcaggggatgattccaaccgaactgcagcagctttggaaagaagtgacttctgcccacactgctgaggaaaccacagggaacaaccattctagcctggatttaaccactacgtgtgtcagcagctcagcacctagtaagacatccctaattatgaatccccacgcatccactaatggccaactgtccgtgcatacacctaagcgggaaagcctgtcccacgaggagcatccccatagccaccctttgtacggtcacggagtgtgcaaatggcctggctgcgaggcagtttgtgaggacttccagtcttttctcaagcacctgaatagcgagcacgcccttgatgatcggtcaacagcccaatgtagagttcagatgcaggtcgtccagcagctcgagctccagctagcgaaggataaggaaagattgcaagccatgatgacccacctgcatgtgaaatccacagagcccaaggcggccccccagcctctgaatctcgtgtcgagcgtcacactctccaaaagtgcatctgaagcctctccacagagtctaccgcatactccaactacccccaccgcacccctgacccccgtgactcaaggcccatctgtgattaccactaccagtatgcacaccgtcggacctattaggcgccggtactctgacaagtacaacgtgccgatctccagtgcagatatcgcccagaaccaggaattttataagaacgcggaggtcagacctccattcacttacgccagccttattaggcaggctatattggaaagtccagagaaacagctcactcttaacgaaatctataattggttcacccgtatgtttgcctacttccgaaggaacgcagcaacgtggaaaaacgctgtgaggcacaatctctccctgcacaagtgcttcgtgcgggtggaaaacgtcaagggcgccgtgtggacagtggatgaagtggagtttcagaagcgacggcctcagaagatctctggcaatccctctcttatcaaaaacatgcagtcctcccatgcatattgtacacccttgaacgccgcacttcaggcaagcatggctgagaactctatacctctgtataccacggcctccatgggtaaccctactttaggtaatctcgctagtgccattagagaggaactaaatggagcgatggaacacactaacagcaacgaatccgactcgtcccctggcagatcccctatgcaggccgtccaccctgttcacgtaaaggaggaacccctcgacccagaggaagctgagggtccactatctctagtgacaaccgcgaaccacagtccagattttgaccacgatcgcgattatgaggacgagcccgtgaacgaggacatggagtag

SEQ ID NO: 117367 - DNA, 1806 bp, synthetic construct
  misc_feature 1..1806: note = Description of Artificial Sequence: Synthetic coding sequence
  source 1..1806: mol_type = other DNA
atgatgcaggagtccgggacggaaactaagtccaacggctcggctattcaaaacggaagcgggggtagcaatcacctgctcgagtgtggaggacttcgcgagggacgctcaaacggagaaaccccagcagtcgacataggagcagcagatctcgctcacgctcagcaacagcagcaacaggccctgcaagttgctcgtcagttgttgctccaacaacaacagcagcaacaggtgtctggactgaagtcaccaaaaaggaacgacaagcagcctgcactgcagcagcagcaagtggctacacagcagttggccttccaacagcagttacttcagatgcagcaactccagcagcagcatttactgtcactccaacgtcaaggtctgctgactatccaacccggccagccagcgctgcctcttcagcccctagcccaggggatgattccgacagagctccagcagctgtggaaagaggtcacctccgctcacactgccgaagagaccacaggtaacaatcactcaagtctggatcttactactacctgtgtgtcatctagtgctccaagcaagacctcccttatcatgaacccacacgcctccaccaacggccagctgtccgtgcatactcccaaacgcgaatccttaagccacgaggagcacccccacagtcaccctttgtacggccatggggtatgtaaatggcctggttgcgaggctgtttgtgaagattttcagagttttctcaaacatcttaattcagaacatgccctagacgatcgatccaccgcacagtgccgggtccagatgcaggtcgtccagcagttggagctccagttggcaaaagataaggaacgcctgcaagctatgatgacacatctgcacgtgaagtctacagagcccaaggcggcccctcaacctctaaacctcgtctccagtgtaacattgtccaaatccgcctcggaggcctccccacagtctctgccgcatacgcctacaacacccacagcgccccttaccccagtgacacagggcccctcagtcattactaccacatccatgcacacggtcgggcccattcggcgccgctattcggacaaatacaacgtgcctatatcatcggccgatatcgcccaaaatcaagagttttacaagaatgccgaagtgagaccacccttcacgtacgcctcgctgatcagacaggccatacttgagtctcctgaaaagcaactaacgttgaatgagatttacaactggttcacaaggatgtttgcatatttccgccggaatgcagcgacctggaagaatgcagtgagacacaatctgtcgctgcacaaatgcttcgtccgggtggagaacgtgaaaggcgcagtgtggactgtagacgaagtggagttccagaagcgcagacctcagaaaatcagcggaaaccctagcttaattaagaacatgcaatccagtcacgcttactgtactcccctgaacgccgccctgcaggcgtctatggcagagaattctatccccctgtatacaaccgcttccatggggaacccaacactcgggaatttggcctccgcaattagggaagagctcaacggtgccatggagcatactaattcgaatgagtcagacagcagcccaggtagaagcccaatgcaggcggtgcaccccgttcacgtcaaggaggaacctctggacccagaggaagccgagggtcccctgtcgttagtgacaacagctaaccactctccggattttgatcatgatcgggactatgaagacgaacccgtcaacgaggacatggaatag

SEQ ID NO: 117368 - DNA, 675 bp, synthetic construct
  misc_feature 1..675: note = Description of Artificial Sequence: Synthetic coding sequence
  source 1..675: mol_type = other DNA
atgatgactccccaggtgatcacccctcagcagatgcagcagattctgcagcagcaggtgctgtctccacagcagctgcaagtgctgcttcaacaacaacaagcacttatgctccagcagcaacagctgcaagagttctataaaaagcagcaggaacagctccagctccagctgctgcaacagcagcacgccgggaaacagccgaaggaacagcaacaggtcgctacgcagcaactcgccttccagcaacagctattacagatgcagcagctgcagcagcagcatctgttgtcgctccagaggcaggggctgttaaccatccagcctgggcagcccgcattgccattacagcccctggctcaaggaatgatacctaccgaacttcagcagctatggaaggaggtgactagcgctcacacggccgaagagaccactggaaacaaccattcaagtttggacttgaccactacatgcgtgtcaagctccgctccctcaaagacttcgctgatcatgaacccacatgcaagcacaaatggtcaactgtccgtgcatactcccaaaagagaatctctatcacatgaggagcatcctcatagtcaccccttgtatggccacggcgtttgtaagtggcccggatgcgaggccgtatgtgaggacttccagagctttctctag

SEQ ID NO: 117369 - DNA, 2040 bp, synthetic construct
  misc_feature 1..2040: note = Description of Artificial Sequence: Synthetic coding sequence
  source 1..2040: mol_type = other DNA
atgtttcagtgtgtttttagtagctcagtgttgcaaccccattctacatcatgcttattcaaacatctattctaccactccgctacgcccgccagccaaaagcagcccgagcctatttattcaaagaaaactgagattcaacgccagacagtgcgagccccatttgccaaattgttcatttttagcgctctgcaggtggcccgccagctgttgctacagcagcagcagcagcagcaagtgtccgggctgaagtctcctaaacgcaatgataaacagcccgccctccaagtgcctgtgagcgtcgcaatgatgactccccaggtgattacgccgcagcagatgcagcagatactccagcaacaagtgctcagcccacagcagctgcaggtgctgctccagcagcagcaggcactcatgctgcagcagcagcagctgcaggaattttataagaagcaacaggagcagctgcagctgcagctgctgcagcagcagcacgcagggaaacagcctaaagaacagcagcaagtggccacgcaacagctggccttccagcagcagttgctgcagatgcagcagcttcagcagcagcacctgctgtcactgcagagacagggccttcttaccattcaacctgggcagcctgcactaccactccaacctctggcgcaggggatgatcccaaccgagctacagcagttgtggaaggaagtgacatcagcccataccgccgaagaaactacgggtaataaccactcctccctggaccttacaaccacatgtgtatcttcatccgctccatcgaaaactagccttattatgaacccccatgcgtccactaacggccagctgtccgtccacactccgaagagggagtctttgagccacgaagagcaccctcacagccaccctctctatggtcacggagtgtgtaagtggccgggttgtgaagcagtctgtgaggacttccagagctttctcaaacatctcaattcggagcacgctctggacgacaggtccactgctcagtgtcgagtgcagatgcaggtggtccagcagctggaactccaactagctaaggataaggagagactgcaggctatgatgacgcatctgcatgtgaagtctaccgaaccaaaagccgcgccacagcccctaaacctcgtcagctctgtcaccctgtccaagtctgcatcggaggcatctccgcaatctctcccacacactccgaccacacctacagctccgctgacgcctgtcacccagggaccttccgtgataaccacaacttccatgcataccgtaggccccatcaggcgccgctattctgataagtacaatgtaccaatcagttccgcggatattgcacagaatcaggagttctacaaaaacgcagaagttagacctccttttacttatgctagcttgatccgccaggccattctggaatcacctgagaagcaactgacgctgaacgagatttacaattggtttacccggatgtttgcctacttcaggagaaacgccgctacctggaagaatgctgtgaggcataacctgagtcttcacaaatgttttgtcagagtcgaaaacgttaaaggcgccgtttggaccgtggatgaggtcgagtttcaaaaacgtcggccgcagaaaattagcggaaacccctcactaatcaaaaacatgcagagttcacatgcatattgtactcccctgaatgccgcacttcaggcatcgatggcagagaattccatccccctctacaccaccgcatctatgggaaaccctacactgggcaacctggcgtccgcgatcagagaggagctgaacggggctatggaacacacgaactcaaatgagtctgattcctcaccaggtcgctcaccaatgcaggcagtccaccccgtacacgtgaaggaagagcccttggatccagaggaagcagaggggcccttgtcacttgtaactaccgcaaaccactcgccagattttgatcatgatagggattacgaggatgagccagtcaacgaggacatggagtag

SEQ ID NO: 117370 - DNA, 372 bp, synthetic construct
  misc_feature 1..372: note = Description of Artificial Sequence: Synthetic coding sequence
  source 1..372: mol_type = other DNA
atgatgactccccaggttatcactccccagcagatgcagcaaattctgcaacaacaggtgctgtcccctcagcagctccaggtcctccttcagcaacaacaggctctcatgttgcagcagcagcagctgcaagaattctacaagaaacaacaggaacaactgcagttgcagttgctgcagcagcagcacgcgggcaaacagccaaaggagcagcagcaggtggccactcagcagctggccttccagcaacagctgctgcagatgcagcagttacaacagcagcatctcctgtcattgcaaaggcaggggctgcttacaatccagcctggccagcccgcgcttccactccagcccctggcgcaaggcatgtag

SEQ ID NO: 117371 - DNA, 2034 bp, synthetic construct
  misc_feature 1..2034: note = Description of Artificial Sequence: Synthetic coding sequence
  source 1..2034: mol_type = other DNA
atgatgcaggagtcagggacagaaaccaagtccaacgggtccgccattcagaatggtagcggagggagtaatcacctgttagagtgcggcgggctgagggagggccgctcgaacggggaaacaccggccgtggacatcggcgccgcagatctggctcacgcccagcagcagcagcaacaagcccttcaagtggccaggcaactgctgttacagcagcagcagcagcagcaggtctctgggctcaaatcacccaaaaggaacgacaagcagcctgcgctccaagtgccggtgagcgtcgccatgatgactccacaggtgatcacaccacagcagatgcaacagattctccagcagcaggttctgtcccctcagcaactgcaggtcttactgcagcagcaacaggctcttatgttgcagcagcagcaactccaggagttctacaaaaaacagcaggagcagcttcagctccaactgctacaacaacaacatgcaggcaaacaacccaaggagcagcagcaggtggcaacacagcagttagccttccagcagcagttactgcagatgcaacaattgcaacagcagcacctgctctctcttcagaggcaggggttactcaccatccagcccgggcagccagccctgccattacaacccctcgcacaaggtatgatcccaactgagctgcaacagctgtggaaggaggtgacgtccgcccatacagccgaggaaacaaccgggaataaccacagttctctggacctcactactacatgtgtcagttcctcagcccccagcaaaaccagcctcattatgaatcctcacgcatctacaaatggtcagctgtcggtgcacactccaaagagggaatccttgtcccacgaagaacacccgcattcccacccgttgtatgggcatggcgtctgtaagtggccgggctgcgaagccgtctgtgaagacttccagtcgttcctcaagcatctgaactctgagcacgctctcgatgaccggagcacagcccagtgtcgcgtgcaaatgcaggtggtacagcaactggaactgcagctcgcaaaggacaaggagcggttgcaagccatgatgacacacctgcacgtgaagtctacagagccaaaggctgcacctcaaccactcaatttggtgtctagcgtgacactcagtaagagcgcgtcagaggcctcaccccagtctctgccacacactcctacaacacccacagccccactcaccccagttactcaagggcctagtgtcattactaccacctctatgcatacggtagggcccattcgccgacggtactccgacaaatataacgtcccaatttcctccgcggacattgctcagaaccaggagttttataagaatgcggaggttaggcccccattcacttatgccagccttataagacaggccattttggagagcccagaaaagcagctgacgctgaatgaaatctacaactggttcaccagaatgtttgcctatttcaggagaaatgccgcaacctggaaaaatgcggttagacacaacctcagcctgcataagtgttttgtgagagtggagaacgtcaagggagccgtttggaccgtcgacgaagtggaatttcagaaacgaaggcctcagaagatatccgggaacccaagcttaattaagaacatgcagtcaagccacgcttattgcacgcccttaaatgccgcgctgcaggcaagcatggcagagaattccattccattgtacacaacagccagcatggggaatccaactttaggcaacctcgcgtccgcaattagggaagagttgaatggcgccatggagcacacgaactctaatgaatccgacagttcccctggtcggtccccaatgcaggctgtccaccccgtgcatgtcaaagaggaacctctggatccagaagaggccgaaggaccactctccctggtgactactgccaatcacagccccgactttgaccatgatcgcgattacgaggatgagcccgtcaacgaagatatggaatag

SEQ ID NO: 117372 - DNA, 345 bp, synthetic construct
  misc_feature 1..345: note = Description of Artificial Sequence: Synthetic coding sequence
  source 1..345: mol_type = other DNA
atgatgcaagagtctggcacggaaactaagtcaaatggaagcgcaatacagaacggcagtgggggtagtaaccatctgctggaatgcggaggcctccgcgaaggcaggtctaatggcgagaccccagctgtcgatatcggggctgccgatctggctcatgcacagcagcagcaacaacagtggcatctcatcaatcaccagccttctcggagccccagttcgtggctcaagcggctgatcagcagtccctgggagctggaggtactccaggtacccctgtggggtgccgtcgccgagacgaaaatgtctggccctgtctgccagccaaacccgtctccattctag

SEQ ID NO: 117373 - DNA, 669 bp, synthetic construct
  misc_feature 1..669: note = Description of Artificial Sequence: Synthetic coding sequence
  source 1..669: mol_type = other DNA
atgatgcaggagagtgcaacagaaaccatttccaacagcagcatgaaccagaatggtatgtctaccctgtcatcccagctagatgccggctcacgagacggtaggtcaagcggcgacacatccagcgaggtgtctacagttgaactccttcacctccagcaacaacaggcccttcaagctgctaggcagctcctcctgcagcagcagacatcgggcctaaaaagtcctaaaagcagcgacaagcaaagaccactacaagtcccagtttctgtggccatgatgaccccacaggtcatcacaccccagcagatgcagcagatactgcagcagcaagtgctgtcaccacagcagctacaggccctgctgcaacagcaacaggccgtaatgctgcagcaacagcaactgcaagaattttacaagaaacagcaggaacagttgcatttgcagttactacaacagcagcagcagcagcaacagcagcaacaacaacaacagcaacaacagcaacagcaacagcagcagcagcaacagcaacagcagcagcagcagcagcagcagcagcagcagcagcaacatcctggtaaacaggcaaaagaacagcagcaacaacaacaacagcagcaacaactcgctgcccaacagctagtttttcagcagcagctcctgtag

SEQ ID NO: 117374 - DNA, 2148 bp, synthetic construct
  misc_feature 1..2148: note = Description of Artificial Sequence: Synthetic coding sequence
  source 1..2148: mol_type = other DNA
atgatgcaagaaagcgcaacagaaaccatctcgaattcgtctatgaatcagaatggcatgtctaccttgtcttcacaacttgacgcaggcagccgagacggcaggtcttcgggggacaccagtagtgaagtatcgacagtagaattattgcatctgcaacagcaacaggccttacaggccgccagacaactcctgttgcagcagcaaactagtggcttaaagagtccaaaatcatcagataaacagagaccactgcaggttccggtaagcgtcgctatgatgacaccccaggtgatcacaccccagcaaatgcagcagatccttcagcagcaggtgctctcaccacagcagttacaggcgctgctgcagcaacagcaggctgtgatgctgcagcagcaacagttacaggaattttacaagaagcaacaggaacagctgcatttgcagctgctgcagcagcaacaacagcagcaacaacagcagcaacagcaacagcaacagcagcaacaacagcagcagcagcagcagcagcaacaacagcaacagcagcagcagcagcagcagcagcagcagcacccagggaagcaagccaaagagcagcagcagcagcaacaacagcagcagcagttggccgcacagcagcttgttttccaacagcaacttctacagatgcagcaattacagcagcagcagcacctcctgtccctgcaaagacagggacttatctccattccccccggccaggcagccctgccggtgcaaagcctgcctcaggccggtttgtccccagccgagatccagcagttatggaaagaggtgaccggcgtccattctatggaggacaacggtatcaaacacgggggcctggacctaacaacaaataactcctcttccaccacctccagcaacacatccaaggccagcccacccataacccaccattctatagttaatggccagtcttccgtgctgagtgccagacgagactcctcctctcatgaagagaccggcgcgtcacacactctatacggccatggagtatgcaaatggcctgggtgtgaaagtatctgtgaagactttggacagtttcttaaacatctgaataatgagcatgctttagatgacagaagcaccgcccagtgccgcgtccaaatgcaagtggtacaacagttagaaattcagttgtccaaggagcgcgagagacttcaggccatgatgacccaccttcatatgagaccttccgagcctaaaccctccccaaagccccttaatctggtctcctccgtcacaatgtcaaaaaatatgctggaaacatccccccaatcactcccgcagacccccacgacaccgaccgccccagtcactcctattacacaaggcccatctgtcatcacccctgctagtgtgcccaatgtgggagccatcaggcgcaggcatagtgataaatacaacattcctatgtccagtgagatcgctccaaactatgagttttacaagaacgcggatgtgcggcccccgttcacatacgcgactcttatccgacaggcgatcatggagagtagcgacagacaactcacgctgaatgaaatctacagctggttcacccggacgtttgcctactttaggcggaacgccgccacttggaagaatgcggtaaggcacaatctgtcattacataaatgttttgtccgcgtagaaaacgtcaaaggtgcagtgtggacagtcgacgaagtggaatatcagaaacgccggagccagaagatcactgggagccctaccctggtcaaaaatattcccacgtccctcggctatggcgctgcattaaacgcctctttacaggccgccttagctgagtcctctttaccacttctgtcgaaccctggattgattaacaatgcatcttcagggctgctgcaggcggttcacgaagatctaaacggctccctagaccatatagattcaaatggaaatagttcacccggatgtagcccacagccgcacatacattctattcatgtgaaggaagaacccgtgattgccgaggacgaggactgtcctatgtctctggtgacaactgccaaccactctccagaacttgaggatgatcgggagattgaagaagagccactctctgaagatctggagtag

SEQ ID NO: 117375 - DNA, 1299 bp, synthetic construct
  misc_feature 1..1299: note = Description of Artificial Sequence: Synthetic coding sequence
  source 1..1299: mol_type = other DNA
atgatgcaggagagcgccacggagactatcagcaacagcagtatgaaccagaacggaatgagcaccctcagtagtcagttagacgcaggatcgcgggacggtaggagctcaggggacacgtcatctgaggtgtccacagtcgaactcctgcacctccagcaacagcaggccctgcaggctgcgcggcaactgctgttacagcagcaaacatcaggactaaagagtccaaagagctccgacaaacagaggccgctacaggtgcctgtatctgtggctatgatgactccacaggtgatcacacctcagcagatgcagcaaatccttcagcagcaggtgctgtcaccccagcagctgcaggcgctgctccagcagcagcaagctgtaatgttgcagcagcagcagctgcaggagttttataagaaacaacaagaacagctgcacctgcagctgctgcaacagcagcagcagcaacagcagcagcagcaacagcagcagcagcagcagcagcaacagcaacagcagcagcaacagcagcaacagcagcagcagcagcagcagcagcagcaacaacaacaccctggtaagcaagccaaggaacaacagcagcagcagcaacaacagcaacagcttgcagcccagcagttagtcttccagcaacagctcctacagatgcaacaactccagcaacagcagcacctcttgagtctgcagcggcagggcctaatctcaatccctccggggcaggccgcccttcccgtccagagtctgccacaggcaggactgagccccgccgagatccagcagctctggaaagaggttacgggtgtgcactcgatggaggacaatggtatcaagcatggaggtcttgacttaaccacaaacaactcgtctagtaccaccagcagcaatacctctaaagcttcacccccgatcactcatcactccatcgtgaatggccaatcctctgtcctatctgctcggcgcgactcgagcagtcatgaggaaactggagcgagccacaccctatacggtcatggtgtctgtaaatggcctggctgtgagagcatatgtgaggacttcgggcagtttctcaagcatctcaacaatgagcacgcgttggacgaccggtccaccgctcaatgtcgcgtgcagatgcaggtagtccaacagctggagatccagctcagcaaagaaagggaaagattgcaagcgatgatgacccatctgcacatgagaccctcagaaccgaagccctcccccaaacccgttagcgcctactgtttcatcaactcaaagtag

SEQ ID NO: 117376 - DNA, 1371 bp, synthetic construct
  misc_feature 1..1371: note = Description of Artificial Sequence: Synthetic coding sequence
  source 1..1371: mol_type = other DNA
atgcaggaaagcgccacagaaaccatctcaaattcatcaatgaatcagaatggaatgtctacactgtcctctcagctcgacgccggctcacgtgatggtagaagcagcggtgacacaagcagtgaagttagcactgtggagcttctgcatctgcagcagcagcaggccctccaggccgcaaggcagttacttcttcaacaacaaacaagtggactgaaatctccgaaatcatccgacaagcaacggcctctccaggagctccttcctgaaaccaaactttgtatttgtggacacagttcaggtgacggacatcctcacaacacctttgccgtaccagtgagtgtggcaatgatgaccccacaggtaatcacaccgcagcagatgcagcaaatcctccaacagcaagtgctctcaccccaacagcttcaagcactgctgcaacagcaacaggctgttatgctgcaacagcagcagcttcaagaattctacaagaaacaacaggaacagctgcatctgcagctactccaacagcaacagcaacagcagcagcagcagcagcagcagcagcaacagcagcagcaacaacagcagcaacagcaacagcagcaacagcagcaacagcagcaacagcaacaacagcagcagcatccgggcaagcaggccaaagagcagcagcagcagcaacagcagcagcagcagctcgctgcccagcagctagtctttcagcagcaattgctgcagatgcaacagcttcagcaacagcaacatctcctcagcctgcagcggcaggggttaatctctatcccacccggtcaagccgctctgcctgttcaaagcttacctcaagccggactgtccccagctgagatccaacagctctggaaggaggtaacaggtgtccatagcatggaggacaacggcataaagcacggaggcctggacctgaccactaacaacagttcaagtacaacgagcagtaacacttctaaggcctccccgcccatcacccatcactccatagttaatggtcagtcgtccgtcctcagtgcccgcagggattcatcttcgcacgaggagactggtgcgagtcacaccctatatgggcatggcgtttgtaagtggcctggttgcgaatccatatgcgaggattttggtcaattcttaaagcatctcaacaatgagcatgcactggacgatagatccaccgcccagtgcagagtccagatgcaggtagtgcagcagttagaaatccagttgtcaaaggagcgcgagagactccaggcaatgatgacgcaccttcatatgcgccccagtgagccaaagccctcccccaagcccgtgagtgcctactgttttatcaatagcaaatag

SEQ ID NO: 117377 - DNA, 1872 bp, synthetic construct
  misc_feature 1..1872: note = Description of Artificial Sequence: Synthetic coding sequence
  source 1..1872: mol_type = other DNA
atgatgaccccccaagttatcacaccacaacagatgcagcagatcttgcagcagcaggtgctgtccccacagcagctgcaggcactgttgcaacaacagcaggccgtgatgctgcagcaacagcagttgcaggagttctacaagaaacaacaggaacagctccatctacagctgctgcagcagcaacagcagcagcagcagcagcagcaacagcagcagcagcaacagcaacagcaacagcaacagcaacagcagcaacaacaacagcagcagcagcagcagcaacagcagcaacagcaccctggcaaacaagctaaagaacagcagcagcaacagcagcagcagcagcagctcgctgcccagcagctggtattccagcaacaattgttgcagatgcagcaattgcagcagcaacaacacctcctcagtctccaaaggcagggattaatttcaatccctccaggacaggctgctctgccggtccagtccctgccacaggccggactgtctccagctgagattcagcaattatggaaggaagtgacaggtgtgcattctatggaagacaacgggatcaaacacggtgggttggatctcacaactaacaatagcagctctacaacctcctcaaacacatccaaagcttcaccccctataacacaccattctatcgtcaacggtcagagttcagtgcttagtgcccgcagagattcgtccagccacgaagagacaggcgcaagtcacactttgtacggtcacggcgtgtgcaagtggcctggttgcgagagtatttgcgaagattttggccagtttctcaagcacctgaacaacgaacatgctttggatgatcggagcactgcacagtgtcgagttcagatgcaagtggtgcaacaactcgagatccagctctctaaggaacgcgaacgtctgcaggctatgatgactcacttgcacatgcgtcccagcgagccgaaacccagccctaaacctctcaatctggtgtcctccgttaccatgagcaaaaatatgttggaaaccagtccacaaagtttgccacagaccccaactacgcccactgcccccgtgactccaattacacaggggcccagcgtaattacacccgcttccgttcccaacgttggggctatcagacgaagacactcagataaatataacattcctatgagttccgagatcgcaccaaattacgagttctacaagaatgccgacgttcgccctccttttacctacgctaccctgatccgccaggcgatcatggagagctcagatcggcagcttaccctgaatgagatctactcctggttcacaagaactttcgcgtattttcgtcggaacgcagcgacttggaaaaacgccgtgcgacataacctctctcttcataagtgtttcgtaagagtggagaacgtgaagggggctgtgtggactgttgacgaagtggagtatcaaaagagacggagccagaaaattaccggctcccccacattggtgaagaacatccccacaagcctgggatatggcgcagctcttaatgcttcgctgcaagccgcattggcagagtcatccctgccgcttctgtcaaatcctggccttatcaacaacgctagttccgggttgcttcaggcagtacatgaggacctaaatgggagtctggatcacatcgattccaatggcaacagctcaccaggctgttcaccacaaccccatatccatagtattcacgtgaaagaagaaccagtaatagcagaagatgaggactgccccatgagccttgtgaccacagccaatcactcacccgagctggaggatgatcgggagatagaggaggagccgctatccgaagacctcgagtag

SEQ ID NO: 117378 - DNA, 1593 bp, synthetic construct
  misc_feature 1..1593: note = Description of Artificial Sequence: Synthetic coding sequence
  source 1..1593: mol_type = other DNA
atgatgacacctcaggtgattactccacagcaaatgcagcagatcctccagcaacaggtcctctctccccagcagctgcaagctctgcttcagcagcagcaggctgtgatgttgcagcagcaacagcttcaagaattttacaaaaaacagcaagagcaactccacctgcagctgctgcagcaacagcaacagcagcagcagcaacagcagcagcaacagcagcaacagcagcagcagcagcagcaacaacagcagcagcagcaacagcaacagcaacagcaacagcagcaacagcagcacccagggaagcaagctaaagaacaacagcagcaacagcagcagcagcagcagctggcagctcagcaactggtgtttcagcaacagctcctgcagatgcagcaactgcagcaacagcagcatttgttgagcttgcagagacagggtctcatctcaattccacctggccaggctgcactacctgtgcaatccctgcctcaggctggccttagtccggccgagattcagcaactttggaaggaggtaaccggcgtgcactccatggaagacaacggaataaaacacggggggttagacctgaccaccaataatagttcgtcaactacaagtagcaacactagcaaagcctccccacccatcacccaccattctattgtaaacggccagagcagcgtccttagtgcccgcagagatagttcctcccacgaggagaccggagctagccacacgctgtacggccacggtgtctgtaagtggccaggctgcgaatcaatctgcgaagatttcggacagtttctgaaacatctgaataacgaacatgcgctcgatgaccgctccactgctcagtgtagagtccagatgcaggtggtccagcagttggagatacaactgtctaaagagagggagcgtctgcaagcaatgatgacccatctgcatatgcggcctagcgaaccgaagcctagtccgaaacctgcgataatggaaagcagcgaccgacaactgacattgaatgagatttatagttggttcacaaggaccttcgcttactttcgccggaacgccgcgacctggaaaaatgccgtccggcacaacctttcactccataagtgttttgtgcgcgtggaaaacgtgaagggcgcagtctggactgtcgatgaggtcgagtatcagaagcgacggagtcagaaaattactggctccccgactcttgtgaaaaatattcctaccagtctgggttatggggccgcgctcaatgccagcctgcaggcagcgctggccgaaagctccctgcccctgctcagtaaccctggactgataaataacgctagtagcggcttacttcaggctgtccatgaggacctgaatggctcactggaccacattgattctaacgggaacagctcaccaggttgttctccgcaaccacacatccactcaattcacgtcaaggaagagcctgtcatcgccgaagacgaagattgtccaatgtcgttagtcaccaccgccaaccacagcccagaactggaggatgatagagaaatcgaagaggaacctttgtctgaagacctggagtag

SEQ ID NO: 117379 - DNA, 2148 bp, synthetic construct
  misc_feature 1..2148: note = Description of Artificial Sequence: Synthetic coding sequence
  source 1..2148: mol_type = other DNA
atgatgcaggagtccgcaactgaaacgatttctaattctagtatgaatcagaatggaatgtcgactctctcatcccagttagacgctggatctagagatggtcgcagctccggggatacaagctccgaagtctcaactgtggaactgctgcacctgcagcagcagcaggcactacaggcagccagacagttactgttgcagcagcagacatctggcctgaagagtccaaagtcttccgacaagcagagacccttgcaagtccctgtcagcgtggccatgatgacaccccaagtgatcaccccccaacaaatgcagcaaattttacagcagcaggtcctgagtccgcagcaactgcaggctctgctccagcagcagcaggcagtaatgctccagcaacaacagcttcaggaattctataagaagcagcaggagcagctgcacctccagctgttgcagcagcagcagcagcagcagcagcagcagcaacagcaacagcagcagcagcagcagcagcagcagcagcaacagcagcagcagcagcagcagcagcagcagcagcaacagcaacagcagcatcctggaaaacaggccaaggaacagcagcagcagcagcagcagcagcaacaactggctgctcagcagctcgttttccagcagcagctcctccagatgcaacagctacagcagcagcagcatctgttgtcgttacagagacagggcctcatctcgatcccgccaggtcaggctgcgctccctgtacaaagcctcccccaggctggcctgagcccggccgaaattcagcagttgtggaaggaagtgactggcgttcacagcatggaagacaacggaattaagcatggtggccttgatctgacaactaataattctagctcaactaccagtagcaatactagcaaggcttccccacccatcacacatcacagtatcgtgaacggacagtccagcgtcctttcagcacgcagggatagctcctcccacgaggaaacaggtgcctctcataccctttatggccacggtgtgtgcaagtggccggggtgcgaatcgatctgcgaagactttggtcaattcttgaagcatctgaacaacgagcatgcgctcgatgaccgctcaactgcccagtgtagagtacaaatgcaggtggttcagcaactcgagatccagctctccaaagaacgcgaacggttacaggccatgatgactcacctgcacatgcgtccatccgagcccaagccaagcccgaagccactgaaccttgtctcctctgtgaccatgtctaagaacatgctggagacctccccgcagtccctcccccaaactcccacaactccaaccgcgcctgtcactcctataacccagggcccgtcagttatcacccctgcctcagtgcctaacgtcggtgccatccgccggcggcactccgataaatacaatatccctatgtcctcggagattgcccccaattacgagttttacaaaaacgctgacgtgcgcccacctttcacttacgcgacactgattaggcaggctattatggagagctcagatcggcagctgaccctcaatgagatctactcctggttcaccagaacattcgcctacttcagacgcaacgccgccacatggaagaacgcagtacggcataacctttccttgcataagtgttttgtcagagtggagaacgtcaaaggggccgtgtggaccgttgatgaagtagagtaccaaaagagacggtctcaaaagatcaccggttcaccaacactggtcaaaaatatcccaacttccctcggctacggagccgcactgaacgctagcctgcaagcagcactggcagaaagttctctgcccctcttaagcaatcccggtctgattaacaatgcctcctcagggctgcttcaggccgtccacgaggatctgaatggaagtttggatcatattgactcaaacgggaatagcagcccagggtgttccccccagcctcacattcactcaattcatgtgaaggaggaacctgtcattgctgaagacgaagattgtccgatgtctctcgtcaccacagccaatcactcccccgagcttgaggacgaccgggagattgaggaagaacccctctctgaggacctagaatag

SEQ ID NO: 117380 - DNA, 1149 bp, synthetic construct
  misc_feature 1..1149: note = Description of Artificial Sequence: Synthetic coding sequence
  source 1..1149: mol_type = other DNA
atgatgacgcctcaggtcattacccctcaacagatgcagcaaatccttcagcagcaggtcctctctccccagcaactgcaagctttattgcagcagcagcaggccgtaatgctgcaacaggatttccttgatagtgggttagaaaacttcagggctgcgctggaaaaaaatcaacaacttcaagaattctacaagaaacagcaggaacaactccatctgcagctactacagcagcagcagcaacagcagcagcaacagcagcagcagcagcagcaacaacagcaacagcagcagcaacaacagcaacagcagcaacagcagcagcagcagcagcagcagcagcagcaacatcccggaaagcaggccaaggaacagcagcagcagcaacagcagcagcagcagttggctgctcagcagctcgtgttccaacaacaactacttcagatgcaacaactccagcaacagcagcatctcctctctctacagagacaaggcttaattagcattcccccagggcaggcagccttacctgttcagagcctgcctcaggccggattaagtccagccgaaatacagcagctgtggaaggaagtcacgggggtccacagtatggaagacaatggtataaagcacggtggactggatctaacaaccaataatagctctagtaccactagttctaacacctcaaaggcgtcaccccccatcacacaccattcgattgtgaacggccagagctctgtcctgtctgccaggcgcgactcatccagtcacgaagaaaccggcgcctctcacactctgtacggccatggtgtatgcaaatggcctggctgcgaatccatctgcgaagatttcgggcaattcctgaaacatttgaataatgaacacgccttagatgataggtccaccgcacagtgccgcgtccagatgcaagtcgtacagcaacttgagattcagctgagtaaggaaagagaacggctccaggctatgatgacccacctacatatgcgccctagcgaaccgaaaccctctcccaaaccaaacatctgcaaagtcacataccgctgcatttggatgttcctgcgcttctcaaattatgccgaggtcctactgtacatccctgagaagctgacaccagtcgcactctag

SEQ ID NO: 117381 - DNA, 2199 bp, synthetic construct
  misc_feature 1..2199: note = Description of Artificial Sequence: Synthetic coding sequence
  source 1..2199: mol_type = other DNA
atgatgcaagagtcggctacagagacaatatctaactcatctatgaaccagaatggcatgtctacactgagtagccaactcgatgccggttcccgggacggaaggagcagtggagatactagttcagaagtttctacagtggagctgctgcacttacagcagcaacaggcgctccaggctgcccgccaactcctgctgcagcagcaaacctcaggcttaaaatctccgaagtcgtccgataagcaaaggcctctccaggtacctgtgtccgttgccatgatgactcctcaggtcatcacaccccagcagatgcagcagatcctccaacaacaagtccttagtccccagcagttgcaggcactgctgcagcagcaacaggcggtcatgctccagcaggactttctggattccggattggagaattttcgagccgccctcgagaagaatcagcagctccaagagttttacaagaagcaacaagagcagttgcatttgcagctgctacagcagcagcagcagcagcagcaacaacagcagcagcagcagcagcaacaacagcagcaacagcagcagcagcaacagcagcagcaacagcaacagcaacagcagcagcagcagcaacaacatcctggcaaacaggctaaagaacaacagcaacagcagcagcagcagcagcagctggccgcacagcagctagttttccagcaacagttattacagatgcagcagcttcagcagcagcaacacctgctttcgctgcagaggcagggactcatctcaattccgcccggccaagctgctctgcccgtccaatccttgcctcaggctggtctcagccctgccgagattcagcagctttggaaagaagttactggggtgcactcaatggaggacaacggcatcaagcacggaggtcttgatttgaccaccaataattctagctcaacaacctcctctaacaccagcaaggcatccccaccaatcacccaccatagcatagtgaatggacaatccagcgtgctgagcgcaagacgcgactcttctagccacgaagaaaccggtgcatctcataccctgtatggtcatggtgtttgtaagtggccaggatgtgagagcatttgtgaagactttggacaatttctcaaacacttgaacaatgagcacgcactggatgaccgcagcacggcacaatgccgggttcagatgcaggtggttcagcagttggagatacagttgagcaaggagagagagcgtctgcaggctatgatgacccatctccacatgcgacccagcgaacctaaacctagccctaagcccctaaatttggtgtcaagcgtgaccatgtcaaagaacatgttagagacctctccacaaagcctgcctcaaacccccacgacacccacagctccagttacccctatcactcaaggaccttctgttattacccctgcgagcgttcccaatgtgggtgctatccgccggcgccactcggataagtacaatatacctatgtccagcgagatcgccccaaactacgagttctataagaacgcagacgtacgccccccctttacgtacgcaacacttatccgccaagcgataatggagagttcagacagacagcttacgctaaatgagatttactcttggttcactcgaacctttgcatacttccgccgcaatgctgccacatggaagaatgcggtgaggcacaacctctcactgcataagtgttttgtgcgcgttgagaatgtgaaaggtgcggtttggaccgtagatgaagtagaatatcagaagcggcgaagccagaagatcactgggagccccaccctcgttaaaaatatcccgactagcctgggctacggggcggccctcaacgccagtctgcaggctgcgctcgccgaatcctccctcccacttctctctaaccccggacttatcaacaatgcatcatccgggttgctccaggctgtccacgaggacctgaatgggagtttggaccacattgacagcaacggaaatagctctcctggctgttcaccacagcctcatatacatagcatccatgtcaaggaggaaccagtgatagccgaagacgaggattgtcccatgagcctggttacaaccgcaaaccatagcccggagctggaggacgaccgcgagatagaggaggagccgctttccgaggacctcgagtag

SEQ ID NO: 117382 - DNA, 2223 bp, synthetic construct
  misc_feature 1..2223: note = Description of Artificial Sequence: Synthetic coding sequence
  source 1..2223: mol_type = other DNA
atgatgcaggaaagcgcaacagagaccatcagtaattcgtcaatgaaccagaacggcatgtccacgctctcgagtcagctcgacgctggatctcgcgacggccgctcatctggggacacctccagtgaggtgtctactgtggagttgttgcacctgcagcagcaacaagccctgcaggcggctaggcagttgctgctccagcagcagacctcaggcctgaagtctccaaaaagttctgacaagcagagacccctccaggaactgctacccgagacgaagctgtgtatctgtggccattcatctggcgatggccacccacataacactttcgcggttcctgtcagcgtggccatgatgacgcctcaggtgatcaccccccagcagatgcagcagattctccagcagcaggttctgagtccacagcagctccaagccttactacagcagcaacaggccgtgatgctacagcagcaacaacttcaggaattctataagaagcaacaagaacaactgcacctccagttgttacagcaacagcagcagcaacagcagcagcaacagcagcaacagcagcaacagcagcagcagcagcagcagcagcagcagcagcagcaacagcagcagcaacagcagcagcagcaacagcaacaccccgggaagcaggcaaaagagcaacagcagcagcagcagcagcaacagcagctcgcagcccaacaactggtgtttcaacagcagttgctgcagatgcagcagcttcaacagcagcagcatctgctgtcccttcagaggcagggacttatcagcattcccccggggcaggctgcattacctgtgcagtctcttccacaggcagggttgtctcctgcagagattcagcagctgtggaaggaggtgactggcgtgcacagcatggaagacaacggcatcaaacatggtggtctcgacctcactacaaataatagcagctccacaactagtagcaatacttccaaagcctcgccacccattacgcaccacagtatcgttaacggccaatcttccgttctctccgccaggcgtgatagctcctcacacgaggaaacaggtgcctctcacaccctgtatgggcacggggtgtgcaaatggccaggctgcgagtccatttgcgaggattttgggcaattcctgaagcacttgaataacgagcacgcattggatgaccgctctacggcacaatgcagggtgcagatgcaggtcgtgcaacagcttgaaatacagttgtccaaagaaagggaacgcctccaggctatgatgactcacctccatatgcgaccatcagagcctaagccatcccccaaacctctaaatctcgtgagtagcgtgaccatgtctaagaacatgctagaaacctcacctcagagtcttccccagactcctacgaccccaaccgcgcctgtaacacctatcacgcagggacctagtgtgatcactccagcctcagtacctaatgttggggcaatacgacggcggcattcggataagtacaatatcccaatgtcctccgagatcgcccctaattacgagttctacaagaatgctgacgttcggcccccctttacttacgccaccctgattcgtcaagccatcatggagtcatcagatcgacagctcacactgaacgaaatctacagctggtttacccggaccttcgcatacttcaggaggaatgcagctacttggaagaatgctgtgcgtcacaatcttagcctgcataaatgctttgtcagagtcgagaacgttaagggggcagtctggaccgtagatgaggtggaataccagaaaagaagaagccaaaagatcaccgggtcaccgactcttgtcaaaaatatacccaccagcctcggatatggtgcagccctgaatgcgtctttacaagccgccctagctgagagcagcctgcccctcctgtccaaccctggcctgataaataatgcatccagcgggctcctgcaagcagtgcacgaagacctgaacgggtcactggatcatatcgactcaaatgggaatagctcccctggctgttcaccacaaccacacatccacagtatccacgttaaggaagaaccagtcatagctgaggacgaggattgtcctatgagcttggtgaccacagctaaccactcccccgaactcgaagacgacagagagattgaagaagaacccctgagcgaagaccttgaatag

SEQ ID NO: 117383 - DNA, 1191 bp, synthetic construct
  misc_feature 1..1191: note = Description of Artificial Sequence: Synthetic coding sequence
  source 1..1191: mol_type = other DNA
atgcccaatccccggcctggcaagccgtcagcaccaagtctcgctctaggcccaagtcctggcgcatctccatcatggagggctgcccccaaggcctctgacctgttaggagcccgcggacctggaggcacatttcaggggagagatctacgcggaggcgcccatgcaagcagcagctcccttaaccccatgcccccttcccagctgcagctatctaccgtagacgcccacgcccgtacaccagtcttgcaggtccatccattggagagccccgccatgatctctctgacgccgcctactactgccaccggagtcttctctttgaaggcgaggcctgggcttcccccaggtataaatgtggcttccttggagtgggtgtcacgcgagccagcgctgctgtgtacgttccccaatccctctgccccaaggaaagatagtaccctttcagccgtgccacagtccagctacccgctcctcgctaatggtgtgtgcaaatggcctgggtgtgagaaagtgtttgaagaaccagaggacttcctgaagcattgtcaggctgaccacttattggatgagaagggccgagcccagtgtctgctgcagcgagagatggtccagtccctggagcagcagctcgtactggagaaagagaagctaagcgccatgcaggcccaccttgctggtaagatggcactcactaaagcttcaagcgtcgcgagcagcgacaaaggctcatgctgcatcgtggccgccggatcgcagggacctgtggtgccagcctggtcaggaccgagggaggcacccgattcactgttcgccgtccgacggcatttatggggctctcatggcaattctactttcccggaattcctacataatatggactacttcaagttccataatatgcgcccgccgttcacttatgctaccctcatcaggtgggccattctggaagcccccgagaagcaacgcacgcttaacgaaatttatcattggtttacccgcatgttcgccttcttccggaatcaccccgccacttggaagaatgccatcaggcacaacctatcgctgcataagtgtttcgtacgtgtggaatctgagaagggagccgtgtggacagtggacgaactggaatttaggaaaaaaagaagtcagcgcccgtcccggtgctcaaaccccactccaggaccctag

SEQ ID NO: 117384 - DNA, 1296 bp, synthetic construct
  misc_feature 1..1296: note = Description of Artificial Sequence: Synthetic coding sequence
  source 1..1296: mol_type = other DNA
atgcctaatccccgccctggcaaaccaagcgcgccgtcactggcgctgggcccctcaccaggggcaagccctagttggagggcagcgccaaaggcttctgacctgctaggggccagaggccctggcggaacatttcaggggcgggaccttagaggcggtgcccacgcatccagctcctctctgaatccaatgccacctagccagctgcaactacctacgttgcccctggtgatggtcgctcccagcggtgcccgacttgggccattgccacacctacaggctctcttgcaggacagaccccattttatgcaccagctaagcacagtcgacgctcacgctcgtactcccgtcctgcaagtacatccattggagtcgcccgccatgattagtcttacacctcccactacggccacaggggtattctccctgaaggctcggccggggctcccgcctgggatcaatgtggcttctctggagtgggttagccgagagccagctttgttatgcaccttccctaatccatccgctcctcgcaaagacagcactctgtctgccgtgccgcagtcttcatatcccctactcgcaaatggcgtttgtaagtggcctggctgcgaaaaggtgtttgaagaaccagaggattttctcaaacactgccaggcagaccatctgcttgatgagaagggccgcgcacaatgcctgcttcagcgggagatggtccagagcctagagcagcagctcgtgctcgaaaaagagaaattgtctgctatgcaagctcacctcgccggaaaaatggctcttacaaaagctagttctgtcgcctccagcgacaagggcagctgctgtatcgtggccgctggcagtcagggccctgttgtgcccgcctggagcggcccccgggaggctcctgattctctgttcgcagtgaggcggcacctgtggggcagccacggtaatagtacctttccagaatttctgcataatatggactacttcaaatttcataacatgcggccaccattcacctacgcaacattgattcgatgggcaattttagaagctcccgaaaaacagagaactctgaacgagatctaccactggtttacccgaatgttcgcatttttccgcaatcaccctgctacctggaaaaatgccataagacacaatctgagcctgcacaaatgtttcgtgcgagtggagtctgaaaagggtgccgtttggaccgtcgatgaactggagtttaggaagaagaggtctcagagacctagccgatgttcgaatcctaccccgggtccctag

SEQ ID NO: 117385 - DNA, 1215 bp, synthetic construct
  misc_feature 1..1215: note = Description of Artificial Sequence: Synthetic coding sequence
  source 1..1215: mol_type = other DNA
atgccaaaccctagaccagggaagccttccgcaccctctctggccctgggaccatcacctggggccagtccaagctggagggctgcccctaaggccagcgacctgctgggagctcgaggacccgggggcacatttcagggtagagatttgaggggtggcgcgcatgcatcaagtagctcgcttaacccaatgccgccatctcagctgcagctccccactctcccactcgtaatggtcgcgccctccggggctagactcggccctttgcctcatcttcaagcattgctccaagatagacctcactttatgcaccagctgtctactgttgacgcccatgctcgaacaccagtgttacaagttcatcccctggagagtccggctatgattagcctgacaccaccgaccaccgcaacaggcgtattctctctgaaagcacgtccaggcctgccgcctgggattaatgtggccagtctcgagtgggtctcccgcgaaccagcactgctctgcacatttcctaaccccagcgccccaaggaaagactctaccctgagcgccgtaccgcaatcgtcttatcctctcctagccaacggggtctgcaagtggcccggatgcgagaaggtgttcgaagagccggaggatttcctcaagcattgtcaggctgatcacctgctggacgaaaaaggtagggcacaatgcctattgcagcgagaaatggtgcagtctctggaacagcaggcctcttcagacaagggatcatgctgcatcgtggctgctgggtcacaggggcccgtcgtacccgcttggagcggtcctagagaggcccctgatagtctgttcgccgtacggcgccacttgtgggggtctcacggtaattcaacatttccagagtttttacacaatatggattatttcaagttccacaacatgaggcctccatttacctatgctactctgattagatgggccatcctcgaagcgccagaaaagcagcggaccctcaacgagatttaccactggttcacccgaatgttcgctttttttaggaatcatcctgccacttggaagaatgccattcgtcataacctgtcgctccataaatgttttgtccgtgtcgaatccgagaaaggggccgtctggactgtcgatgaactggaattccggaaaaaaagaagtcaaagaccaagtcggtgtagtaaccctacacctgggccatag

SEQ ID NO: 117386 - DNA, 1191 bp, synthetic construct
  misc_feature 1..1191: note = Description of Artificial Sequence: Synthetic coding sequence
  source 1..1191: mol_type = other DNA
atgcccaatccccggccaggaaaaccatcggcaccttcactggccttgggtccctctccaggggccagtccttcctggagagccgcaccgaaagccagcgacctgctgggcgcaagaggtcccggaggtacttttcaggggcgagacttaagaggaggagcacatgcatcctccagctcacttaaccccatgccacctagccaacttcaactcagtactgtcgacgcgcatgcccgcacccccgtgctgcaggttcaccctcttgaatcgcctgccatgatcagtctaacaccacccacaactgcaacaggagtgttctcactgaaagcaaggccgggtttacccccaggcatcaacgtcgcctccctggagtgggtcagccgtgagccagctcttctctgcacctttccgaatccttctgctccacggaaggattccacgctgagtgcagtacctcagagctcctaccctctgctcgcaaacggagtttgcaaatggccagggtgcgagaaggtgtttgaagagcccgaagacttcctaaagcactgccaagcggaccaccttctggatgaaaaaggccgagcccagtgtctgctgcaacgggaaatggtccagtccctcgagcagcaactagtccttgagaaggagaaactaagtgctatgcaagcccacctggccgggaagatggccctaaccaaagcgtcaagcgtggccagttccgataaaggaagttgctgtatagttgccgcaggttcgcagggaccagttgtacctgcctggtcgggccctagagaagctcccgacagtcttttcgccgtacgccgccatctttggggatcacacggcaactccactttccctgaatttctgcataacatggattattttaagttccacaacatgaggccaccgttcacctatgcaacattgatcaggtgggcgatcctggaggcgccagagaaacaacgaactttgaacgagatctaccactggttcacccgcatgtttgccttcttcagaaatcacccagcaacttggaagaacgccatccgacacaacctgtctctccataaatgtttcgttagagtggagtcagagaagggggccgtgtggaccgtcgacgaactggaatttaggaagaagcgctctcagaggccctcacggtgttcaaatccaactcctgggccttag

SEQ ID NO: 117387 - DNA, 2043 bp, synthetic construct
  misc_feature 1..2043: note = Description of Artificial Sequence: Synthetic coding sequence
  source 1..2043: mol_type = other DNA
atgatggtggagtctgccagcgaaacgattaggagcgcacccagcggtcagaacggagtaggctctctgtccggacaggcggacggcagttccgggggcgccaccggtacaaccgcttctggtacagggcgagaagtaacaaccggggccgactctaacggcgagatgagccccgccgaattactacatttccagcaacaacaggccttgcaagtcgctaggcagtttcttttacaacaggcttcgggcctctcctccccaggaaataacgacagcaaacaaagtgcaagcgccgttcaagtaccggtgagtgtggccatgatgtccccccagatgttgacaccccaacagatgcagcagattctgagtccccctcagctacaggctctgctacagcagcagcaggccctgatgctgcagcagctgcaggaatactataaaaaacaacaggagcagctgcacttgcaattactcactcagcaacaggctggcaagccccagccaaaggaggctctgggaaacaaacaacttgccttccaacagcagctgctgcagatgcagcagcttcagcagcagcacctgctcaaccttcagagacagggccttgttagcctacagcccaaccaggcctccggtccgctccagacattacctcaggctgccgtgtgtcccacagatctgccgcagttgtggaagggggagggcgctccaggccagccagctgaagattccgtcaaacaggaaggcctggaccttacaggcactgcggccacggcaacttcatttgccgcgcctccaaaggtctcacccccactctctcaccacacgctccccaacggccagccaacagtcttgacttctagacgagactcctcctctcatgaagagactccaggctcgcatcctctgtacggccatggtgaatgcaagtggcctggctgcgaaacgctgtgcgaggacctggggcagtttataaaacacctaaatacggagcacgccttggacgacagatcaactgcccaatgtagagtccagatgcaggtcgtgcagcagctcgagatccagctggcaaaagaatcagagcgactgcaagctatgatggctcatcttcatatgcgtcccagtgagcccaagccctttagccagccgctaaatcctgttccgggatcatcaagcttctccaaagtgacagtttcagccgctgacagcttccccgatggcctcgtacacccccctacctccgcagccgcgccggttactcccttacgtccacccggtctcggctctgccagcctgcatggcgggggaccagccaggagacggtccagtgataagttttgcagcccaatatccagtgagttagcccagaaccatgaattttacaaaaacgctgacgtgcggcccccatttacttatgcctctttgatacggcaggccattctcgaaaccccagacagacaattaacccttaacgagatctacaactggttcacacgaatgttcgcttatttccgaagaaacactgccacatggaagaatgccgtaagacacaatctctctctgcacaagtgctttgtccgcgtggagaatgtgaagggtgctgtctggaccgtggacgagcgggaatatcagaaacgcagacccccaaaaatgaccggctctccaactctcgtgaagaatatgatcagtggactatcttacggggccctcaatgccagttaccaggcagccctggctgagagcagttttcctctgcttaatagccccggtatgctgaatcctggctccgctagttcactgctgccactatcccacgatgatgttggagccccagtggagcctctgcccagcaacgggagcagctctcctccaaggctctcccctccgcagtatagtcaccaggtgcaggtcaaagaggaaccagccgaggctgaggaggatagacagcctggaccacctctaggggcacccaacccaagcgcgtctgggccacccgaggatcgcgatttggaggaagagcttcctggagaggagctgtcttag

SEQ ID NO: 117388 - DNA, 2037 bp, synthetic construct
  misc_feature 1..2037: note = Description of Artificial Sequence: Synthetic coding sequence
  source 1..2037: mol_type = other DNA
atgatggtggagtccgcttccgagacaatcagaagcgcgccaagcggccagaatggagtcggatccttatccgggcaggcagatgggagttctgggggagccacgggtactaccgccagcgggacaggtcgtgaagtgaccaccggagctgactcaaatggcgaaatgagtcctgccgagctgctacacttccaacagcagcaagcgctccaggtcgctcgccaattcctgctacagcaggcgtctggcctgtcaagccctgggaacaacgactcaaaacagagcgcctctgcggtccaggtccccgtgtcagtcgccatgatgtccccacagatgctgactccccagcagatgcaacagattctctccccaccacagctccaggctctgctccagcagcagcaggccttgatgttacagcaggaatactataaaaaacagcaagaacagctccatctgcagcttctgacacaacagcaggcgggaaaaccccagcctaaagaggcactgggaaataagcaactggcctttcagcaacaactgttgcagatgcagcagctccagcagcagcacctgctcaacctgcagcgacagggtctcgtgtccctccaacccaatcaagctagtgggcctttacagaccctccctcaggctgccgtgtgtcccaccgacttacctcaactctggaaaggggaaggggcgcctggacagcccgcagaagactctgtcaagcaggaggggctcgatctgactgggacagctgcgacagctaccagcttcgcagcaccccctaaggtatcacctccccttagtcaccacactctcccgaacggccagcctacggtcctgacctcccggagagacagttctagccacgaggagaccccagggagccacccattgtacggccatggcgagtgtaaatggcccgggtgcgaaactttgtgtgaggatttgggacaatttattaagcacttaaacaccgaacatgccctggacgatcgctctaccgctcagtgtcgggttcagatgcaggtggttcagcagcttgagattcagttagcaaaagagtccgagaggttacaggctatgatggctcatttacatatgcgcccatccgaacctaaaccattctcacagccgctgaatcccgtgcccgggtcctcgagttttagcaaagtaaccgtatcagcggcggattcgttccccgatggtctcgtgcatcccccgactagcgcagctgcccctgttactcctttgaggcctcccggactggggtctgcttcgttacacggtggcggtcccgcccgccgaaggtcttccgacaagttctgctcccctatttccagtgagctggcacagaatcacgagttttataaaaatgcagacgttagaccaccatttacctatgccagcctgatcagacaagctattttagagacacccgaccggcagctaacgctcaatgagatctataattggtttacaagaatgtttgcctacttcaggcggaacacagcaacgtggaaaaacgcagtgcggcataacctcagcttgcataagtgtttcgtccgggtagagaacgtcaagggggctgtatggactgtagatgagagagaataccagaagaggaggcctccaaaaatgacaggctctcccacgctcgtgaagaatatgatctctggcttgagctatggggccctgaatgcatcataccaagccgctctcgccgagagcagtttccccttactaaattccccaggcatgctaaaccccggctcagcctcctccttgctgcctctctcacacgatgacgtgggcgcccccgtggaacctttgccatcaaatggctctagcagccccccccggctaagtccgcctcagtacagccatcaagtccaagtgaaggaggagcctgccgaggcagaagaggaccgccagcccggcccacccctgggtgctccaaacccgagtgcctccggcccgccagaggaccgagacttagaagaagagctgcccggggaagaactctcttag

SEQ ID NO: 117389 - DNA, 2043 bp, synthetic construct
  misc_feature 1..2043: note = Description of Artificial Sequence: Synthetic coding sequence
  source 1..2043: mol_type = other DNA
atgatggtcgaatctgccagcgaaaccattcgatctgcccccagtggacagaatggagtgggctcgctgtcaggtcaggctgatgggtcttctggaggcgcaaccggaaccacagcctctggaacgggacgagaggtgactacgggagcagactctaatggcgaaatgtctcctgccgagctgcttcactttcaacagcagcaggccctgcaagttgccagacagtttcttttgcagcaggcctccggactctcttctcccggaaacaacgattccaaacagtccgcctcagcagtgcaggtgcccgtgtccgtcgccatgatgagtccccagatgctcacgcctcagcagatgcaacagatactgagcccgccccagcttcaggcccttctgcagcaacagcaggccctgatgttacagcagttacaggagtattacaaaaagcagcaggaacagctgcatcttcaactgctcacacagcagcaggcaggtaaacctcaacctaaggaagcactcggcaataagcagttggcgtttcaacaacagctactgcagatgcagcaactgcagcagcagcatttgctcaacctccagcgacaggggcttgtcagtttgcagccaaaccaagccagcggacccctgcagactctgcctcaagccgctgtctgtcctacggacctcccacagctgtggaagggcgaaggcgctcctggacagcctgccgaagacagcgtcaagcaggagggactggatctgacaggcaccgccgccactgcaactagcttcgccgccccccctaaggtttcaccccctttgtcccatcataccctgccgaatggtcagccaactgtactgacctcgaggcgcgattcatcctctcatgaggagacccctggaagtcacccactgtacggtcacggagagtgcaaatggccagggtgtgagaccttatgcgaggaccttggccagttcattaaacacctgaacaccgagcacgcccttgatgataggagtaccgctcagtgccgggttcagatgcaggtcgttcagcagctcgaaatccagctcgctaaagaaagtgaacgcctgcaggcaatgatggcacatctgcacatgcgaccatctgaacccaagccctttagccaacctctgaacccggtccccggttcttcttcctttagtaaggttacagtttctgctgctgacagcttccccgacggccttgtacatccacctacgtcagcagcagctcctgtgactccccttcggccaccggggctcgggtctgcctctttacacggagggggcccagccagacggagatctagcgacaagttttgttcccccatctcctccgagctggctcagaaccatgagttttataaaaacgccgatgtccgaccaccattcacctatgcctcgctcatccggcaagctatcttggagactcctgaccggcaactcacactaaacgagatctataactggttcacaaggatgttcgcctacttcagaaggaatacagcaacttggaagaatgccgtgcgacataacctgtctcttcacaagtgttttgtccgcgtggagaacgtgaagggggcagtgtggaccgtagacgagcgtgaataccaaaagcgaagaccacccaagatgacgggctccccaacactggtaaagaacatgatctcaggcttatcctacggcgctctaaatgcaagctaccaagctgcacttgctgagtcttcctttcccctgcttaattcccccgggatgctgaatcccgggtccgcatcctctcttttgccactctcccacgacgatgttggtgcccccgtcgagcctctccccagtaacggcagttctagcccacccaggctgtcgcccccccaatatagtcaccaggtgcaggtaaaagaggaaccagccgaagccgaggaagatcgacagcccggtccacctctgggtgcaccaaatccatctgcgagcggtccgcctgaagaccgagatcttgaagaagagctcccaggtgaggagctcagctag

SEQ ID NO: 117390 - DNA, 2004 bp, synthetic construct
  misc_feature 1..2004: note = Description of Artificial Sequence: Synthetic coding sequence
  source 1..2004: mol_type = other DNA
atgatggtggagagcgcgtcagaaacaatcaggtcggccccaagcggacaaaatggcgtgggctcactgtcaggacaggccgacggaagtagtggtggagccactggaaccacagctagtgggacgggccgcgaagtaacaaccggcgctgactccaacggggaaatgagtccagccgaactgctacatttccagcagcagcaagctctccaagttgcaagacagtttttgcttcagcaggcatctgggttgagtagcccgggcaataatgactcaaaacagtcagcatctgctgtccaggtcccagttagcgtggcaatgatgagcccccaaatgctgacgccccagcagatgcagcaaatcctgagccccccacaactgcaggctttactgcaacagcagcaagcactgatgctgcagcaactacaggagtactacaaaaaacagcaggagcaactgcatctccaactgttgacccaacagcaggccgggaaaccacagcctaaagaagcgcttggtaataagcagttagccttccagcagcagctcctccagatgcaacaactgcagcagcagcacctgctgaacttacagagacaaggactggtttcgttacaacctaaccaggcctctggtcctctgcaaactttgccccaagccgtatgccccacagacctgccacagctttggaagggcgaaggggctccaggacagcccgccgaggactccgtaaagcaggaggggcttgacttaactggcaccgccgcgacagccacctcttttgctgcgccgcccaaagtgtctccaccattgagccaccatactctgccgaacggacagccaacagtgctaacctctcgccgagacagtagctcccacgaagaaacaccgggctctcaccctctgtacggccacggtgaatgtaagtggcctggctgtgagacgctatgcgaggacctgggtcaattcattaagcaccttaatacagagcatgcccttgatgataggtcaacagcccaatgtcgagtacagatgcaggtggtgcagcaattagagattcagctggccaaagagagtgagcgcttgcaggccatgatggctcacctgcacatgagaccatctgagccgaaacccttctctcagcctgtcacagtatctgcagccgattctttccccgatggtttggtccatcccccaacaagtgcggcggctccggttacgcctctcagacctccgggcttaggtagcgccagcctccacggtggcgggcctgccagaagacgctcttccgacaaattttgctcacccatttcttcagagttggcccagaaccatgagttctacaaaaacgccgacgttcgtcccccctttacatacgccagccttattagacaggcgattcttgagacccctgataggcagctgacactgaatgaaatatacaattggttcacccgaatgttcgcttactttcgacggaataccgctacttggaaaaatgccgtacgtcacaacctctcactacacaagtgcttcgttagagtggagaacgtcaaaggtgcggtttggactgttgacgagagggaataccagaaaaggaggccccccaaaatgaccggctctcctactctggtgaagaatatgatctctggattgagttacggcgcactaaatgcgtcttaccaagctgctcttgccgagagttctttccctctgttaaactccccggggatgttgaacccaggctctgcctcttcgctattgccgctgtctcatgacgacgtgggggctccagtcgagcctctaccttccaacggctcttcatctcccccaaggctctccccacctcagtactctcaccaggtccaggtgaaagaggagcccgccgaggccgaagaagataggcagcctggaccccctctcggggcccctaacccatccgccagcgggccaccagaagaccgggatctggaagaggaacttcccggcgaggagctgagttag

SEQ ID NO: 117391 - DNA, 2007 bp, synthetic construct
  misc_feature 1..2007: note = Description of Artificial Sequence: Synthetic coding sequence
  source 1..2007: mol_type = other DNA
atgatggtggagtcagcaagcgagacaattcgctcagccccttctggccaaaacggggtggggtctctgagcggccaggctgacggaagcagcgggggagcaaccggcaccaccgcctcaggtaccgggagagaggtaacaacaggtgctgacagcaatggtgaaatgtcgccggcagaactgctgcactttcaacagcaacaggccttgcaggtcgcgcgccagtttctcttacagcaggcaagcggcctgtcttcacctggaaataatgacagcaaacagtcggcttccgcggtccaggtgccggtctcagtggccatgatgtcaccacagatgctgacaccacagcagatgcagcagattttatctccccctcaactccaggcactactgcagcagcagcaggctctcatgctacaacagctgcaagagtattacaagaagcaacaagaacagctgcacctgcagctgttgacgcagcaacaagcaggcaagccacaacctaaggaggctcttgggaacaagcaactcgcgttccagcaacagcttctgcagatgcagcagctgcaacagcagcatcttctgaacctgcagcgccagggactggtgagtctgcagccaaaccaggcctctggcccactccagacactgccccaggctgcagtgtgcccaacagacttgccacagctatggaagggcgaaggggccccaggacagcctgccgaggatagtgttaaacaggagggactggacttgaccggtaccgccgctactgccacaagcttcgccgcacctcccaaggttagccctcctctgtctcatcacacactacctaatggacagcctaccgtgcttacatccaggcgcgacagctctagtcacgaggagactcccgggagccacccattgtacggtcacggcgagtgtaagtggcctgggtgtgaaactctgtgcgaggatctgggacagtttatcaagcacttgaacaccgaacacgctttggatgatcggagtacagcacagtgtagggtacagatgcaggtggtgcaacagcttgaaatccaattagccaaggagagtgaaaggctgcaggcaatgatggctcatctccatatgaggccctctgagcctaagcctttttcacagccagtgaccgtgtccgctgctgactccttccccgatgggctagtgcaccctcccacctctgctgctgcccctgtcaccccgcttaggcctcccggactgggaagtgccagtctgcacggagggggaccagccagacgacgctccagtgacaagttctgcagccccatctcatcagaactggctcaaaaccacgagttctataaaaacgcagatgttcgccctccctttacctatgcctctttgatccgtcaggcaattctagaaacgccagacagacagttgacactaaatgaaatctataattggtttacacgcatgttcgcttactttcgcaggaataccgccacatggaaaaacgccgttagacacaatttatccctgcataagtgcttcgtgcgtgtggaaaatgtcaagggcgctgtgtggacagttgatgagcgcgaataccagaagcgtaggcctcccaagatgacaggttccccgacattggttaagaatatgatctctgggctgtcgtacggagcactcaatgcttcataccaggctgccctggccgaaagctcctttccgttgctcaattctccaggaatgcttaatcccggtagcgcctcaagtctactgcctctcagccacgacgacgttggagcacccgtagagcccttgccctccaacggatcctcgagtcccccccgtctgagtccgccccagtacagccatcaggtccaagtgaaagaagagcctgccgaggccgaggaggacaggcagcctggaccccccctgggcgcgccaaatccctctgcttccggaccccccgaggacagggacttagaggaggagttgccaggagaggagctgtcatag

SEQ ID NO: 117392 - DNA, 1212 bp, synthetic construct
  misc_feature 1..1212: note = Description of Artificial Sequence: Synthetic coding sequence
  source 1..1212: mol_type = other DNA
atgaaactcgaggtgttcgtgcccagagccgcgcatggagacaagcagggctctgacctggagggtgccggcggctccgatgcaccaagccccctgtctgcagctggggacgatagtcttggctctgatggggactgcgctgctaactctcctgccgctggcggaggcgcccgggacacccaaggcgacggagaacagtctgccgggggcgggcctggagccgaagaagcgattccagcggcagctgccgctgcggtcgtggcggagggtgctgaagcaggcgccgccggaccaggagccggaggggctggaagtggcgaaggagcgaggtctaagccctacacccgcagacccaagccaccctattcatatatcgctctgatcgccatggcaatccgggactcggctggtggcaggttgacactcgccgagattaacgagtatctgatgggtaagtttccttttttccgaggatcatacactggatggcgaaactccgttagacataacctgagcctgaatgactgctttgtcaaagtgctgagagatccgagccgaccttggggtaaagacaactactggatgctgaacccgaatagcgaatacacatttgcagatggggttttccgccgcagaaggaagcgactctcccacagggccccggtcccggcaccaggtctgagaccagaggaggctcccggattgcccgccgcaccaccacctgcccccgccgcaccagcatctcccagaatgcgtagccccgctcgtcaagaggaacgggcttccccagccggcaaattcagcagtagtttcgccatcgattcaatcctacggaaaccatttcgctcacggagactcagggacacagcacccgggactaccttgcagtggggtgcagccccctgtccccctttgcccgcctttcccgccctcctccctgctgctccttgcagggcccttctgcccctatgcgcatacggagccggggagcctgcgaggctcggggccagagaagccgaagtgcctcctactgcccctcccttgcttttagcccctctgcccgctgccgctcccgccaagcccctcaggggcccagccgctggtggcgctcatctctactgccccctccgtctccccgcggccctgcaagccgccagcgtgaggagaccagggccacacctgccttaccccgtggagaccctcctggcctag

SEQ ID NO: 117393 - DNA, 1626 bp, synthetic construct
  misc_feature 1..1626: note = Description of Artificial Sequence: Synthetic coding sequence
  source 1..1626: mol_type = other DNA
atgagtcagttagtggaatgcgtccctaatttcagcgagggaaagaaccaggaggttatcgacgccatctcaggagccatcacccagactcctgggtgcgttttactagatgttgatgccgggccttcaacaaacaggaccgtctatacctttgtcggacctcccgagtgcgttgttgagggagctcttaatgccgctcgcgtggcctctcggttgatcgatatgtctcggcaccagggagaacatcctcgtatgggagccctggacgtatgtcccttcatacctgtgaggggagtgtccgtggacgagtgcgtgttgtgcgcccaggcatttgggcaacggctggccgaagaattagatgttccagtctacctgtacggggaagccgccagaatggactctcgaaggaccttgcctgcaatccgtgcaggcgagtatgaagcactcccaaagaagctccagcaggcagattgggctccagactttggaccctcaagttttgtccccagctggggcgcaaccgcaaccggcgctcgcaaatttctgatcgccttcaacatcaacctgcttggcaccaaagagcaggcccaccgcatcgctttaaaccttcgcgagcaggggagggggaaggaccagcccggccgcctcaaaaaggtccagggtattgggtggtatttggatgaaaaaaacttggcgcaggtcagtactaacctgctcgacttcgaggtgaccgccctgcacaccgtctatgaggaaacctgcagggaggcccaggagctttctcttcccgttgtgggctcccagctggtgggtctggtgcctctcaaagctcttctagacgccgccgccttttactgcgagaaagagaatctgttcatactcgaagaagagcagcgcatcaggctggtagtgagtcgcctagggttggacagcctctgccccttttctcccaaggaacgcatcattgaatatttggtgccagagaggggccctgaacgtgggctcgggtcaaagagcctgagggcattcgtcggcgaagtcggggccagatccgccgctccagggggtgggagcgtggccgccgctgccgccgcaatgggagctgccttgggttctatggttggcctcatgacttacggccggagacagtttcaaagtctggacacaacgatgcgtcggcttatcccccctttccgggaagcctctgccaaactgacaaccctcgtggacgcagacgcagaggcgttcacggcctatcttgaagctatgcggctgcctaaaaatacacccgaagagaaagaccgacgcacagctgctctgcaagaagggctccgccgggcggtatctgttccactgacgctggccgagaccgtggcctctctgtggccagcacttcaagaacttgctcggtgcgggaacctggcctgccgcagcgatttacaggtggccgcgaaggcgctcgaaatgggtgtcttcggagcttatttcaacgtgctcatcaacttgcgtgatattacggacgaggcctttaaggaccaaatccaccacagggtcagttcattactccaagaggccaaaacgcaggctgctcttgttttggattgtttggagactaggcaggagtag

SEQ ID NO: 117394 - DNA, 1488 bp, synthetic construct
  misc_feature 1..1488: note = Description of Artificial Sequence: Synthetic coding sequence
  source 1..1488: mol_type = other DNA
atgagtcagcttgttgagtgtgtgccaaatttctccgaaggaaaaaatcaggaagtgattgacgccattagcggtgcaattacacagacgcctggttgcgtgcttttggatgtcgacgcaggtcctagtaccaataggacggtctatacgtttgtgggaccccccgagtgcgtggtcgaaggcgcgttgaatgccgcaagagtggcctctagattaatcgacatgagccgccaccagggagagcatcccaggatgggtgctctggatgtctgcccctttattcccgtgaggggtgtgtcagtggacgagtgtgtgctgtgtgcgcaggcattcggacaacgcctggccgaagagctggacgtgccagtctatctctacggcgaagctgctagaatggacagtcgaagaacactgcctgcgatccgagctggagaatacgaagcactgccaaaaaagcttcagcaggcggactgggcccccgatttcgggcccagctctttcgtgccctcttggggtgccactgctactggggctcgcaaatttctgatcgccttcaatattaacttattaggcactaaggagcaggcgcacagaatcgctcttaatctgcgcgagcagggaaggggcaaggaccagcctggacgcttgaagaaggtccaaggtattggatggtacttggacgaaaaaaacctggcacaggtatcaacaaacctactggatttcgaggtcacagccctgcacaccgtgtatgaggaaacatgcagagaggcgcaggagctatcactccccgtggtgggctcccaactggtgggactcgttccactgaaagcactcttagacgcagctgccttttattgcgagaaggagaacctgttcatcctggaggaggaacaacggatcagactcgtagtcagcagacttgggctggactccctctgcccctttagccccaaagaacggatcatcgagtatcttgtccctgagagggggcccgaaagaggcctaggctcaaaatcactgcgagcatttgtcggagaggtcggggcccgctcagctgctcctggcggcggcagcgtggctgctgcagccgccgccatgggagccgccctcggcagtatggtcgggttgatgacttacggtcgacgacaatttcagtccctcgatacaactatgcggcgcctgatcccacccttcagggaggcctccgctaagcttaccactctggtggacgccgatgccgaggctttcacagcgtatttggcccatggcggcccaacaggcggcagcgaggccgggagcctgtgcgccgccgacgccgggggagacggtggcctcgccgttgcagggcctgcgggaacaggaccggtgtgggagcccgggttaccggtgagaccgcccggcggaggccaatcacctggagacgggcgggtgtggcgaatcttccagcgggcccatcagccagagggccatcataggcggggcatatag

SEQ ID NO: 117395 - DNA, 1719 bp, synthetic construct
  misc_feature 1..1719: note = Description of Artificial Sequence: Synthetic coding sequence
  source 1..1719: mol_type = other DNA
atgtctcaactagtcgagtgcgtccctaacttttctgagggcaagaaccaagaggtgatcgacgctatttccggcgcaattacccagacccctgggtgcgtcttgctggacgtcgatgctgggccctccacgaatcgaaccgtgtacaccttcgtcggtcctccagaatgcgtcgttgagggagccctcaatgctgcaagggttgcctcccgccttatagatatgtcaagacatcaaggagaacatccacgaatgggcgctctagatgtctgcccgttcatcccggtcaggggtgtttctgtggacgaatgcgtgctgtgcgcacaagcattcgggcagagactcgctgaagagcttgacgtgccagtttatttgtatggtgaagctgccaggatggacagccgacgcacgctgcccgcgatccgagctggcgaatacgaagccctgcctaagaagctgcagcaagcggactgggcccccgattttggtccgtcatccttcgttccttcttggggcgcaaccgccaccggcgccaggaaatttttgatcgccttcaatatcaatttattaggcaccaaagaacaggcacatcgtatcgctttgaaccttcgcgagcagggccgtggcaaggaccaacccggtcgcctcaagaaagtccagggtatcggttggtatctggacgaaaagaacctcgcacaggtgtccacaaacctcctggactttgaagtcactgccctccataccgtgtacgaggaaacctgtagggaagctcaagaactaagcctgcctgtggtgggttcgcagttggtgggcttggtgcctctaaaggctctgctggatgccgctgccttttattgcgagaaagagaacttgttcatccttgaggaagaacagcgcatacggctagtggttagtcggctggggttagactcgctgtgtccctttagccctaaggaaagaatcatcgagtatctggtgcctgagagaggccctgagagaggcctggggtccaaatccctgagggcatttgtgggtgaggtgggggctcgctctgccgccccgggcggagggtccgtggccgcggcagcagccgccatgggcgcagccctgggaagtatggtgggccttatgacttatggccggaggcagtttcagtcactggacacaaccatgcggcggctgatccctccttttagggaagctagtgcaaaactgaccactctcgtagacgccgatgccgaagctttcacggcctatctcgaagccatgaggctccccaagaacacaccggaggagaaggatagaaggaccgctgcgcttcaggaaggcctgagaagggcagtgtccgtcccgctgacactcgcagaaactgtagcttcactgtggccagccctgcaggagcttgcccggtgcggcaatctcgcatgccgctcagatctgcaggtagccgctaaggctctcgaaatgggggtcttcggcgcctacttcaacgtgctgattaatttgcgggacattacggatgaagcctttaaggatcaacctccggcgggctctcaggacccggggtgtactggtgctggactgctaggggaccccgcgggagtgaccgtcagagaagctagtccgggaagcgtggcccctccgtcacctatcccccgtggacagtcttgcgatcttgagacgccaggaactgctgggccaagcactcttgagggctag

SEQ ID NO: 117396 - DNA, 1488 bp, synthetic construct
  misc_feature 1..1488: note = Description of Artificial Sequence: Synthetic coding sequence
  source 1..1488: mol_type = other DNA
atgtcccagctggtcgaatgtgtacctaacttttcggagggaaagaatcaggaggtgattgacgccatctctggggcaataacccagacgccaggctgcgttctgctcgacgtggatgccggaccgagcaccaataggaccgtctacactttcgtgggacccccagaatgcgtggtggagggggcattaaacgcagcgagggtggccagcaggctgatcgatatgagcagacatcaaggcgagcaccccagaatgggggccctggacgtgtgtcccttcattcctgttcgcggggtgagcgtggacgagtgcgtcctctgtgctcaggcattcggccagcggctagccgaggaacttgacgtccccgtctacctctacggtgaagcggcaaggatggactcccgcagaactttgcctgcaatcagggcaggcgaatacgaggccctccccaagaagttgcagcaggcagattgggctccggatttcgggccctccagcttcgtgccttcctggggcgccacagctactggagcacgtaaattcctgattgcctttaatatcaaccttttggggacaaaagagcaggcccaccgaatagctctcaacctgcgggagcagggcagaggaaaggatcaacccgggaggctgaagaaggtacaggggataggttggtacctagatgagaagaacctggcccaggtgtctaccaacctgttggattttgaagttacggcccttcacacagtgtatgaggagacatgtagggaagctcaggagctgtcgctccccgtggtagggtcacagctcgttggactggtgccgcttaaagcacttctcgacgccgccgcattctactgcgaaaaagagaatctcttcattctagaggaagaacagaggattcgtctggtcgtaagccggcttgggcttgactcgctctgtcccttctcccccaaggaacggattattgaatacctggtgcctgaaaggggtccagagcgcgggctgggttccaagagccttagagccttcgtcggggaggttggtgctcgaagtgccgctcccggtggtggatcggtggccgcagccgcagcagcaatgggcgcggcactggggtcaatggtgggcctgatgacgtacgggaggcgtcaatttcagtctcttgacacaacaatgagacgcctgattcctccattcagggaagcgagtgcgaaattgacgaccctagtagacgcagatgccgaagcattcaccgcctaccttgcgcacggcggacctactggagggagcgaggcagggtcattgtgcgcggccgatgccggaggagacggtggtctggctgtggctgggccggcaggaactggtccggtgtgggaacccggcctccccgtacgaccacctggcggaggccagtcccctggcgatggccgggtgtggcgtatcttccagcgcgcccatcagccagaggggcatcacaggcgtggaatctag

SEQ ID NO: 117397 - DNA, 1626 bp, synthetic construct
  misc_feature 1..1626: note = Description of Artificial Sequence: Synthetic coding sequence
  source 1..1626: mol_type = other DNA
atgagtcagctggttgagtgcgtccccaacttcagcgagggaaagaaccaggaggtgatagacgccatctctggtgccatcacccagacccccggatgtgtgctgctggacgtggacgcaggcccatctaccaatagaacagtgtacacctttgtgggccctcctgagtgcgtggtggaaggcgctctgaatgccgcaagggtggcgtcccgcctgattgatatgagcaggcaccaaggtgaacaccctagaatgggagccctcgatgtgtgcccattcattccggtccgcggtgtaagcgttgacgaatgcgtgctgtgcgctcaggcttttggccaaagactggccgaagagctggacgttccagtgtatctctatggcgaagcagctcgaatggatagccggagaacactgccagctatccgtgccggagaatacgaggctctccctaagaagctccagcaggccgattgggcacccgactttggtcccagctcatttgttcccagctggggggcaactgccactggagcacgaaaattcctgatcgcattcaacatcaatctcctcgggacaaaagagcaggctcaccgcattgcactcaacctgagggagcaggggcgaggcaaggaccagcccggtcggctgaaaaaagtgcaaggaatcggctggtacctggacgaaaaaaacctggcccaggtgtcaaccaatctcctggacttcgaggttacagcccttcacacagtgtacgaggagacatgtcgtgaagcccaagagctgtcattaccagtggtgggtagccaactggtgggcttggtacccctgaaggctcttctagacgcagccgccttctattgcgaaaaggaaaacctcttcatacttgaggaggaacaaaggataaggctggtggtcagtagactgggattagattccctgtgcccattttcaccaaaggagcggattattgagtatctcgtgcctgagcggggacccgaaagaggactgggatctaaaagtctgagagcttttgtgggcgaagtaggagcacgctctgctgctcccggcgggggcagcgtggccgcagcggcggctgccatgggcgctgcattggggagcatggttggtctgatgacatacggcagaaggcagttccagagcctggacaccaccatgcggaggttaataccaccattccgagaggcctctgctaagctgacaaccctcgtggacgccgacgcagaggctttcaccgcatatttggaggctatgcggttgcctaagaacactccagaagagaaagataggcggacagctgccctgcaggagggactaaggcgcgccgtctccgtccctcttacattagccgagactgtggcctctctttggcctgccctccaggaattggctcgctgcgggaacttggcctgtagatcggatctgcaggtcgctgccaaggctctggagatgggagtgtttggggcatatttcaatgtgctgattaatctcagggatattacagacgaggcttttaaggaccaaatccaccacagggtgagctctctgctacaagaggccaaaacacaggccgccttggtccttgactgtctcgagacgagacaggagtag

SEQ ID NO: 117398 - DNA, 1719 bp, synthetic construct
  misc_feature 1..1719: note = Description of Artificial Sequence: Synthetic coding sequence
  source 1..1719: mol_type = other DNA
atgagccagttagtggagtgtgtgcccaattttagcgaaggcaaaaaccaggaggtgatagacgctatcagcggggccatcacccagacaccaggctgtgtgcttttagacgtggatgctggccctagcaccaaccgcactgtttacaccttcgtgggcccgcccgaatgcgtggtggagggcgccctaaacgcagcccgggtggccagccgcctgattgacatgtccaggcaccagggggagcatccaagaatgggagccctcgacgtctgtcctttcatccccgtgcgcggggtctcggtagacgaatgcgtactgtgcgcccaggcgttcggccaaaggctggccgaagagctggatgtaccagtgtacctctatggtgaagctgctcgcatggacagccgcaggacgctgccagctatccgtgcaggggagtatgaggcacttccgaagaaattgcagcaagctgattgggccccggattttggcccatcttccttcgttccatcttggggtgcaaccgccaccggggcccggaagttcttgattgcctttaacataaacctattaggtactaaagagcaggcccaccgaattgccctgaacttgcgagaacaggggcgcggaaaggatcagcccggtcgcctgaaaaaggtgcaaggtataggctggtatctggacgagaagaatctcgcccaggtgtctacaaatctgctggatttcgaggtaactgccctgcacacggtgtacgaggagacatgccgtgaggcccaggagctctctttaccagtggtgggatctcagcttgtagggctggtccctctgaaggccctgctcgacgcagccgccttctactgcgaaaaagagaacctctttatcttggaggaggagcaaagaattcgattggtagtctctcgactcggactagactccctgtgtccattcagtcctaaggaaaggatcattgagtacctggtgccagaacggggacctgagagagggcttggaagtaagtccctccgagcgttcgttggggaagttggagcacgcagtgctgctccaggcggtgggagcgtggctgcagccgctgctgccatgggagccgctttgggctccatggtgggattaatgacatatggccgccggcagttccagtcactggatacaacaatgcggagactgataccaccttttcgagaagcctcggccaagttgaccacactcgtagatgctgatgccgaggcttttactgcctaccttgaggccatgcggctgcctaaaaatactcctgaagaaaaggatcggcgcactgccgcactgcaagaggggctccgaagggcagtctctgtcccattaaccctcgctgagaccgtggcttccctatggccagctctgcaggagttggcaaggtgcggcaatctcgcgtgcagaagtgacttacaggtggccgccaaggccctcgaaatgggggtttttggtgcttacttcaatgtcctcattaatctcagggacataacagacgaagctttcaaagaccaacccccagcgggttcacaggatcctggatgtaccggagccggactcctgggcgatcccgcaggcgtcaccgtgagagaggcttcccctggttccgtcgccccacctagtcccatcccacgcggccagtcctgcgaccttgagacacccggcacagctggcccttcaacactagaggggtag

SEQ ID NO: 117399 - DNA, 1779 bp, synthetic construct
  misc_feature 1..1779: note = Description of Artificial Sequence: Synthetic coding sequence
  source 1..1779: mol_type = other DNA
atgagttggggcacagaactctgggaccagttcgacaacctggagaagcacacgcagtgggggatcgatatcttggagaagtatatcaagttcgttaaagaaagaaccgaaattgaactttcgtacgccaaacagcttagaaacctaagtaagaagtaccaacctaaaaaaaacagcaaggaagaagaagaatataaatatacttcttgtaaagccttcatcagcaaccttaacgaaatgaatgactacgcaggacaacatgaagtaatcagtgagaacatggccagccagataatagtggatttggcaagatacgttcaggaactcaagcaggagcgtaaatcaaatttccacgacggaaggaaggctcagcagcacatcgagacttgctggaaacagctggagagctccaaacggaggttcgagagagactgcaaggaagctgaccgcgctcaacagtactttgaaaagatggatgctgacatcaacgtgacaaaagcagacgttgaaaaagcgcgccaacaagcacaaattaggcaccagatggctgaggacagcaaagcagactacagttcaatcctgcagaagttcaaccacgaacagcatgaatattatcacactcatatacccaacatctttcagaaaattcaggaaatggaagagagaaggatcgtcagaatgggtgagtctatgaaaacttatgctgaagtagaccgtcaggtcatccccatcattggcaaatgtcttgatggaatagtcaaagccgcggagtccatcgaccagaaaaacgacagtcagttagtcatagaggcgtataagtccgggtttgagccaccgggagatatcgagtttgaagactatactcaacccatgaagcgcactgtctccgataatagcttatccaattcccgcggcgaggggaagcctgacctgaaattcggtgggaagtccaagggcaagttgtggccattcatcaagaagaataaaagtcccaagcagcagaaagaaccccttagtcatagatttaatgagttcatgacatccaaacctaagatccattgcttcaggagtctgaaaagagggcactctcttcttaagggtgcgactccagaggacttttctaatttgccccccgagcagagaaggaagaaactccaacagaaagtggacgagctgaacaaggaaattcagaaggaaatggaccagcgcgatgccattaccaaaatgaaggacgtgtatctgaaaaacccccagatgggggatcccgcttctcttgaccataaactagccgaagtatcacagaacattgaaaagttaagggtggagactcagaagttcgaagcttggctggcggaagttgaagggcgactaccagcccggagcgagcaggcaagacgacagtccggtctatacgatagccagaacccccccactgtaaacaattgtgctcaggaccgtgagagtcccgacgggtcctatactgaggagcaatcacaggagtctgagatgaaggtgctggccacggatttcgacgacgagtttgacgacgaggagcctctgccggcaattggaacctgcaaagccttgtatacatttgaggggcagaacgaaggaacaatctctgtggtggagggcgaaaccctttacgtgattgaggaagacaagggggacggatggaccaggatacggaggaatgaagatgaggagggatacgtccccacgtcctatgttgaggtttgccttgataagaatgcgaaaggcgccaaaacctatatctag

SEQ ID NO: 117400 - DNA, 1854 bp, synthetic construct
  misc_feature 1..1854: note = Description of Artificial Sequence: Synthetic coding sequence
  source 1..1854: mol_type = other DNA
atccggtggaccgacgagttgtgggaccaattcgataacctcgaaaagcacacgcagtggggcattgacattctggagaagtacatcaaattcgttaaggagcgcaccgaaatcgagctgtcctatgccaagcagttgcggaatctgtccaagaagtatcagcctaagaagaatagcaaggaagaggaggagtataaatatactagctgcaaggcctttatctctaatctgaatgagatgaacgattacgccggtcaacacgaggtgatttctgaaaatatggcatctcagattattgtagatttggcacgatacgttcaggaactgaaacaagagcgcaaatccaattttcacgatggaagaaaggcgcagcaacacatcgagacttgctggaaacagctggagagcagtaagcggcgctttgagagagactgtaaggaggcagaccgtgctcagcaatactttgaaaagatggacgccgatattaatgtgactaaagccgatgttgaaaaggcgcgccaacaggctcaaattagacatcagatggctgaggacagtaaggctgactactcatctatcttacagaaatttaatcatgaacagcatgaatactatcatactcacattccgaacatctttcagaaaatacaagagatggaagagcgccgcatagtgaggatgggggagtccatgaagacatacgctgaggttgaccggcaagtgatcccgattatcggtaaatgtctggatggcatcgtcaaggccgccgagtcaattgaccagaaaaacgatagccagcttgtcatcgaggcctataaatcaggcttcgaaccacccggcgatatcgagttcgaggattacacccaacctatgaaaaggaccgtgagtgacaattctttaagcaatagtcgcggagaggggaagcctgacctgaagttcggagggaaaagcaaaggcaagttgtggccatttattaaaaaaaacaagctaatgagcctgcttacatccccccaccagcccccaccccctcctcccgcctccgccagtccttctgccgtccccaacggtccccagagccctaaacaacagaaggaacccctgagtcacaggttcaatgagtttatgactagtaaacccaaaattcattgtttcaggagtttaaaaagagggccgagctttaagcagggggctacccctgaagacttctcgaacctgccgccagaacagcggagaaagaaactgcagcaaaaggtagacgagttgaataaggagattcaaaaagagatggaccagcgcgacgccatcactaagatgaaagacgtgtatctcaagaacccacagatgggcgaccccgcaagcctggaccataagcttgcagaagtgtcgcagaacattgagaagctgagggtggagacccagaagttcgaggcttggttggctgaagtggaaggacgcctccctgctaggagtgaacaggcccgacgacagtccgggctctacgattcccagaatccccctactgtgaacaactgtgcacaggatcgggaaagcccggacggtagctacaccgaagagcagtctcaggagagcgaaatgaaagtcttagccacagatttcgatgatgagtttgacgatgaggagccactgcctgccattggcacatgtaaggccctctacactttcgaaggccagaacgagggaactattagtgtggtcgagggagaaaccctctacgtcatcgaagaggataaaggcgatggctggacgagaatcagacgcaacgaggatgaagagggctatgtgcctactagttacgtcgaggtgtgtctggataaaaatgccaaagattcctag

SEQ ID NO: 117401 - DNA, 1854 bp, synthetic construct
  misc_feature 1..1854: note = Description of Artificial Sequence: Synthetic coding sequence
  source 1..1854: mol_type = other DNA
atgagctggggcactgaattgtgggaccagtttgacaatctcgaaaagcacactcagtgggggattgacattctagaaaaatatatcaaattcgtaaaagagcgcactgagatcgaactcagctacgccaaacagctcaggaatctcagtaagaagtatcagccaaagaaaaattctaaggaagaagaagagtacaaatatacgtcttgtaaggccttcatctccaacttgaacgagatgaacgactatgctggacagcacgaggtgatatctgaaaacatggccagtcaaatcatagtggatctggccagatatgttcaggaactcaagcaggagcgcaaaagcaactttcatgacggacggaaggctcagcagcacatcgaaacctgctggaaacaattggagtcctccaagcgccggttcgaacgagattgcaaagaggctgaccgagcccaacagtatttcgaaaagatggacgccgatatcaacgtcacaaaagccgatgttgagaaagcacgccagcaagctcaaattaggcaccagatggccgaggactctaaggccgactattcctcaatactgcagaaattcaaccacgagcagcatgaatattaccatacccacatccctaacatcttccagaaaatccaggaaatggaggaaagaagaatcgttcgtatgggagaatctatgaagacttacgctgaagtggataggcaggtaatcccaattatcggaaagtgcctcgatggaatcgtgaaagccgccgaatcgatcgatcagaagaacgatagtcagctggtaatcgaggcctataaatcgggttttgagcctcccggggatattgaatttgaggactacacccagcccatgaagaggactgtgtctgataacagcctcagcaattcacgaggcgaagggaagcctgatctgaaatttggcggaaaatcaaagggcaagctttggccattcatcaaaaaaaacaaattgatgtccctcctgacctcacctcaccaacccccaccccctccacccgctagcgcctctcctagcgccgtaccgaacggtccacaatcccctaaacagcaaaaggaaccacttagtcatcgatttaatgagttcatgacctcaaagcctaagatccactgtttccgctctctgaaacggggccactcattgctgaagggcgcgacgccagaggacttttcaaacttaccaccagaacaaagacgaaagaaattacagcagaaagtggacgagctgaacaaggaaatccagaaagaaatggaccaacgggacgccattacaaagatgaaagacgtttatctcaagaacccccaaatgggcgacccagctagtctcgaccacaagctagccgaagtttcccagaacatagagaaattgagagtcgaaactcaaaagttcgaggcctggttagccgaagtggaaggtcgactgccagcccggtctgagcaggccagacgccagtccggactgtatgactcccagaatccaccgacggtcaataactgcgcccaggatagggagagtcctgatggctcatacactgaggaacagtcccaagagtccgaaatgaaggtgctggcgacagatttcgacgacgagtttgatgacgaggagcctctgccggctattggcacttgcaaagcgctttacaccttcgagggccagaacgaaggaacgattagcgttgtagaaggcgagactctgtatgtaatcgaggaggacaagggcgatggctggacaaggatccgacggaatgaagacgaggagggctatgtacctactagctacgtggaagtctgtttggataagaatgcgaaggattcgtag

SEQ ID NO: 117402 - DNA, 1827 bp, synthetic construct
  misc_feature 1..1827: note = Description of Artificial Sequence: Synthetic coding sequence
  source 1..1827: mol_type = other DNA
atgagctggggaacggagctttgggatcagttcgacaaccttgagaagcacacccagtggggaatcgatatactagagaaatatattaagtttgtcaaggagcgcacagagatcgagctcagttatgctaagcagctgcggaatctgtcaaaaaagtaccagcctaagaaaaacagtaaagaagaagaggaatataaatatacgagctgtaaagcttttatctcgaatttaaacgagatgaatgattacgccggtcagcatgaggtaattagtgaaaacatggcctcccagattatcgtcgacctggctagatatgtgcaagaactgaagcaggaacgcaagagtaactttcacgacgggcggaaagcccagcaacacattgaaacatgctggaagcagcttgagtcctctaaaaggagattcgagcgagactgtaaggaagccgatcgggcacagcagtacttcgagaagatggatgcagatattaacgtgaccaaggccgatgtagaaaaagccagacagcaggcgcagattcgtcatcaaatggccgaagattccaaggcagattattcctccattctgcaaaagttcaaccacgagcagcatgagtactatcatacccacatcccaaatatttttcagaaaatccaggagatggaggaacggaggattgttaggatgggggaatccatgaagacctacgccgaggtggataggcaggtcatccctatcattgggaaatgtcttgacggaattgtcaaggcagcagagtcaatagaccagaagaacgacagccagctggtcatcgaggcctacaagtccgggtttgagcccccgggcgacatagagtttgaagattacacacagccgatgaagcgaaccgtgtcagacaacagcctgagtaattcccggggcgaaggtaaacctgatttaaagttcggtgggaaaagtaaaggcaagctttggcccttcattaagaagaacaagccccccccccctccgcccgcttccgcttccccttctgcagtgcctaatgggccccaatccccgaagcagcagaaagaaccactgtcccacaggttcaacgagtttatgacctccaaacccaaaatccactgctttcgttcactcaagagggggcatagtctcaccctccagggggctacccctgaggacttttcgaatctcccccctgagcagcgacggaagaagctgcaacagaaggtcgacgaacttaacaaagaaatccagaaggaaatggaccagcgggacgccattacaaagatgaaagacgtttacctgaaaaatccccaaatgggtgatccagccagtttggatcataaattggccgaggtctcccagaacattgagaagctcagagtagaaacccaaaagttcgaggcctggctagccgaagtggagggtagattgcccgcccgttctgagcaggccaggcgccagagcggcctctatgattcccagaaccctcctaccgtgaacaattgcgcacaggacagagaatcccctgacgggtcttacacagaagaacagtctcaagagtctgaaatgaaagttttagccaccgactttgatgacgaatttgacgacgaggagccactgcctgccataggaacttgcaaagcgctttataccttcgaggggcagaatgagggcaccatttctgtagtggaaggggagacactgtacgtcattgaggaggataagggagacggctggacgagaatcagaagaaacgaagatgaggagggctacgtgcctacaagttatgtcgaggtttgccttgacaagaacgctaaagacagttag

SEQ ID NO: 117403 - DNA, 738 bp, synthetic construct
  misc_feature 1..738: note = Description of Artificial Sequence: Synthetic coding sequence
  source 1..738: mol_type = other DNA
atgaagcgcactatcgggaagccaacttatgcatttgaggccagagattatgtgcttagcctgaaactgggagcgacccccgaggatttcagcaatcttccacccgagcagcgacgcaagaagcttcagcagaaagtagacgagctgaataaggaaattcaaaaggagatggaccagcgggacgccataactaagatgaaagatgtttaccttaagaacccgcaaatgggcgatcctgcatcactggaccataagctggctgaagtctcacagaacatcgagaagctgagggtcgaaacacagaagttcgaggcgtggctcgcggaagttgaagggcggctgcccgccagatcggagcaggcgcgacggcagtcaggactttacgacagccaaaatcctccaacagtgaataactgtgcacaggacagggaatcaccagacggaagctatacggaagagcagtctcaggagagcgagatgaaggtgttggccacggattttgacgacgagttcgacgacgaggagcccctgccagcaatcggcacctgtaaggccttgtacacattcgaagggcagaacgaaggcactatcagtgtcgtggagggcgaaaccctgtatgtgatcgaggaggacaaaggggacggttggacgcggatccgacgaaatgaagatgaggaaggctacgtgcctacctcgtacgtggaggtctgtcttgataaaaacgctaaggactcttag

SEQ ID NO: 117404 - DNA, 1854 bp, synthetic construct
  misc_feature 1..1854: note = Description of Artificial Sequence: Synthetic coding sequence
  source 1..1854: mol_type = other DNA
atgtcctggggtacagagctgtgggaccagtttgataacctagagaagcatacccagtggggtatcgatatactagaaaagtacatcaaatttgtgaaggagcgaacggagatcgaactctcatacgctaagcagctgaggaatctgtcgaagaagtatcagccgaaaaaaaacagcaaagaggaagaggaatacaaatacacgagctgtaaagcattcatcagtaatctgaatgaaatgaacgactatgctggccagcacgaagttatttccgaaaacatggcctcgcaaataattgtcgatctagctcggtacgtccaggagctgaagcaagagcgcaaaagcaacttccatgacggccggaaggcgcaacagcatatagagacctgctggaaacagctggaatccagtaaaaggcggttcgaaagggactgtaaagaagcagatagagcccagcaatacttcgagaagatggatgcagacattaatgtgacgaaggccgatgtggagaaggcacggcagcaggctcagatcaggcaccagatggcagaggacagtaaagcggactacagttctatattgcaaaagtttaaccacgaacagcacgagtattaccatactcacatccctaatatctttcagaagatacaggaaatggaagagcgtcgtatagtccgaatgggtgagtccatgaagacttacgccgaagtggacaggcaagttatacccatcatcggaaaatgcctcgatggaattgttaaggctgccgaatcgatcgaccagaagaatgactctcagctggtcattgaagcctataagtcggggtttgaacccccaggcgacattgagttcgaggactatactcagccaatgaaacggaccgtgtcagacaattccctgagcaacagccgcggggagggcaagcctgacctgaagttcggtggaaagtctaaaggaaaattgtggcccttcattaagaaaaataaactcatgtcacttcttacaagtcctcaccagcccccacctcccccgcctgcatccgccagcccttccgctgtgccaaacggccctcagtctcctaagcagcagaaggaacccctgagccaccgctttaacgaatttatgacaagcaagcccaagatacactgtttccgcagtctgaaacgtggactgtctttgaagcttggagccaccccagaagacttctcgaacctcccacctgagcaacggcgtaagaagctgcagcagaaagtggatgaattaaataaggagattcagaaggagatggatcagagagacgctatcactaagatgaaggatgtctacttgaaaaacccacagatgggtgacccagcctctctagatcacaaactcgccgaggtttcccagaatatcgagaagttacgcgtagaaacccagaagttcgaggcctggctggctgaggtggagggcaggctgcctgctagaagcgagcaggcccggagacagtctggactctacgactcccaaaatcctcccaccgtcaataattgcgcccaggatcgggagtcgccagatgggagctatacagaggagcagtcgcaagaaagtgagatgaaggttctggctacagactttgacgatgagtttgatgacgaggagccgctgcccgccatcggcacgtgtaaagccctatatacatttgaaggccagaacgagggaacaatctccgtcgtggagggcgagacgctgtacgtcatcgaggaggataaaggtgacggctggactaggattcggaggaatgaggacgaggaaggctacgttcctacttcgtacgtcgaggtatgtctggacaagaacgccaaggattcctag

SEQ ID NO: 117405 - DNA, 1722 bp, synthetic construct
  misc_feature 1..1722: note = Description of Artificial Sequence: Synthetic coding sequence
  source 1..1722: mol_type = other DNA
tgactgtcttacgcaaaacaactgagaaatctgtcaaagaaatatcagccgaaaaagaacagtaaagaagaagaggagtataaatatacatcatgcaaggccttcatctccaaccttaatgagatgaatgactatgccggccagcacgaggtgatctccgagaatatggcgtcacaaatcattgttgacctcgcacgctacgtacaggagctgaagcaggaacggaagagtaacttccacgatgggcggaaagcccaacaacacatcgaaacctgctggaagcagctggaaagcagcaaaagacgttttgagagggactgtaaggaagcagatagagcacagcaatactttgaaaaaatggatgccgacatcaacgtcacgaaagccgatgtggaaaaagcccggcagcaggcacagatccgacaccagatggcggaagactctaaggcggattactcaagcatccttcaaaaattcaatcacgaacagcatgaatattaccatacacacattcctaatatcttccaaaaaatccaagaaatggaggagcggaggatagttcgcatgggagagagcatgaagacctatgcagaggttgatagacaggtcatacccatcatcggaaaatgtcttgacggcatagtgaaggctgcggaatctatcgatcagaaaaatgatagccagttggtaattgaagcatataagagtgggttcgaacctcccggcgacattgagtttgaagactacactcagccgatgaaacgcaccgtatcggacaacagcctgagcaactcgcgaggcgaagggaagcctgatctgaaattcggtggaaagagtaagggtaaactctggcccttcataaagaagaacaaaccccctcctcccccacctgcctcagcttcccctagtgccgtgcctaatggaccccagagcccaaagcagcagaaggagcctttgagccacagatttaacgaatttatgaccagtaaaccaaagatccattgttttcgttcccttaagcgcgggcattccctgctgaaaggcgccaccccggaggattttagcaacttgccccccgagcaacgcagaaaaaagctgcagcagaaggtggacgagctgaataaggagattcagaaagagatggatcagcgcgacgcaattactaagatgaaagacgtctatctcaagaaccctcaaatgggcgatccagcctctctggaccataaattagccgaggtgagtcagaacatcgaaaagttacgagtggaaacacagaaatttgaagcgtggctggcagaggtggaaggtcggctgcctgcccgatctgagcaagcgcgccggcaaagcggtctgtatgacagccagaaccctcccaccgtcaacaattgtgctcaggatcgcgagtctcccgatgggagctatacagaagaacagagccaggagtccgaaatgaaggtgcttgccacagacttcgacgatgaattcgatgatgaggagcccctccctgctataggaacctgtaaagccctttatacgttcgaggggcaaaatgaaggtactatttcagtggttgaaggtgagaccctgtatgtgatagaagaggacaagggggacggttggactagaatcaggcgaaacgaagatgaggaggggtacgtgcctacctcctacgtggaggtgtgcctagataaaaacgctaagggggctaaaacatacatctag

SEQ ID NO: 117406 - DNA, 3495 bp, synthetic construct
  misc_feature 1..3495: note = Description of Artificial Sequence: Synthetic coding sequence
  source 1..3495: mol_type = other DNA
atggcgggcggtgaagatagaggggatggcgaaccagttagcgtggtaaccgtcagagtacagtaccttgaagacactgacccatttgcctgcgccaatttccctgagcctcggcgagcaccaacttgttctttagacggggccctcccacttggcgcacaaatcccagccgttcacagattgctcggggcccccctgaagttagaggattgcgctctgcaggtttcaccctccggatactatctagacaccgaactctcacttgaggagcagcgcgaaatgctggaaggcttctacgaggaaatctctaaaggccggaaacctacccttatcctgagaacacagttgagtgttagagtgaacgcgatcctggagaagctgtattctagcagtggtcccgaactgaggcgctccctgttttcactgaagcagatctttcaggaggataaggaccttgttccagaattcgtgcattctgaggggttgagttgcctcattcgtgttggggctgccgccgaccataactaccagagctacatattgagagcactagggcaactgatgctgtttgtggatggaatgctaggagtcgtggcacattctgataccatccagtggctctatacactttgtgccagcctttctagactggtagtgaagacggctctcaagctgctactagtgtttgtggagtattctgaaaataatgcaccgctgttcataagagcagtcaattcagtggcgagcaccacaggcgccccaccttgggccaaccttgtcagtattctagaggaaaaaaacggggctgatcctgagctgctcgtatacacagttactctcatcaacaagacgttagcggccctccctgaccaggatagcttttatgatgtcaccgatgcactggagcaacagggaatggaggctctcgttcaacgacatctgggcacggcagggaccgatgtggaccttaggacccagcttgttctgtacgaaaacgctctgaaactcgaggatggcgacatagaggaggcacctggcgccggaggtaggcgcgaacgccggaagccaagctccgaagaaggaaagcgctctaggcgctctctggagggaggaggttgtccggccagagccccggagcctggacccacgggccctgccagccccgttgggcctactagtagtactggcccagcacttctgacgggaccagcttcttccccggtgggaccccctagcggcctgcaagcatctgtcaacctgtttccaactatctcggtggccccttcagcggacacctcttcagaacgatcaatctataaagcccggtttctcgagaacgtcgctgcagcggagacagagaaacaggtagcactcgctcaagggcgggcagaaacactggcgggtgccatgccaaatgaggccggcgggcaccccgacgcccgccagctgtgggactctccagagaccgcgccagccgcaagaaccccccaatcacctgccccatgtgtgctgctgcgagcccagcgaagcctggccccggagccgaaggagcccttaatcccagcgagtcctaaagctgagcccatctgggaactccccaccagagcccctagactctccataggggacctggacttctccgaccttggcgaggatgaggatcaggatatgttgaatgtcgaaagcgtcgaggccggaaaagacatcccagctccctcacctcccctgccattgctgagcggcgtgcctcccccacctcctctgcctccaccacccccaatcaaagggccgtttccgcctccacctcctctacccttggcagccccactccctcattcagttcccgactcaagcgccctgcctaccaaacggaagactgttaagcttttctggcgcgaactgaagctggcaggcgggcacggggtgtccgcttcccgcttcgggccgtgcgccactttgtgggcctctctcgaccccgtgagtgtcgataccgctcgcctcgaacatctgtttgaatcccgggctaaggaagtactgccgagcaaaaaggcaggcgaggggagaaggaccatgactactgtgttagaccctaaacgatctaacgccatcaatatcggtctgaccactcttccacctgtgcacgtcatcaaagccgccctgctgaatttcgacgaatttgccgtgtctaaggacggtatcgagaagttgctgaccatgatgccaacagaagaggagcggcagaagatcgaggaggcccaattagctaatccggatatccccctgggaccggcagaaaacttcctgatgacccttgccagtattggagggctggccgctaggctccagctgtgggcgttcaagctcgattatgactccatggagcgggagatagctgagccattgttcgacctcaaggtgggcatggagcagctggtgcagaacgcgaccttccgttgcatcctcgctactttgctcgctgtgggcaacttcctgaacgggagtcagtcatcaggattcgaacttagctatctagagaaagtgtctgaggtcaaagataccgtacggaggcagagcctgctgcatcacctctgctccctcgtcctccagactaggccggaaagcagcgacctgtattcggagatccccgccctgacaaggtgtgccaaggtggattttgaacaactcacagagaatctgggacagctggagcgccgcagtcgcgctgccgaagagagtctcagatcactggcaaagcacgagctggcacccgctctgagggccaggctgacccactttctggaccagtgcgccagaagagtggcaatgctccgcatcgtccaccgaagggtctgtaaccgctttcatgcttttcttctgtatctgggatacacccctcaggctgcgagagaggtaaggattatgcagttctgtcataccctgagggagtttgcattggagtataggacctgcagggagcgtgtgttgcagcagcaacagaagcaggccacttatcgggagcgaaataagacaaggggaaggatgatcacagagacggaaaaatttagtggggtggctggagaggcaccctcaaatcctagcgtccccgtggctgtttcatcgggccctggacgcggcgatgcagactctcacgccagtatgaagtctttgctcaccagtcgaccagaagacacaactcataacagacgaagccgggggatggtgcagtcctcaagcccaattatgccaaccgtgggacctagcaccgcaagcccagaggaacctcctgggagctccctgccctctgacacgtctgatgagattatggatttgttagtgcagtccgtgaccaagtcttccccacgggcgctcgcggcacgagaaaggaaacgttcacggggaaaccgcaagtccttgcgccgtaccctgaagtcaggacttggagacgatctcgtgcaggcactcggcctatccaaaggacccggcctggaagtttag

SEQ ID NO: 117407 - DNA, 4320 bp, synthetic construct
  misc_feature 1..4320: note = Description of Artificial Sequence: Synthetic coding sequence
  source 1..4320: mol_type = other DNA
atggctaccctcgcttgccgggtccagttcttagatgacaccgatccctttaactcgaccaatttccctgagccgtctcgtccacccctcttcacgttccgggaggacctagccctcggtacacagctggctggtgtgcaccgactactgcaggcacctcacaagctggacgactgcaccctgcagcttagtcataatggtgcatatctggatcttgaagccactctcgccgaacagcgagacgaactggagggattccaagacgacgcaggacgcggaaagaagcatagcatcattctgagaacccagctgagcgtgagagttcatgcgtgcatagagaaattgtacaactcttcaggccgggacctcaggcgcgccctgttttcgttgaaacaaatctttcaagacgacaaggacttagtgcatgaattcgtggtagccgagggcctgacatgcctgatcaaagtaggtgcggaggccgatcaaaattaccagaattacatcttgagagctctggggcagataatgctgtacgtcgacgggatgaatggggtgatcaatcggaacgaaacgatccagtggctgtacactctgattggatccaagttcagactggtggtcaagaccgcgctcaagctgctcttagtatttgtcgagtactccgagtcaaacgcacccctgctgatccaggcggtaaccgctgttgatactaaaagaggtgtgaaaccatggtccaatataatggagatactggaagagaaagacggggtggacaccgaactcttagtttacgctatgaccttagttaacaagacgctctccgggctgcctgaccaggataccttctatgacgtggtggattgtttggaagaactcggaatagccgccgttagccagaggcaccttaacaagaagggaacagatctagatctcgtggaacagttgaacatctatgaagtagcactgcgccacgaggacggcgatgaaacaacagagccaccaccctccggttgtcgggacagacgtcgcgcctctgtgtgctcatcgggtggtggcgaacaccgagggctagaccgtaggaggtcgcgcagacacagtgtgcaatccatcaagtctaccctgagcgcacctacgtcgccatgtagtcagtctgctccatcattcaagcctaaccaagtacgggatctgagggagaaatattcgaattttggcaataactcataccatagtagcaggccctctagcggcagctccgtccccacaactcccacgtccagcgtctcccctccccaggaagctcgcttggaaaggtcctcccccagtggactattgacttcaagctttcgacagcaccaagaaagcctggctgctgaacgggagcgccgacgccaagagcgcgaagagaggctccagaggatcgaaagagaggaacgaaacaagttttctcgcgattatctcgacaaaagagaggaacagcgccaggcgcgggaagaaagatataaatacctcgaacaactggctgctgaggagcatgagaaggaactgaggtcccgttcagtgagtcgcggaagagcggatctgtcacttgatttgacgagccctgcagccccagcatgtctggcccccctctcccactccccaagctcatcagacagtcaggaggccttgaccgttagtgcttcctctcccgggacacctcaccaccctcaagcttcagctggtgacccagagccggaatccgaggctgagcccgaggctgaggcaggcgctggacaggtcgctgatgaggccggccaggacatcgcgtccgcccatgagggcgccgagacagaggtggagcaggcattggaacaagaacccgaggaacgtgcttctctcagcgagaaggagagacagaatgaaggagtgaatgagagagacaactgtagcgcgagtagcgtcagttcctctagctccacactcgagagggaggagaaggaggataaacttagtcgcgaccggacaactggtctgtggcccgcgggggttcaagacgccggggtcaacggccagtgtggcgacattctaacgaacaagaggttcatgctggatatgctgtacgcccataatcgtaaatcccccgacgatgaagagaaaggtgatggagaggcagggcgtacccagcaggaggccgaagcagttgcctccttggccacccgaatctcaaccctgcaggccaatagccagacccaagatgaatcagtgcgacgggttgacgttggctgtctggacaatagggggtctgtcaaagccttcgcagaaaaattcaatagcggtgatctgggacgtgggtccatttctcccgatgccgaacccaacgacaaggtaccagaaacagcacccgtccagcccaaaacagagtcagattacatctgggaccagttgatggctaacccacgggaactccggatccaagacatggactttactgacctcggcgaggaggatgatatcgatgtattggatgtagacctaggtcatagggaggccccaggcccaccaccccccccaccaccgacctttctcggtctgcctccaccgcctccaccgccattgcttgattccatccctccccccccggtgccgggcaacttgctagtgccaccaccccctgtctttaacgctccccagggcctaggatggagccaagtgccccgcggccagccaacatttacaaaaaaaaagaaaaccatacgactgttttggaacgaagtgcggcctttcgactggccctgcaagaataatcgaagatgtcgagagttcctgtggagcaagctggagcccataaaggtggataccagccggcttgagcatctgttcgagagcaagagtaaagaattgagcgttagtaagaaaacagccgctgacgggaaacgtcaggagatcatagttctggactcgaagcgctcaaacgcaattaatattggccttaccgtactaccccctcctcggactatcaaaattgccatcctgaattttgacgaatacgctctgaataaagaaggtattgagaaaatcctgactatgatccctacggatgaagaaaagcagaaaatccaggaagcacaacttgccaatcccgaaattcccttaggttctgccgagcaattcctcctcaccctgtccagcattagtgaactaagcgctcgccttcacctatgggcatttaagatggactacgaaaccaccgagaaggaagtcgcggagcctcttctggacctgaaggaagggatcgatcagctggagaacaataagacactcggttttattctgtcaactctattagctatcggaaacttcttaaacggcaccaacgcaaaggcattcgaactgagctaccttgagaaggtccccgaagtgaaagacaccgtgcacaaacaatctttgctacaccacgtctgcaccatggtcgttgaaaacttccccgattctagcgacctgtacagtgagattggtgcaattaccaggtcagcgaaagtggatttcgatcagctgcaagacaacctgtgtcagatggaaaggcgttgtaaagcttcatgggaccacctgaaagcaatagcgaagcatgagatgaaacccgtgctcaaacagaggatgagcgagtttcttaaggattgcgccgaaaggatcatcatcttgaaaatagtgcacaggcgtatcatcaatcggttccacagctttctcctcttcatgggccacccaccttacgctatcagagaagtaaacattaataagttttgccgcatcattagtgagttcgctttagagtaccgtacgacgagggaacgggtgttacaacaaaaacagaaaagagccaatcatcgtgagcgcaataagacccgaggcaagatgataacggacagtgggaaattttccggatccagtccagcccctccatcacagccccagggcctgagctacgctgaggatgccgctgaacacgagaacatgaaagccgtcctcaaaacttcatcccctagcgttgaggatgctacccccgccctcggtgtacgcactcggagcagagctagcagaggttctacctcttcctggacaatggggaccgatgattcacctaacgtcactgacgatgcagccgatgagattatggacagaattgtgaaatcggcaacacaggtgccaagccagagagtggtaccacgggaaagaaaacggtctagggcaaacagaaagtctttgagaaggacgctcaaatccggcctcacgcccgaggaagcccgggccctgggactggtagggacctccgaacttcagttgtag

SEQ ID NO: 117408 - DNA, 4269 bp, synthetic construct
  misc_feature 1..4269: note = Description of Artificial Sequence: Synthetic coding sequence
  source 1..4269: mol_type = other DNA
atggcgactcttgcatgtcgtgttcaattcctggacgacactgatcccttcaactccacaaacttcccagagccttcccggccaccattgttcacttttcgagaggatttggccctggggactcagctggctggggtgcacagattactccaggcacctcataagttggacgactgtacccttcagttatctcacaacggagcttacctggatctcgaagcaacgttggccgagcagcgggacgagttagaaggcttccaggatgacgccggacgaggaaagaaacactccattattcttcggacccagctgagcgtgcgagtccacgcctgcattgagaagctgtataattcatcaggacgggatctgcgccgggccctgttctccctgaagcagatttttcaagatgataaagatctggtgcacgagttcgtggtcgctgaaggcctcacgtgcttgattaaagtgggggccgaagctgaccagaattaccagaactatattctgagagctttgggtcaaattatgctgtacgttgatgggatgaatggcgttattaataggaacgagactatccagtggctatatactttaatcggctctaagttccgtctggtggttaagaccgccctcaaactcctattagtcttcgtcgagtatagcgaaagcaacgctccactcctcatccaagccgtgaccgcagttgatacaaagagaggggttaagccatggtccaatattatggagatcctggaggagaaggacggagttgacacagaactgctcgtatacgccatgactctggtgaataagacactgtccggcctgccggaccaggatacattctacgatgtcgtcgattgtttagaggagctgggcattgctgcagtgagccagcggcacctaaataaaaaaggcacggacctcgacttggtggagcagttaaacatttacgaagtggctctgaggcatgaagatggagatgagactaccgagcctccaccctccgggtgccgagatcgtcggcgcgctagcgtgtgctcttctgggggaggggaacatcgcggtctcgaccgtagaaggagtcggcgtcactccgtacagtccataaagtccacccttagcgctccaacaagcccatgctcgcagtccgccccttcattcaaacccaatcaggtgcgagatttacgggagaaatactcaaattttggcaacaacagttatcattccagccggccgtccagtggctcatccgtgccaacaacacccacgagctccgtgtctccaccccaggaggcacgtctggagcggtcttcaccgtccggacttcttaccagttcttttcggcagcaccaggagagcttagccgcagagagagaaagacgccggcaggaacgagaggaacgcttacaaaggatcgagagagaggagcgcaacaaatttcgatataagtatctcgaacaactggctgccgaggagcatgagaaagagctgcgttcacggtccgtctctcggggacgtgcggacctttcactggatttgacttccccagccgctcctgcctgcctagctccactctcacactcccctagcagtagcgactcacaggaagcccttacagtttcagcatcctctccgggcaccccccaccatccccaagcaagcgcgggggatcccgagccggaatccgaggccgagccagaggcagaggccggagcaggccaagttgctgatgaagctggacaggatattgcgtccgcacacgaaggcgctgagacagaggtggaacaggccctggagcaggaaccagaagaacgcgccagcctgtcagagaaggagcggcagaatgaaggggtcaatgagcgtgataactgcagcgcctcttcagtgtcttcatcaagtagtacgttagaaagggaagaaaaggaagacaagttatcacgcgatcggaccaccggcctgtggcccgccggggtgcaggacgccggcgttaacggccaatgcggagatatcctgaccaacaagcgctttatgctggatatgctgtacgcccataaccgtaaatctcctgacgacgaagagaagggtgacggggaggccggtcgaactcagcaggaggcggaagctgtggcatcactcgctacgcgaatttccactttgcaggcgaactctcagactcaggacgaatccgtccggcgagtcgacgtgggttgcctggacaaccgcggctcagtcaaggcgttcgcggagaaatttaattcaggggacttaggaaggggatctataagtccggacgctgagcccaacgacaaggttcctgagacagccccggttcagcctaaaacagagtccgattatatttgggatcagttgatggccaaccctagggaattgcgaattcaggatatggactttactgatctgggcgaggaagacgacatcgacgtattggacgtcgacctgggtcatagagaagcccctgggccacctccccctccccctccaacatttttggggctcccaccacctcctcctccacctcttctcgacagcatccccccacctcccgtcccagggaatcttctagtgccaccacccccggtctttaacgctcctcagggtctggggtggtctcaggtgccccgagggcagcccacatttaccaagaaaaaaaagaccatacgtctcttctggaacgaggtcagaccatttgactggccgtgcaagaataatcgtcgctgtcgcgagttcctgtggagcaagctggagccaatcaaggtggatacttcgagactggaacatctgtttgaatccaagtcaaaggagctttcagtgtcaaagaagaccgccgcggacgggaagagacaggagatcattgtgctggactccaagcgatccaatgcaataaacataggtctcacagtgctgccgcccccgaggaccattaaaattgccatactgaatttcgatgagtacgccctaaacaaggagggcatcgagaagattctgacaatgataccaacagatgaagaaaaacagaaaattcaggaggcacaactggccaacccagagatccctttggggtccgctgaacagtttcttctgacactgtcctcaataagcgagctgtccgctcggctgcatctttgggccttcaagatggattacgagacaaccgaaaaggaagtggccgagcccttgctggatcttaaagagggtatcgaccaattagaaaacaacaagactctgggcttcatcctatcaacactactcgccattggaaatttccttaatggcactaacgctaaagctttcgaacttagttacctcgagaaagtccccgaggttaaagacacagtgcataagcagagcttgctccatcatgtctgcactatggtcgtggagaatttcccagacagctcagatctttatagtgagatcggcgccattactcggagcgcgaaggttgattttgaccagctccaggacaatctctgtcagatggagcgccggtgcaaagcctcatgggatcacctgaaagctattgccaaacacgaaatgaagcctgtgctgaagcagagaatgagcgagttcctgaaagattgcgctgaacgcataatcatccttaagatcgtgcaccgccgcataataaatcgatttcatagttttctcttgtttatgggtcatcccccttacgccattagggaagttaatattaataagttctgtcgaatcatcagtgagttcgccttggaatatcggaccacaagggagagggtgctccagcaaaaacagaagcgggctaatcacagggagcgaaataaaaccagaggtaagatgataacagatagtgggaagttttccggcagctccccggcccctccatcacaacctcagggactgtcctatgccgaggacgccgccgaacacgaaaatatgaaagcagtcctcaaaaccagttctccatcagtggaagacgctactccagcgctgggagttagaactcgttcgagagcgtcccgagggagcactagttcctggacgatgggcacggacgatagccccaacgttaccgatgacgccgctgatgaaattatggatagaattgttaagtctgccacacaggtcccgtcgcagagggtggttccccgggagcgcaagcgttcaagagccaacaggaaatccctcagacggaccctcaaaagcggcctcacccctgaagaagctcgcgcccttggtctggtgggcacctctgagttacaactctag

SEQ ID NO: 117409 - DNA, 4206 bp, synthetic construct
  misc_feature 1..4206: note = Description of Artificial Sequence: Synthetic coding sequence
  source 1..4206: mol_type = other DNA
atggctacactcgcctgtcgcgtgcaatttctggacgataccgatcctttcaacagcaccaattttccggaaccatctcgccccccgctgttcacctttagggaagaccttgcactaggaactcagctggccggcgttcatagactactgcaggctccacacaaattggacgattgcacactgcagctcagtcacaacggtgcctatttggacctggaggccacactggccgaacagcgagatgagctggaagggttccaggacgatgcgggtcgcggcaagaaacacagtatcattctgagaacccagctttctgtgagggtgcacgcctgtatagagaagctgtacaattcttctggccgggatcttagacgagcacttttctccctaaagcaaattttccaagatgataaagatctcgtgcatgagttcgtagtagctgagggccttacgtgcctgatcaaagtcggggcagaagccgatcagaactaccagaactacattttgcgagctctggggcagatcatgctctacgtcgacgggatgaacggagtgattaaccgaaatgaaactattcagtggctatatactctcataggaagtaaattcagattggtggtcaagactgccctgaaacttctgctagtttttgtggagtatagcgaatccaacgccccactccttatccaggctgtcaccgctgtggacactaaacgaggtgtcaagccttggtccaatataatggaaattctcgaggagaaagatggggtggacaccgagcttctagtgtacgcaatgactctagtgaacaagacgctctccgggctacccgaccaggatacattctatgacgtggtggactgcctcgaagagctggggattgccgcagtgagtcagcgccacctgaacaagaaagggaccgacctcgatttggtagaacaactgaacatctatgaagtcgctttgagacacgaggatggcgacgagactactgaaccacctccaagtgggtgcagggacaggcgtagggctagcgtctgtagcagtgggggcggggagcaccgagggttggatcgccgacgctcccgacgtcactcagtgcaatcaataaaaagcacgctaagtgctcctactagcccatgctcacaaagtgcaccttctttcaagcccaatcaggtgagggacctgcgcgagaaatcctccccttcaggattactgacgtcatcctttcggcagcaccaggagtcccttgccgctgagagggaacgccgccgccaggagagggaggaaaggctgcagcgaatcgaacgagaagagaggaataagttctcacgggattatctggacaagcgagaggagcagcgtcaagcccgagaagaaagatataaatatcttgagcaactggctgcagaggagcacgagaaggaactgcgaagtcgctctgtcagcagagggcgggccgacctgtctcttgatctaacgagcccagcggcgcccgcatgcctcgcacccctttcccattctcctagctcttccgattcacaggaagcactcaccgtgtcagccagcagcccgggcacaccccaccatccccaggcaagtgcaggcgatcctgagccagagtccgaggctgagccggaggccgaagcaggagccggccaggtagccgacgaggccggccaggatattgcgtccgcacacgaaggcgctgagacagaggtcgaacaggctctggagcaggaaccagaggagcgagcctccctttcagagaaggagcggcagaatgagggggtaaatgaaagggacaattgctctgccagctcggtgtcttcctcatcttccaccctggaaagagaggagaaagaggataagctgtccagggatagaaccacaggcctttggccagctggcgtgcaagatgccggagtcaatggccagtgtggggatattctcaccaataagagatttatgctcgacatgctctatgcccacaaccgcaagtctccggacgacgaggaaaaaggcgatggcgaggcgggccggacacaacaggaagcagaagccgtggcaagcttggctacacgcatctccactctgcaagcaaattctcagacccaggacgagagtgtcagaagggtggatgtggggtgtctcgacaacaggggtagcgtcaaggcgtttgctgagaaatttaactcaggcgatctcggcagaggttccatttcccccgacgccgagcctaatgacaaagtgccagaaaccgcaccggtgcagccaaagacggagtctgattatatatgggaccagctcatggctaaccctcgggaactacggatccaggatatggattttacagatctaggcgaggaggatgatatcgacgtcctggatgtcgatttaggacatagagaggcgcctgggccgcccccaccccctcctcctacttttctgggtctgcctcccccccctccgcccccgctactagactctatacctccgccccccgtgccaggaaaccttctggtcccgccgccccctgtctttaatgcaccccaaggcctgggttggtctcaggtcccgagaggacaaccaacattcaccaagaagaaaaagactatcagactgttctggaacgaagtgaggcctttcgactggccatgtaagaataaccgcagatgcagggagttcctgtggtcaaaactggaaccgatcaaggtggacacctctcgacttgagcacctgtttgagtctaaaagcaaggagctcagcgtgtccaaaaaaaccgccgctgacggaaaacggcaagaaatcatcgttctggacagtaagcgctccaatgcgataaacattggcctcaccgtgctgccacccccgcgaactatcaaaattgctatcttaaacttcgatgaatatgccttaaataaggaggggatcgagaaaattctcactatgatccccaccgatgaggaaaaacagaagatccaggaggcacagctggccaatccagaaatccccctgggcagcgccgaacaatttctgctgacgctgtcaagcataagcgaactctccgcccgcctccatctgtgggccttcaagatggactatgagactaccgagaaggaggtggccgagcctttgctggacctgaaagagggcatagatcaattggagaacaataaaacccttggtttcatcctctctacccttcttgcgatcgggaattttttgaacggcaccaacgcaaaggcttttgaactgtcctatctggagaaggtccctgaggtgaaagacacggttcacaaacagtcattgctgcaccacgtatgtactatggttgtggagaactttccagacagcagtgacctgtactccgagattggagccatcacacgctctgctaaagtggacttcgatcagttacaggataacctgtgtcagatggaaaggagatgcaaagcgtcttgggatcatctgaaggcgatcgctaagcatgagatgaaacccgtcttaaagcagagaatgtctgagtttctcaaggattgtgctgagcgtataattatactcaagatcgtgcaccgtcggatcataaatagatttcactcctttttgcttttcatgggacaccccccgtacgctataagggaggtcaacatcaataaattttgtaggatcatttctgagtttgctcttgagtacagaaccactagggaaagggtgctacagcagaaacagaagagggccaatcacagagaacggaacaagacccgcggcaaaatgatcacagattcgggcaagttttctggcagtagtcccgctccacctagtcagccacaggggctgtcatacgctgaagacgcggctgaacacgagaatatgaaggctgtgctcaaaaccagctccccctcggtggaagatgccacgcctgctctcggagtgcggacccgctcaagagcatcccgagggtccacatcctcatggacgatgggaaccgacgactctcccaatgttacagacgacgccgccgacgaaattatggaccggatcgtcaaatccgccacacaggtaccatctcaaagagtcgtgcctcgagaaaggaaacgctctcgcgcaaataggaagtcgctgcggcgtactctgaagtcaggcctgacgccagaggaggcacgagctctggggctcgtgggaacgtccgaacttcagctgtag

SEQ ID NO: 117410 - DNA, 1053 bp, synthetic construct
  misc_feature 1..1053: note = Description of Artificial Sequence: Synthetic coding sequence
  source 1..1053: mol_type = other DNA
atggagactaattcatcactgcctacgaatatcagcgggggtactcctgccgtctctgctggctaccttttcctggatattatcacttatttggtgtttgccgttacttttgtcctcggcgtgctaggcaacggtctggtgatttgggtggccggcttcaggatgactcatacagtcactacaataagctatctgaacctggctgtggcagacttttgttttacttctaccttgccttttttcatggtaaggaaggcaatgggggggcactggccctttggctggtttctgtgcaagtttgtgtttacaattgttgatatcaacttgttcggcagcgtcttcttaattgcactgattgcactggatagatgtgtgtgcgtacttcatccagtctggacccagaaccacaggactgtctctttggccaagaaggtgatcattgggccttgggttatggcactgctgctcacccttccggtgatcattcgggtgacgacagttcccgggaaaaccgggactgtggcctgtacgtttaatttcagcccctggactaacgatcctaaggaacgaataaatgtggccgttgcaatgttgaccgttcggggaatcatcagatttataatagggttttccgcccctatgtctatcgtcgccgtcagttatgggctcattgctaccaaaattcacaagcaagggctgattaagagttccagaccactcagagtgttgtccttcgtggcggccgcatttttcctgtgttggtcaccataccaggtcgtggctcttattgctaccgttaggattcgagagctgcttcagggcatgtacaaagaaattgggatcgcagtcgacgtgacctcagccctggcatttttcaatagttgccttaatcccatgttatacgtgtttatgggccaggactttcgggaacgcctcatacacgccctgcctgcttctttagaacgtgcactgactgaggatagcactcagactagcgataccgccacaaattctacgcttccaagcgctgaggtggagctgcaggccaagtag

SEQ ID NO: 117411 - DNA, 1053 bp, synthetic construct
  misc_feature 1..1053: note = Description of Artificial Sequence: Synthetic coding sequence
  source 1..1053: mol_type = other DNA
atggagaccaattcaagcctccctaccaacatatcgggagggaccccagctgtatctgccgggtacctgttccttgatattattacatacctcgtgttcgctgtgacttttgtgcttggcgtgctcggtaacgggctggtgatatgggtcgcgggcttccggatgacgcatactgtaacaaccatctcttacctgaatctcgctgttgcagacttttgcttcacttccacacttcctttttttatggtgcggaaggcaatgggcggccactggcccttcggctggtttttatgcaagtttgttttcacaattgtcgatatcaacctcttcggcagcgtgttcctgatagccttgatcgcactggaccgttgtgtgtgcgtgctgcaccccgtctggacgcagaatcaccggaccgtgagccttgctaaaaaagtgattattggtccctgggtgatggcgctgctcctcacactcccagttataatccgcgtgacgactgtacccggcaagaccggtaccgtcgcctgcacttttaatttctccccatggactaacgacccgaaagagagaattaacgttgccgtggccatgctaaccgtgagaggaattatcagattcattatcggcttcagcgccccaatgtcaatcgtggcagtctcctatggattgatcgcaactaagattcacaaacagggactgatcaaatcatctcggcccctgagagtgctgtcttttgttgcagcagcgttttttctgtgctggagtccataccaggtggttgccctcatcgcaacagtgcgcatcagggagcttttgcagggaatgtacaaggagattggcatcgcagtggatgttacgtcggctctggccttctttaactcatgccttaatcccatgctctacgtatttatgggccaggatttcagggagagactaatccacgcacttcccgcttcactggagagagcgctaacagaggactcgacacagacttctgacaccgcaaccaattctaccttaccaagcgctgaggtcgagctgcaggctaaatag

SEQ ID NO: 117412 - DNA, 1056 bp, synthetic construct
  misc_feature 1..1056: note = Description of Artificial Sequence: Synthetic coding sequence
  source 1..1056: mol_type = other DNA
atggaaacaaatttctccacacccctcaatgagtacgaggaggtgtcgtatgaaagtgctggctatacagtactgcgaattttacccctcgtagtgctgggtgtgacctttgtgctgggggtcctcggaaatggactagttatatgggtggcaggatttaggatgacaagaactgtgaccaccatctgctacttgaatctcgcgctcgccgacttttccttcacggccacattgccattcctgatcgtctctatggccatgggtgagaagtggccatttggctggttcctttgtaagctgattcatattgtcgtggacatcaatctgttcggctcagtgttcttgatcggattcatcgctttagaccgatgcatttgcgttctgcatcctgtctgggcacagaaccatcgcaccgtgagccttgctatgaaggtgatcgtgggtccatggatcctcgcacttgttctgactctgcctgttttcttgttcctgactacagtgaccatcccgaacggagacacttactgcacctttaattttgctagctggggcgggacccccgaagagcgccttaaggtcgcgattaccatgctcaccgcgcggggaataatccgtttcgttatcggattctctttaccaatgagcattgtggctatatgctacggcttaattgccgctaaaatccacaagaagggcatgatcaaaagttccaggcctctcagagtgttgaccgcagttgttgctagcttcttcatctgctggttccccttccagctcgtggccctattaggcaccgtgtggcttaaggagatgctattctacggaaagtataagattattgacatccttgtcaaccccacctccagtctagcattcttcaacagctgccttaaccctatgctgtacgtcttcgttggtcaggattttcgcgagcggttgattcactccctgcctacatcactggaacgagcgttgagcgaggactcagcacctacaaatgatacagccgcgaactctgccagtcccccggcggagactgagttacaggctatgtag

SEQ ID NO: 117413 - DNA, 1056 bp, synthetic construct
  misc_feature 1..1056: note = Description of Artificial Sequence: Synthetic coding sequence
  source 1..1056: mol_type = other DNA
atggagacaaatttctcaaccccactcaatgaatatgaggaagtcagctacgagagcgcgggctacaccgtcctcagaatcctgccgctggtcgttctgggcgtgacattcgtgctcggggttttggggaacggtctggtaatctgggtggcaggttttcgcatgacccggacagtcactacaatttgttatctaaatcttgctctggctgacttttcatttacagcgacactgccttttctaattgtatccatggcgatgggcgaaaaatggcccttcggctggttcctgtgtaagctcattcacattgtggtcgatatcaatctgtttggatccgtcttcctgattggtttcatagccctggataggtgcatttgcgtgctacatcccgtttgggctcaaaaccaccgtaccgtgtccttggcaatgaaggtgatcgtcggcccatggatcctggctcttgtccttaccctgcccgtcttcctcttcctcaccaccgtcacaattcccaatggagacacctattgtacttttaactttgcatcctggggcggaacgccagaagaacggctgaaggtggccatcacaatgctcactgcgcggggaataatccggtttgtgattggcttctccctccccatgagtatcgtggccatctgttacggcttgattgccgccaagatccataagaaagggatgatcaaaagctcccgtcctctccgcgttctgaccgccgtggtcgccagtttttttatctgctggttccctttccagttggttgcactgctgggcactgtctggttgaaggaaatgttgttttacggcaaatacaaaatcatcgacatcctcgtcaacccaactagctctttagctttttttaacagctgcctgaaccccatgttgtacgtattcgtgggccaggacttcagggaaaggctgattcactcccttccaacctccctggaacgtgctcttagtgaggattctgcccctacgaatgataccgctgcaaattccgcctctcctcctgccgaaaccgaactccaggcaatgtag

SEQ ID NO: 117414 - DNA, 1062 bp, synthetic construct
  misc_feature 1..1062: note = Description of Artificial Sequence: Synthetic coding sequence
  source 1..1062: mol_type = other DNA
atggagacgaatttcagcataccactcaacgagaccgaggaggtgctacccgagccggctggacacaccgtcctctggattttctctttgctggtccacggtgtaacctttgttttcggcgtcctcggtaacgggctcgtgatctgggtggcagggtttcggatgactcggactgttaacactatctgctacctaaatctcgccctggccgacttctccttcagcgctatactgccctttcggatggtgtccgtggctatgcgggagaaatggccgttcggaagctttctctgcaaattagtgcacgtgatgatcgatattaatctgttcgtcagcgtgtacctgatcacaatcattgccctcgatcggtgcatctgcgttctgcacccagcttgggctcagaatcataggaccatgtctctggctaagagagtgatgacgggcttatggattttcactattgtgctgacactgccaaacttcattttctggactacaataagcacgaccaacggagatacctattgtatcttcaatttcgcattctggggagataccgctgtggaaagacttaatgtgttcatcaccatggcgaaggtctttcttattttgcattttattattgggtttagtgtgccaatgtctatcattaccgtctgctacggaatcatcgctgctaagatccataggaatcacatgattaagagcagcaggcctctgcgggttttcgccgccgtcgtggcttcctttttcatttgttggttcccctatgagctgattggcattctaatggcggtgtggttaaaggagatgctgttgaatgggaagtataagataattctcgttctcatcaaccctacatcttccctggcattcttcaatagctgcctgaaccccatattgtacgtgttcatgggtaggaattttcaggaaaggctcatcagatccttaccaacctcactcgaaagagctctgactgaggtgccagactcagcacagactagcaataccgataccacaagtgcgtcaccccccgaagaaaccgagctccaagccatgtag

SEQ ID NO: 117415 - DNA, 816 bp, synthetic construct
  misc_feature 1..816: note = Description of Artificial Sequence: Synthetic coding sequence
  source 1..816: mol_type = other DNA
atgtttcgcgatttcggtgagccaggcccttcctccggaaatggcggtggatacggcggaccagctcaaccgcccgcagccgcacaagcagcccagcagaaatttcaccttgtgccgagtattaatactatgtctggctcccaggagctgcagtggatggtgcagccacactttctgggtccaagctcctacccgcgcccactgacctatccacaatatagtccgccccagccacgacctggtgttatcagagctctaggtccaccgccaggagttcggagacgcccttgcgagcagataagtcctgaggaggaggaacgaagaagggttagacgtgagaggaacaagctcgctgctgctaaatgccgtaacaggcgcaaggaactaactgactttctccaagccgaaaccgacaaattggaagacgagaagtcgggactgcaacgcgagatcgaagagctccagaaacaaaaggaacggctagaactcgtcttagaggctcatcggccaatctgcaaaataccagaaggggccaaggaaggggataccggcagcacgtctgggacaagctcaccaccagctccatgccgccccgtgccttgcatcagcctctcccctggaccagtactcgaaccagaggccctacatacgccaacactaatgacaacaccctcactgacaccttttaccccgagccttgtgttcacttacccctccacacccgagccctgcgcaagcgctcacaggaaaagctcctctagtagtggcgacccatccagtgacccactgggtagccccacacttttggccctgtag

SEQ ID NO: 117416 - DNA, 510 bp, synthetic construct
  misc_feature 1..510: note = Description of Artificial Sequence: Synthetic coding sequence
  source 1..510: mol_type = other DNA
atgtttcgggatttcggggagcctggccctagtagcggaaacgggggggggtacggcgggccagcgcaacctcctgcggctgcacaggctgcccaacaggaaactgacaagctagaagacgaaaaatcaggattgcaaagggagatcgaagaactgcagaaacagaaagagcgattggaactggtgctggaagcccaccgacccatctgcaaaatacccgaaggcgccaaggagggggacacgggtagtactagtgggacctcttccccccccgctccatgtcgtcctgtcccatgtatttcgctgagccccgggccagtattggagcctgaggctctacacactcccactttgatgactacaccatccctgacgccttttacaccatccctcgttttcacctacccaagtacccccgagccctgcgcctccgcccaccgcaagagcagttcttctagcggggatccatctagtgacccgctcggcagccctaccctcctcgcactgtag

SEQ ID NO: 117417 - DNA, 351 bp, synthetic construct
  misc_feature 1..351: note = Description of Artificial Sequence: Synthetic coding sequence
  source 1..351: mol_type = other DNA
atgttccgcgacttcggcgaacctggcccatcaagcgggaacggaggaggctatgggggaccagcccagccacctgccgcggcccaggcagctcaacagaagtttcacctggtccccagcatcaataccatgtctggctcgcaggaacttcaatggatggttcaaccgcattttctgggaccctcctcttaccctaggcccttgacgtatccacaatactcaccaccccaacccaggcccggagttatccgggcactgggtccacctccaggcgtgcgacgcaggccatgcgaacagatttcacctgaagaagaggagtcgtggcagccccgggatttcgttgacccgtag

SEQ ID NO: 117418 - DNA, 981 bp, synthetic construct
  misc_feature 1..981: note = Description of Artificial Sequence: Synthetic coding sequence
  source 1..981: mol_type = other DNA
atgtatcaggactacccgggtaactttgacaccagctcccgaggttcttcagggagccccgcccatgccgaatcttattcatcgggggggggtggccaacagaaattcagagtcgatatgccaggaagcggaagcgcatttatcccgacaatcaacgctatcactacatcacaagatctgcaatggatggtgcagcccactgtcatcacatccatgagtaatccctatccccgatctcatccgtacagtcctcttcccgggctggcttctgttcctggccacatggccctgccccgtcctggcgtaataaaaaccatagggacaacggtcggtcgaaggagacgagatgaacagctcagccctgaggaggaggagaagcgcaggatacggagggaacgcaacaaactagcagcagccaagtgtaggaatcgccggagagagctaactgagaaactgcaggccgaaaccgaggagttagaggaagagaagtccggcttgcagaaggagatcgctgaactccaaaaagaaaaggagaagctcgagtttatgctcgtagcccacggcccggtttgtaagatcagtccagaagaacgccgatcaccaccagcccctgggctccaaccaatgcggtccggcggcggaagcgtgggggctgtggttgtgaaacaagagccattagaagaggatagcccatcatcctcaagtgcaggactcgacaaagcccagaggtccgtgatcaagcctatatccattgctggagggttttatggcgaggagcctttacatacgcctatcgtagtgacgtctactccagcagtgactcccgggacttcaaatctcgtgtttacctacccaagcgtcctcgaacaggagtctccagcgtcccccagtgagtcatgttcaaaggcccacaggcgcagctcctcctcgggagaccagagttccgattctctgaactcacctaccctgctggcgttatag

SEQ ID NO: 117419 - DNA, 864 bp, synthetic construct
  misc_feature 1..864: note = Description of Artificial Sequence: Synthetic coding sequence
  source 1..864: mol_type = other DNA
atgccgggaagcgggagtgcatttatccccacgattaatgcaattacaacaagtcaggacctgcaatggatggtgcagccgaccgtaataaccagtatgtcaaacccgtatccaaggtcccatccctactcccctcttcccgggctggcaagcgtaccaggacatatggctctgccacggccgggagtgattaaaacaatcgggactacagtagggcggcgccgccgcgacgagcaattatcacctgaggaagaggagaaaaggcggatacgccgtgagcgcaataaattagcagctgcaaagtgcagaaacagaagaagagagttaacggagaagctacaggcagaaaccgaggagctcgaggaagaaaagagtggccttcaaaaggagatagccgagctgcaaaaagagaaggaaaagctcgagtttatgctcgtcgcccatggacctgtgtgcaaaattagcccagaggagaggcgctcgcccccggccccaggcctccagcccatgagaagtggcggcggctctgttggggctgtggtggtcaagcaggagcctctggaagaggactctcccagcagctcttctgctggcctggataaagcgcagaggtcagtgatcaaacctatttcgattgctggaggtttttatggcgaggagcccttgcacaccccaatcgtggtcacctctactccagctgtcacacccggaactagcaacctggttttcacatatccatctgtcctcgagcaggaatcccccgcttctccttcagagtcttgctccaaagcccacaggcggtcctcctcaagtggcgaccagagcagcgattctctcaatagccctacacttcttgcgctatag

SEQ ID NO: 117420 - DNA, 972 bp, synthetic construct
  misc_feature 1..972: note = Description of Artificial Sequence: Synthetic coding sequence
  source 1..972: mol_type = other DNA
atggctgagaagtttgattgccattactgccgcgaccctctgcagggcaaaaaatacgttcagaaggatgggcaccattgctgtcttaagtgctttgataaattttgcgcaaacacatgcgtcgagtgtaggaaacctataggagcagatagtaaagaggttcattacaagaataggttttggcatgacacttgcttccgatgcgccaagtgcttgcaccctttggccaacgaaactttcgtggcaaaagacaataagattctctgcaataaatgtactacaagagaggactcccccaaatgtaaggggtgtttcaaagctattgtggctggggaccagaatgtggaatacaagggcacggtgtggcataaggactgtttcacatgcagcaactgcaaacaggtcataggcacaggttccttttttcctaagggagaagacttttactgtgtcacgtgccacgagacaaagtttgccaagcattgcgtaaagtgcaataaagccattacgagcggggggattacttatcaggaccagccctggcatgctgattgtttcgtgtgcgttacttgttctaaaaaactggccgggcagcggtttacggccgtggaagatcagtactactgtgtggactgctataaaaacttcgtggcgaaaaagtgcgcaggatgtaagaatcctatcactggcaagaggaccgtaagccgggtatctcacccagtaagcaaagccaggaagccccccgtgtgtcatggaaagagactccctctcacgcttttccctagtgcaaatctgagggggcggcaccccggaggggagaggacctgtcccagctgggtggttgtcctgtatcgcaagaatagatcactcgctgccccccggggtccgggcctggttaaagcacccgtgtggtggcctatgaaggataatcccgggaccacaacggcatcaacagccaaaaatgcaccctag

SEQ ID NO: 117421 - DNA, 774 bp, synthetic construct
  misc_feature 1..774: note = Description of Artificial Sequence: Synthetic coding sequence
  source 1..774: mol_type = other DNA
atggccgaaaaatttgattgccattactgcagagaccccttacagggtaagaaatatgtccagaaggatggccatcattgctgcttgaagtgcttcgacaagttctgcgcaaatacctgtgtcgagtgcagaaagcccattggcgccgatagtaaagaggtccactacaagaaccgcttttggcatgatacctgcttcagatgtgctaagtgcctgcatcctctcgctaacgaaacctttgtggccaaagataacaagattctctgtaacaaatgtactaccagagaagactcccccaagtgtaagggctgcttcaaagcaattgtcgccggtgatcagaacgtcgaatacaaggggaccgtctggcacaaagactgtttcacctgctcgaattgcaaacaggtgattggaacgggcagtttcttccccaaaggcgaggacttctactgtgtgacctgccatgagaccaaattcgccaaacattgtgtaaagtgcaacaaagctattaccagcggaggaattacctaccaagatcagccatggcacgcagattgttttgtgtgcgtgacttgctccaagaagctggctgggcaacggtttaccgccgtagaggaccagtactactgcgtcgactgctataagaacttcgtggccaagaaatgcgcaggctgcaaaaatccaattaccggatttggaaagggatcaagtgtagtcgcctacgaagggcagtcgtggcacgattattgctttcactgcaagaaatgtagcgtgtag

SEQ ID NO: 117422 - DNA, 633 bp, synthetic construct
  misc_feature 1..633: note = Description of Artificial Sequence: Synthetic coding sequence
  source 1..633: mol_type = other DNA
atggcctcccacagacacagcggcccatcaagctacaaggtgggtacaatggcggaaaagttcgactgtcactactgcagagatcccttacagggaaaaaagtacgttcagaaggacgggcatcactgctgcttaaaatgctttgacaaattttgcgcaaatacctgtgtcgagtgcaggaaacccattggcgcagacagcaaagaagtccactacaagaacaggttttggcatgatacttgctttcggtgtgccaaatgtctgcaccctctggctaacgagacattcgtggcgaaagacaataagatcttgtgcaataagtgcaccactcgcgaggattctcctaagtgtaaaggttgctttaaggccatcgttgccggagaccagaacgtggagtacaaagggactgtttggcacaaggactgcttcacttgctcaaactgtaagcaggtgattggaacgggctccttctttcccaagggggaggacttctattgcgtgacctgtcatgaaaccaaatttgccaagcactgtgtaaagtgtaataaaggactcgtcaaggcccccgtctggtggcccatgaaggacaaccccgggactacgacagctagtaccgcaaaaaacgcgccttag

SEQ ID NO: 117423 - DNA, 891 bp, synthetic construct
  misc_feature 1..891: note = Description of Artificial Sequence: Synthetic coding sequence
  source 1..891: mol_type = other DNA
atggcgagccaccgccattccggcccttcgtcctacaaagtaggaacaatggcagagaagttcgattgtcactactgccgcgacccactccaggggaagaaatacgtccagaaagacggccaccactgctgtttgaaatgcttcgataaattctgtgccaatacctgcgttgagtgtcggaagcccattggcgccgattcaaaagaagtccactacaagaacaggttctggcacgacacatgctttcggtgtgctaagtgcctgcaccccttggcaaatgaaacattcgtagcaaaggacaacaagatcctgtgtaacaaatgcaccactcgggaggactctccgaaatgtaagggatgttttaaagccattgtggctggcgatcaaaacgtcgaatataagggcactgtctggcataaagattgtttcacttgctcgaactgtaagcaagtgattggaacagggtccttttttcccaagggcgaggacttttactgcgtgacatgtcatgagaccaaattcgcgaaacattgcgtgaagtgtaacaaggcgattactagcggtggcatcacctaccaggaccagccgtggcacgcagattgctttgtctgcgtgacctgtagcaagaagctggccggccagagatttaccgccgtggaggaccagtactactgcgtggattgttacaagaacttcgtcgccaagaagtgcgccgggtgtaaaaatcctattaccggctttggaaagggtagcagcgtggtggcctacgagggacagtcatggcacgattattgttttcactgtaaaaagtgtagtgtgaatctggccaacaagagattcgttttccatcaggagcaggtgtattgcccagactgcgcgaagaaactctag

SEQ ID NO: 117424 - DNA, 843 bp, synthetic construct
  misc_feature 1..843: note = Description of Artificial Sequence: Synthetic coding sequence
  source 1..843: mol_type = other DNA
atggctgaaaagttcgactgccattactgccgcgaccctctgcagggaaaaaaatacgtgcaaaaggacgggcatcattgctgtcttaaatgcttcgacaagttttgtgccaacacatgtgtcgagtgccggaagcccattggtgctgacagcaaggaggtgcactacaagaatcgcttttggcacgacacttgctttcgatgcgcaaagtgcctgcacccactcgcaaacgagacgtttgtggctaaggacaacaagatcctgtgcaataaatgtaccactcgtgaggactctcctaaatgtaaagggtgctttaaggccatcgtggcaggcgatcaaaatgtggagtacaagggaacagtgtggcataaagattgttttacctgctccaattgtaagcaggtgatcggtaccggcagtttttttcctaagggcgaggatttctactgtgtgacgtgtcatgaaacgaagttcgcgaagcactgtgtcaaatgcaacaaagctatcacttctggcggcattacctaccaggaccagccctggcacgccgattgtttcgtgtgtgtgacctgcagtaagaagctcgccggtcagagatttactgccgtggaggaccagtattactgtgtcgactgctacaaaaattttgtagcaaagaagtgcgcaggctgcaaaaaccctattacaggatttggaaagggaagcagcgtcgtggcatatgaggggcagagctggcatgactactgcttccattgcaaaaagtgcagcgtgaaccttgccaataagagattcgtgttccaccaggaacaagtgtactgccctgattgcgctaagaagttatag

SEQ ID NO: 117425 - DNA, 843 bp, synthetic construct
  misc_feature 1..843: note = Description of Artificial Sequence: Synthetic coding sequence
  source 1..843: mol_type = other DNA
atggccgagaagtttgattgccattattgcagggaccccctgcagggaaagaagtacgtgcagaaggacgggcaccattgctgcctgaaatgtttcgacaaattctgcgccaatacatgtgtggagtgtagaaagcctatcggggcagacagcaaggaggtccattacaaaaaccgattctggcatgacacctgcttcaggtgcgccaagtgcctgcatcccttagccaatgaaacgttcgtagctaaggacaacaagatcctgtgtaataaatgcaccactcgggaggactcccctaaatgcaaaggctgtttcaaggcaattgtagccggcgaccagaatgtagagtacaaaggcaccgtgtggcacaaggactgcttcacctgctccaattgtaagcaggtgatcgggacagggtcctttttccccaagggcgaggacttctactgtgtgacttgccacgaaacaaagtttgcaaaacattgcgtgaagtgtaacaaggccattacaagcggcggtattacataccaagatcagccttggcatgccgactgctttgtatgtgtgacttgcagtaagaaactcgccggacagaggttcaccgccgttgaagaccaatattactgtgtagattgctataaaaacttcgtagcaaaaaaatgtgcaggatgcaagaatcctatcactggctttggtaagggctctagtgtagtggcatacgaaggccagagttggcatgattattgcttccactgtaagaagtgctcagtgaatctcgcaaacaagcgctttgtgtttcatcaggagcaggtgtactgtcctgattgcgcgaagaagttgtag

SEQ ID NO: 117426 - DNA, 972 bp, synthetic construct
  misc_feature 1..972: note = Description of Artificial Sequence: Synthetic coding sequence
  source 1..972: mol_type = other DNA
atggcagaaaagttcgattgtcattattgcagggaccccctccagggcaaaaagtacgtgcagaaggacggccaccactgctgtctgaagtgcttcgacaaattttgtgccaatacatgcgtggaatgccgaaaaccaatcggggccgatagcaaggaggtccactacaagaataggttctggcacgacacctgtttccgctgcgcaaaatgtctacacccccttgccaacgagactttcgtggcaaaagacaacaagatcttgtgtaacaagtgcacaacacgcgaggacagccccaagtgcaagggatgcttcaaggctatcgtggcaggcgatcagaacgttgaatataagggaacagtgtggcataaggactgcttcacctgtagcaattgtaaacaggtaataggaactggtagttttttccccaaaggtgaggatttttattgtgttacatgccatgaaacgaagtttgccaaacactgtgttaaatgtaacaaagcaatcacatcagggggaatcacctaccaagatcagccatggcacgcagactgttttgtatgcgtgacctgtagcaaaaaactggccggtcaacggttcaccgcagtggaggaccagtactactgtgtagattgctacaagaacttcgtggctaagaagtgtgctggatgtaaaaacccgatcaccggaaaacgaacagtgtccagggtgtcccacccagtttcaaaagccaggaagcctccagtatgtcatggcaaaagactgccgctcacgctgttcccttcagccaatctgcgtggaaggcatcccgggggggaaagaacatgcccctcgtgggtcgtagttctgtaccgcaagaataggtctttggcagctccacggggccctgggctcgtgaaagcaccagtgtggtggcctatgaaagacaatcctgggacaactacagcctctaccgccaaaaatgccccctag

SEQ ID NO: 117427 - DNA, 615 bp, synthetic construct
  misc_feature 1..615: note = Description of Artificial Sequence: Synthetic coding sequence
  source 1..615: mol_type = other DNA
atggctgagaaatttgactgccattactgcagagatccccttcagggcaagaagtacgtgcaaaaggacgggcaccattgttgcctgaagtgcttcgataagttctgcgccaacacatgcgtggaatgccggaagccaatcggcgccgatagtaaggaagtccactacaagaatagattctggcacgatacctgctttcggtgcgctaagtgcctgcacccactggccaatgagacctttgtggccaaagacaataagattctgtgcaacaaatgtaccacgagagaggattcgcccaagtgtaagggctgtttcaaagctatagtagcgggggaccagaatgtagaatataagggcacggtctggcacaaggactgtttcacttgctccaactgcaagcaggtcatcggcaccggctctttttttccaaaaggggaggatttctattgtgtgacttgccacgagaccaaattcgcaaagcactgtgttaagtgcaataaggccatcaccagcggcggcataacgtatcaggaccagccgtggcatgctgactgcttcgtctgcgtcacttgcagtaaaaagttagcgggccagcgatttacagccgtagaatag

SEQ ID NO: 117428 - DNA, 624 bp, synthetic construct
  misc_feature 1..624: note = Description of Artificial Sequence: Synthetic coding sequence
  source 1..624: mol_type = other DNA
atggccgagaagtttgattgccactactgtcgggatcctctgcaagggaagaaatacgtgcaaaaggacgggcatcactgctgcctgaaatgtttcgacaagttttgcgccaatacttgcgtcgaatgccggaaacctattggagctgatagtaaggaggtgcactacaagaaccggttttggcacgacacctgctttaggtgcgccaagtgtctgcaccctcttgctaacgaaacctttgtggcaaaagataacaaaattctgtgtaacaaatgtactacccgggaagactcaccaaaatgtaagggatgctttaaggctatagtggcaggggatcaaaatgtcgaatacaagggaacggtctggcataaggattgcttcacatgtagtaattgtaagcaggtaattggtacgggttcattcttccctaagggagaggacttttactgtgtgacctgtcatgaaactaagttcgctaagcattgtgtaaagtgtaacaaggcgattaccagcgggggtatcacctatcaggatcaaccatggcacgctgactgtttcgtctgcgtgacctgctctaagaaactcgccggtcagcggtttacagccgttgaggatcaatactag

SEQ ID NO: 117429 - DNA, 426 bp, synthetic construct
  misc_feature 1..426: note = Description of Artificial Sequence: Synthetic coding sequence
  source 1..426: mol_type = other DNA
atggcagaaaagtttgactgtcattactgtagagaccccctccagggtaaaaagtacgtgcaaaaagacggacaccactgttgtctgaaatgttttgataaattttgcgcaaatacttgcgtggagtgccgcaagcctatcggagctgactctaaagaggtgcattacaagaacagattttggcacgacacatgtttccgttgcgccaagtgcctgcaccctcttgccaatgagacgttcgtggccaaggacaataaaatattgtgtaataagtgtactacccgtgaggactcccccaaatgcaaggggtgcttcaaggccatcgtagccggtgaccaaaacgtcgagtacaagggaacggtttggcacaaggactgtttcacatgctcaaactgtaaacaggtgataggaaccggatccttctag

SEQ ID NO: 117430 - DNA, 624 bp, synthetic construct
  misc_feature 1..624: note = Description of Artificial Sequence: Synthetic coding sequence
  source 1..624: mol_type = other DNA
atggctgagaagtttgattgtcattactgtcgtgatcccctacaggggaaaaaatatgtacaaaaagacggacaccactgttgcctcaagtgcttcgataagttttgcgccaacacctgtgtcgaatgccgcaagccaattggggctgactctaaagaggtccattacaaaaatcgcttctggcacgacacctgcttcaggtgtgcaaagtgcttgcatccccttgccaatgagactttcgtggccaaagataacaagatcctttgcaataagtgcacaacaagagaagattcccctaagtgtaaaggatgtttcaaggctatcgtggcgggagatcagaacgtggagtacaaaggaacggtctggcataaggactgtttcacctgttcaaactgtaagcaggtaattggtacaggctcttttttccccaaaggagaggacttctactgtgttacgtgccatgaaaccaaatttgcaaaacattgcgtaaagtgtaataaagccatcacttcaggcggcatcacctatcaggatcagccctggcacgctgattgttttgtatgcgtgacctgcagtaagaaactggctggtcaacggtttacagccgtcgaagatcagtactag

SEQ ID NO: 117431 - DNA, 963 bp, synthetic construct
  misc_feature 1..963: note = Description of Artificial Sequence: Synthetic coding sequence
  source 1..963: mol_type = other DNA
atgagccattttatactccggcaccttggctcgtgcttccagccctaccctgcctttgctgagtatattctgagcgcaacccaccccgcgtccggcccatcttcctacaaagtgggaactatggccgagaagtttgattgtcattattgcagagatcccctgcagggcaaaaaatacgtgcagaaagacggccatcattgttgcctgaaatgctttgataagttctgtgccaacacgtgcgtggagtgtagaaaaccgatcggcgctgatagcaaggaagtgcactataaaaaccgcttttggcatgacacctgttttcggtgcgcaaagtgcctgcatccgttggctaacgaaacgttcgtggccaaagataacaagattctgtgcaataaatgtacaacacgggaagacagcccgaaatgcaaaggatgcttcaaagccatagtcgccggagaccagaatgtcgaatacaaagggactgtatggcacaaggattgttttacatgcagcaattgcaagcaagtaatcggcaccggctccttctttccaaagggcgaggatttttactgtgtcacctgccacgaaaccaagtttgctaagcattgcgtcaagtgtaataaggccataacatccggaggtatcacctaccaggatcagccgtggcacgctgactgtttcgtgtgcgtgacctgttctaaaaagctcgccggacagcgtttcaccgctgttgaagaccaatattactgcgtagattgttacaagaactttgtagcaaagaagtgtgccggctgtaaaaaccccattaccgggtttgggaaaggatcatcagttgttgcctacgagggtcagtcttggcacgattactgcttccactgcaaaaagtgttctgtcaatctggccaacaagcgcttcgtgtttcatcaggagcaagtgtattgccccgattgcgccaaaaagctgtag

SEQ ID NO: 117432 - DNA, 618 bp, synthetic construct
  misc_feature 1..618: note = Description of Artificial Sequence: Synthetic coding sequence
  source 1..618: mol_type = other DNA
atggcagaaaaattcgactgtcactactgccgggatccactacaaggcaaaaaatatgtgcagaaggacggtcatcattgttgtctgaagtgcttcgataagttctgtgccaatacttgtgtggaatgtcggaaacctataggagccgacagcaaggaggtgcattacaagaaccgcttttggcacgacacctgtttcaggtgtgccaagtgtctgcacccactcgctaatgaaaccttcgttgccaaggataataagatcctgtgtaacaagtgcaccactagggaagattctccaaaatgtaaaggctgcttcaaggcgatagtggctggagatcagaatgtcgagtacaaaggtactgtctggcacaaggattgctttacctgtagcaactgcaagcaggtgattggaacaggttcattttttccaaagggggaggacttctactgtgtgacctgccatgagacaaagttcgccaagcattgcgttaagtgcaataaggcgatcacctccgggggaatcacttatcaggaccaaccctggcatgccgactgtttcgtatgcgtgacctgcagcaaaaagctggctggacagagattcacagccgtggaggactag

SEQ ID NO: 117433 - DNA, 468 bp, synthetic construct
  misc_feature 1..468: note = Description of Artificial Sequence: Synthetic coding sequence
  source 1..468: mol_type = other DNA
atggctgaaaaatttgactgtcactattgcagagatcctctgcaggggaaaaagtacgtgcagaaggacggccatcattgttgcctgaaatgttttgacaagttttgcgccaatacctgtgtggaatgcagaaagcccataggagcagactcgaaggaggtgcattataagaacaggttttggcatgatacatgtttccggtgcgctaagtgcctccaccccctcgcaaatgagaccttcgtcgccaaggataacaagattttgtgtaataagtgtacaacccgggaggattcccccaagtgcaagggatgttttaaggccatcgttgctggcgatcaaaacgttgaatataaaggaaccgtctggcataaagactgttttacgtgtagcaactgtaaacaggtcatcggaacaggctcctttttccctaagggcgaagatttttattgcgtaacttgtcatgagtag

SEQ ID NO: 117434 - DNA, 843 bp, synthetic construct
  misc_feature 1..843: note = Description of Artificial Sequence: Synthetic coding sequence
  source 1..843: mol_type = other DNA
atggccgagaaatttgattgccactattgccgcgacccacttcaggggaaaaaatatgtgcagaaagacgggcaccactgctgcttgaagtgcttcgataaattttgtgccaatacttgcgttgagtgccgcaagcccattggagcagattcaaaagaagtgcactacaaaaatagattttggcatgacacatgttttcgctgcgccaagtgtctacaccctctcgccaacgagacctttgtggccaaagacaacaagattttgtgcaataaatgtactacacgagaagacagccccaaatgtaaaggatgctttaaagctattgtggcaggggatcagaatgtggagtacaaaggcacagtgtggcacaaggactgttttacctgtagcaactgcaagcaggtgatcggtaccgggtcattctttccgaagggagaggacttctattgtgttacatgccatgaaaccaagttcgctaagcattgcgttaagtgtaacaaggcgatcacctccggggggataacctaccaggaccagccctggcatgcagactgtttcgtctgtgtgacatgctctaaaaagctggccggacagcggttcacagctgttgaagaccaatattactgtgttgactgctataaaaattttgttgccaaaaaatgcgccggctgcaagaaccccataacgggcttcggtaaaggaagctcagtggtagcgtacgagggtcagagctggcacgactattgctttcactgtaagaagtgttctgttaacctggccaacaagcgttttgtattccatcaggaacaagtctactgccctgactgcgctaaaaaactatag

SEQ ID NO: 117435 - DNA, 783 bp, synthetic construct
  misc_feature 1..783: note = Description of Artificial Sequence: Synthetic coding sequence
  source 1..783: mol_type = other DNA
atggccgagaagtttgattgctgcctcaaatgtttcgacaaattttgtgcgaatacttgcgtcgagtgccgaaaaccaatcggagctgatagtaaagaggttcattacaagaaccggttctggcatgatacatgttttcgctgcgcgaaatgtcttcaccctttagcaaacgaaactttcgtggcgaaggataacaagattctctgtaacaagtgtactaccagggaagactcaccaaaatgtaaaggctgcttcaaggcaattgtagccggagaccagaacgtggagtataagggcacagtgtggcacaaagattgtttcacgtgcagcaactgcaagcaagttatcggaacaggcagtttttttcccaagggagaggacttttactgcgtgacatgtcatgaaacgaagtttgctaaacattgcgtcaagtgcaacaaagcgatcaccagtgggggaataacttatcaggaccagccatggcatgcggactgtttcgtttgtgtcacatgtagtaagaagttagccggccagcggtttacagccgtcgaagaccagtattattgcgtcgattgctataagaactttgtcgctaagaaatgcgcaggctgtaaaaaccctataaccggcttcggaaaagggtcaagcgtcgtcgcttatgagggtcagagctggcatgactattgcttccactgcaaaaaatgttccgtcaatctggcaaacaagcggttcgtgtttcatcaagaacaagtgtattgcccagattgcgccaagaaactgtag

SEQ ID NO: 117436 - DNA, 930 bp, synthetic construct
  misc_feature 1..930: note = Description of Artificial Sequence: Synthetic coding sequence
  source 1..930: mol_type = other DNA
atgacattttacgtcgccagcctggcgcttgagctcatctggatgttaagctcccccgcagggccatcaagctacaaagtcggcacgatggcagaaaagttcgattgccattattgtagagacccactccaggggaagaaatatgttcagaaggatggccatcactgctgcctgaagtgtttcgataaattttgcgccaacacctgcgttgagtgtagaaaacctattggcgcagattctaaggaggtgcactacaaaaacaggttctggcacgatacttgcttcagatgtgcgaagtgtctccaccccctggccaacgaaaccttcgttgccaaagataataagatcttgtgtaacaagtgcaccacacgtgaagacagcccaaaatgcaaaggctgctttaaggctatcgtagccggggatcaaaatgttgaatataaagggacagtttggcacaaagactgcttcacctgctctaattgtaaacaggtgattgggaccggcagtttcttccccaagggtgaggacttttattgcgtgacttgccacgagacaaaatttgcgaagcattgcgttaagtgcaataaagctataacctccggcggtattacataccaggatcagccctggcatgcagactgttttgtatgcgtaacttgctcaaaaaaactggctggacagagattcacagcagtcgaagaccagtactattgcgttgactgttacaagaattttgtcgcaaagaagtgtgccggttgcaagaaccccatcacaggattcggtaagggcagcagtgtggtcgcctacgagggacagagctggcatgactactgttttcactgcaagaaatgtagcgtcaatctggcgaataaaagatttgtgtttcatcaagaacaagtgtattgtcccgattgcgccaagaagctgtag

SEQ ID NO: 117437 - DNA, 828 bp, synthetic construct
  misc_feature 1..828: note = Description of Artificial Sequence: Synthetic coding sequence
  source 1..828: mol_type = other DNA
atggcctctcatagacatagcggtccatcttcgtataaggtgggtacaatggctgaaaagttcgactgtcactactgtcgggatccgttgcaaggcaaaaagtacgtgcagaaagatggccatcattgctgtctcaaatgctttgacaagttctgcgcgaacacgtgtgtggaatgccgcaaaccgatcggtgccgactctaaggaggtgcattacaagaatcggttctggcacgacacatgctttaggtgcgctaagtgcacaacgagggaggatagcccaaagtgtaagggatgcttcaaggccatcgtcgccggggaccagaacgttgaatacaagggcacagtgtggcacaaagactgtttcacctgctccaactgcaaacaagtcatcggcacaggttccttcttccctaaaggagaagacttctattgcgtgacttgtcacgagactaaattcgccaagcattgcgttaagtgtaataaagctattacttccggaggcattacctatcaggaccagccttggcacgccgactgttttgtgtgcgtgacatgctcaaagaaattggccgggcagcgattcaccgccgtagaggatcaatactattgcgtggattgttacaagaattttgtggccaaaaaatgtgctggctgcaaaaacccgatcactgggtttggcaaaggatcatctgtggtggcttatgaaggccagtcttggcacgactactgtttccactgcaagaagtgttcggttaatctggccaacaaacgctttgttttccatcaagaacaagtctattgcccagattgtgctaagaagttgtag

SEQ ID NO: 117438 - DNA, 843 bp, synthetic construct
  misc_feature 1..843: note = Description of Artificial Sequence: Synthetic coding sequence
  source 1..843: mol_type = other DNA
atggccgaaaagtttgattgccattactgtcgggacccactacaaggcaaaaaatatgtgcaaaaggacggccaccattgctgcttgaagtgtttcgacaagttttgcgcaaatacctgtgttgaatgtcgaaaacccatcggggcggactccaaggaagtacattacaaaaaccgcttctggcatgacacttgttttcgctgtgccaaatgcctccaccccctcgctaacgagacgttcgtggccaaagataacaaaatcctgtgtaacaagtgtactactcgagaagactcgcccaagtgcaaaggctgctttaaagctatcgtggccggtgatcaaaacgtcgagtataaaggtacggtgtggcacaaggactgcttcacctgtagtaattgtaagcaggtgattggcactggcagcttcttccccaagggagaggacttctactgtgtgacatgccacgagaccaaattcgctaaacactgtgtcaaatgcaacaaagccatcaccagtggcggaattacttaccaagaccagccatggcacgcagattgtttcgtgtgtgtgacctgtagtaagaaattagcagggcagaggtttacggccgttgaagaccagtattactgcgtggattgctacaagaattttgtggctaaaaagtgtgccgggtgtaaaaatcctataacagggttcgggaagggatcgtccgtggttgcatacgaaggccagtcctggcacgattactgctttcactgcaaaaaatgcagcgtaaacttagccaacaaacgtttcgtgttccaccaggagcaggtgtattgccctgactgtgcgaagaaattgtag

SEQ ID NO: 117439 - DNA, 840 bp, synthetic construct
  misc_feature 1..840: note = Description of Artificial Sequence: Synthetic coding sequence
  source 1..840: mol_type = other DNA
atgacagagcggtttgactgtcatcattgcaatgagtccctcttcggaaagaaatacatcctcagggaagaaagtccctattgcgttgtttgtttcgaaaccctgttcgccaatacctgcgaggagtgtggaaagcccatcggttgtgactgcaaagatctgagctacaaagaccgtcactggcatgaggcgtgcttccattgctctcagtgtcgcaacagcttggtggataaaccattcgctgccaaggaggatcagctcctgtgtaccgattgctacagtaacgagtatagctctaaatgccaggagtgtaaaaagacaataatgcccgggactcgaaagatggagtataagggctcgagctggcacgagacctgctttatctgccaccgatgccaacagcccataggtaccaagtcattcatccctaaggacaaccaaaatttctgcgtgccgtgttatgaaaagcaacacgctatgcagtgcgtccagtgtaagaagccaattaccaccggtggagtgacttacagagaacagccctggcacaaagaatgtttcgtgtgtacggcttgccgtaagcagttgtccggccagcgctttaccgctcgagacgatttcgcctattgcctcaattgtttttgtgacctgtacgcaaagaagtgtgcgggctgcaccaatccaatctccggtctgggtggaacaaagtacatttccttcgaagaacgtcagtggcacaatgattgcttcaattgcaagaaatgctccctgagcttggtgggcagggggttcctgaccgaacgcgatgacattctgtgccccgactgtgggaaagacatctag

SEQ ID NO: 117440 - DNA, 456 bp, synthetic construct
  misc_feature 1..456: note = Description of Artificial Sequence: Synthetic coding sequence
  source 1..456: mol_type = other DNA
atgacagagagattcgattgtcaccattgcaacgagagcttgttcggaaagaagtacatacttcgtgaggaatctccatactgcgtcgtttgttttgagactcttttcgccaatacctgcgaagagtgcgggaagccgataggatgtgattgtaaggtgcccgcaagatggagtactcgcgctgcagccggaatgcggccagcatctagcgctaccgctgccagttcacagttagagcccagagtctccagccccaaaactatccgaatcagtgtgtgtccagccatgagaaataacatgccttgttccgcatttagcgctaagtccccttcacctcgagagggatccctcaccggcagtagccccggtacccgctcagcgtcatgtgctccccctgccggttcttcgtgcctagggtctgcctcgcagctggcaatgacactgccaacagcctag

SEQ ID NO: 117441 - DNA, 1170 bp, synthetic construct
  misc_feature 1..1170: note = Description of Artificial Sequence: Synthetic coding sequence
  source 1..1170: mol_type = other DNA
atgactcgaagaggcttctcgagggccggagcagcccagcgtagcacacggccagctgcagaaccccaaccacctgccgcacgcgcactgcagccaaggcccggcgtgcccggtcccctcagatgcagagagtatctacagccacccgccccacggagggaggctgaaggactatctcaccaaggatctgaagtcggcgccgagagcggagcaaggcccaaggagcggggcgcagagcccgagctggggaggctttggctacgcactgttagctcctggagactaggttggcactttgacttcggagtagccgagaagcccggagtaaagatgacagagcgctttgattgtcatcactgtaacgaaagcctcttcggtaaaaaatacatcctcagggaagaatcaccatactgcgtcgtctgttttgaaacacttttcgctaatacctgcgaagagtgtggaaagccaattggctgtgactgtaaagacttaagctacaaggaccgccattggcacgaggcgtgcttccattgttctcagtgcaggaatagtctggttgataaaccgttcgcagccaaagaggatcagcttttgtgcactgactgctactctaatgaatacagttcaaaatgccaggagtgcaagaagacaatcatgcccggaacaaggaaaatggaatacaagggatcttcctggcacgaaacctgcttcatctgccaccggtgtcagcaacccatcggtacaaaatccttcattcccaaggacaaccagaacttctgcgtgccatgctacgagaagcaacacgcaatgcagtgtgttcaatgtaagaagccgatcaccacagggggcgtcacttacagagaacagccatggcacaaggaatgcttcgtgtgtaccgcttgcaggaagcagctgagcggacaaaggttcaccgccagagatgatttcgcttactgtctcaactgtttttgcgacctgtacgctaaaaaatgcgccggatgtaccaaccctatctctgggttgggtgggaccaaatatattagttttgaggaacgtcagtggcacaacgactgctttaattgcaagaagtgcagtctgagtctggtgggacggggatttctgacagaacgtgatgacattctttgtcctgattgcggaaaggatatatag

SEQ ID NO: 117442 - DNA, 840 bp, synthetic construct
  misc_feature 1..840: note = Description of Artificial Sequence: Synthetic coding sequence
  source 1..840: mol_type = other DNA
atgacagagagatttgattgccaccactgtaatgagtcactgttcggtaaaaagtacatactgcgggaggagagtccatactgcgtggtctgttttgagacgcttttcgctaatacgtgtgaagaatgcggtaagccgatcggctgcgactgtaaagaccttagctacaaggaccgtcactggcacgaggcatgtttccactgctcacagtgtagaaacagtttggtggataaaccattcgcagcgaaggaggatcagttgctgtgtactgactgctacagcaacgagtacagctctaagtgtcaagaatgcaagaagactattatgccgggcacaaggaaaatggaatacaagggttcttcatggcatgagacatgtttcatatgtcacagatgtcagcagcccattggaaccaaaagtttcatcccaaaggataatcaaaatttctgcgtgccttgttacgagaaacagcacgcaatgcagtgcgtgcaatgtaagaagcctattacgacagggggcgttacatatcgagagcagccctggcataaggagtgctttgtctgtaccgcgtgcagaaagcaattgagcggccagaggttcactgcccgggatgacttcgcttactgtctaaattgtttctgtgacctctacgccaagaagtgtgccggatgcaccaaccccatatccggtctagggggcacgaaatacatctcattcgaggagcggcaatggcacaacgattgcttcaactgtaaaaaatgttcgctgagtttggtggggaggggtttcctgactgagagggatgatatcttgtgtccagactgtggaaaagatatctag

SEQ ID NO: 117443 - DNA, 840 bp, synthetic construct
  misc_feature 1..840: note = Description of Artificial Sequence: Synthetic coding sequence
  source 1..840: mol_type = other DNA
atgactgaacggttcgactgccatcactgtaacgagtctctgtttggaaaaaaatacatactgagagaggagagtccctattgcgtggtatgcttcgagaccctattcgccaatacttgcgaagagtgcggaaaacctatcggatgtgactgtaaggatcttagctacaaggatagacactggcacgaggcctgcttccactgttcccaatgccggaattctctggtagataaacccttcgccgctaaagaggatcagctcctttgcacggactgttactcaaatgaatatagctctaaatgtcaggaatgtaagaagacgatcatgcccgggactcggaagatggagtataaggggtcatcttggcatgagacatgctttatctgtcatcgatgtcagcaacccatcggcaccaagtcatttatccccaaggacaatcagaatttttgcgtgccatgttatgaaaaacaacacgccatgcagtgcgttcaatgtaagaaacctattacgacaggcggggtgacctacagagagcagccctggcataaagaatgcttcgtgtgcactgcatgtaggaagcaattatcagggcaaaggttcacggcacgcgacgacttcgcctattgcctcaactgtttctgcgacttgtacgcgaaaaagtgtgccggatgcactaatccgatttctgggctgggggggacaaaatatatcagcttcgaggaacgacaatggcataacgattgctttaactgcaagaagtgctcactgagcctggtaggccggggattcctgactgagcgcgatgacatcctatgccccgactgtgggaaggatatctag

SEQ ID NO: 117444 - DNA, 840 bp, synthetic construct
  misc_feature 1..840: note = Description of Artificial Sequence: Synthetic coding sequence
  source 1..840: mol_type = other DNA
atgactgaaagatttgactgccaccactgtaacgaatccttattcggtaagaaatatattttacgcgaagagtcaccatattgtgtggtctgcttcgaaacactgttcgccaacacttgcgaggaatgtgggaaacctattggctgcgattgtaaagacctctcctataaggacagacactggcacgaggcttgcttccactgttcccaatgcagaaattccctggttgataagccatttgcagccaaagaggatcagctgctgtgtaccgactgttattccaatgaatactcctcaaaatgtcaagaatgtaagaagactatcatgcccggtaccaggaagatggaatacaaaggttcctcgtggcacgagacctgcttcatctgtcatcgatgccaacaacccataggaactaaaagctttatcccaaaagataatcagaacttttgcgtaccttgctatgaaaagcaacatgcaatgcagtgcgtgcaatgcaaaaaacctattaccaccggtggcgtcacataccgagagcagccatggcacaaggaatgcttcgtctgtactgcttgtaggaagcaactctcaggacagaggttcaccgcccgagacgacttcgcctattgcctcaattgtttttgcgatctttatgcaaaaaagtgtgccggctgcactaacccaatttccggcctgggcggaactaagtacatctcatttgaggagaggcagtggcacaacgattgcttcaattgcaaaaagtgtagcctaagtctggtgggacgcggctttcttacagagcgggatgacatcctttgccctgactgtgggaaagacatatag

SEQ ID NO: 117445 - DNA, 840 bp, synthetic construct
  misc_feature 1..840: note = Description of Artificial Sequence: Synthetic coding sequence
  source 1..840: mol_type = other DNA
atgactgagcggtttgattgccaccactgcaacgaatcactgttcggaaaaaagtatatcttacgcgaggagtccccttactgcgtcgtgtgttttgaaaccttatttgcgaatacatgcgaggagtgtggtaagcccattggttgtgactgcaaagatcttagttataaggaccgccactggcacgaagcgtgcttccattgctcacaatgtcggaattcactggtggacaagcccttcgcagccaaagaggatcagctactctgcaccgactgctattctaacgaatatagttcaaagtgccaggagtgtaagaaaaccatcatgcctgggaccaggaagatggaatacaaaggctcttcctggcatgagacatgttttatttgtcacaggtgtcagcagccaattggcaccaagtcatttataccaaaagataaccagaatttctgcgtgccgtgctatgaaaaacagcacgcgatgcagtgtgttcagtgcaagaaacctattacaactgggggagtcacatatcgagagcagccttggcataaggagtgcttcgtgtgtaccgcctgcaggaaacagctgtccgggcagcgatttactgcgcgggacgactttgcctattgcctgaattgcttctgtgacctctacgccaagaagtgtgcaggatgcaccaaccctatctccggcctggggggcaccaaatatatcagtttcgaggagagacagtggcacaacgactgtttcaactgcaagaaatgctccctttcactcgtaggccgtgggtttttgaccgagcgggacgatattctgtgcccagactgcggtaaggatatctag

SEQ ID NO: 117446 - DNA, 840 bp, synthetic construct
  misc_feature 1..840: note = Description of Artificial Sequence: Synthetic coding sequence
  source 1..840: mol_type = other DNA
atgaccgagcggtttgactgccatcactgcaatgagtctctattcggtaaaaagtacatcctgagggaagaatcgccctactgcgtggtgtgttttgagacccttttcgcgaatacctgcgaagagtgtgggaaacctatcggctgcgattgcaaggacctctcatacaaggaccgacactggcatgaggcctgctttcattgtagtcagtgtaggaattctctggtggataaaccgttcgccgcaaaagaagaccagctgttgtgtacagattgctattctaatgagtatagttctaaatgtcaggagtgcaaaaagacaattatgcctggcacccgaaagatggaatacaaaggaagctcctggcacgagacgtgcttcatttgccaccgctgtcagcagccaattggcactaagtctttcatccccaaagataaccaaaatttctgtgtcccatgttacgagaaacaacacgccatgcaatgcgtccagtgtaagaagcctatcacaaccggcggggtaacataccgagaacagccatggcacaaagaatgcttcgtgtgtacagcctgtagaaaacagctttctggccaacggttcacagctcgcgacgactttgcctactgtctcaattgcttttgcgacttatatgcgaaaaaatgcgccggctgcaccaatcctatcagcggactagggggcactaagtacatctcatttgaagaaagacagtggcataacgactgttttaactgcaagaaatgttccttaagcctggttgggcgcgggttcttgaccgaacgggatgacattctgtgtccagactgcggaaaggacatctag

SEQ ID NO: 117447 - DNA, 840 bp, synthetic construct
  misc_feature 1..840: note = Description of Artificial Sequence: Synthetic coding sequence
  source 1..840: mol_type = other DNA
atgactgagaggttcgactgccaccactgcaacgaatcactgtttggaaaaaaatatattcttcgagaagagagcccttactgcgtcgtgtgcttcgagacgttgtttgccaacacctgcgaggaatgtggcaagccaattggctgcgactgcaaagacctgagctacaaagacagacactggcatgaggcatgttttcattgttcccaatgcagaaattccctagtggataaaccctttgctgccaaagaggatcaattattatgtacggactgctatagcaacgagtactcatcgaagtgccaggagtgtaagaaaactatcatgcccggaactcgcaaaatggaatataagggttcctcatggcacgaaacatgttttatatgtcacaggtgccagcaaccgattggtacaaagtcgtttattcctaaggacaatcaaaatttctgtgtaccttgctatgaaaagcagcacgctatgcagtgcgttcagtgcaagaaacctatcacaaccgggggcgtgacctatagagagcagccgtggcacaaagaatgtttcgtgtgcacggcctgccggaagcagctgtctggccaaaggtttactgctagggacgactttgcatactgtctcaactgcttttgtgatctgtacgccaaaaagtgcgccggctgcacaaacccaatcagcggattgggtggtactaaatatatcagcttcgaagaacgccaatggcataacgactgctttaactgcaaaaaatgctcactgagtctggtcggccggggcttcctcaccgagcgggatgatatactctgccctgattgcggaaaggatatctag

SEQ ID NO: 117448 - DNA, 60 bp, synthetic construct
  misc_feature 1..60: note = Description of Artificial Sequence: Synthetic coding sequence
  source 1..60: mol_type = other DNA
atgaccgagaggtttgactgtcatcattgcaatgagtcattgttcggaaaaaagtattag

SEQ ID NO: 117449 - DNA, 435 bp, synthetic construct
  misc_feature 1..435: note = Description of Artificial Sequence: Synthetic coding sequence
  source 1..435: mol_type = other DNA
atgacccggaggggtttctcaagggcgggtgcagcccagcggtctacaaggcctgctgccgagcctcagcctccggccgccagagccctgcagccgcgacctggggtccccgggcctctgagatgtcgtgagtacttacagccacccgctccccgtcgcgaagctgaaggtttgtctcatcaggggagtgaagtcggcgccgaaagcggcgcgcgcccaaaagaacgcggagccgagcccgagctgggcagactctggttacggaccgttagctcttggcgcttgggttggcactttgacttcggaaccgagtcccggttcgtcgcccaagccggcgttcagtggcatgatctatccagcttacaggcactgccgttaggctctagacatagtcccgcccctgcctcgcaggtggccggaaccaccggatgctag

SEQ ID NO: 117450 - DNA, 843 bp, synthetic construct
  misc_feature 1..843: note = Description of Artificial Sequence: Synthetic coding sequence
  source 1..843: mol_type = other DNA
atgtcagaatcttttgattgcgcgaaatgcaacgaatcactttacggcagaaaatatatacaaaccgatagcggcccatactgtgtcccatgctatgataatacatttgcaaacacttgtgcggaatgtcagcagttgatcggccatgactctcgagaacttttttacgaagatcgccatttccacgaaggctgcttccggtgctgcaggtgccagcgttccctagcagatgagccttttacatgccaggactccgaactgttatgtaatgactgttactgtagtgctttttctagtcagtgctccgcctgcggagagacagtcatgcccggctccagaaagctcgaatacggagggcagacatggcatgagcactgtttcctgtgctccggctgtgaacagcctctgggatctcggtcattcgttccggacaagggggcccactactgtgtgccctgctacgagaataaatttgcacccaggtgtgcaagatgctctaagacccttacccaggggggcgtgacataccgcgatcagccctggcacagagagtgtctcgtgtgcaccggctgtcagaccccactggccggacagcagtttacgtccagagatgaggacccctactgcgttgcctgtttcggcgagctgtttgcgcctaagtgcagctcctgtaagcggcctattgtgggactcggaggcgggaagtatgtcagttttgaagatcgccattggcaccacaattgtttctcctgtgctagatgttcaacatcattagtggggcagggtttcgttccagacggcgatcaggttctgtgccagggatgcagtcaggcgggcccgtag

SEQ ID NO: 117451 - DNA, 855 bp, synthetic construct
  misc_feature 1..855: note = Description of Artificial Sequence: Synthetic coding sequence
  source 1..855: mol_type = other DNA
atgacaacagctcacttttactgccagtattgtaccgcaagcctcttgggtaagaaatacgtgctcaaggacgactccccatattgcgttacctgctacgatcgggtgttttcaaactactgcgaggaatgcaaaaagccgattgaatccgactccaaggacctatgctataaggaccggcactggcacgaggggtgctttaaatgcaccaagtgtaatcattcactcgtagaaaagccttttgctgccaaggatgaacgcctactatgcacagaatgttattccaacgaatgctcgtctaagtgtttccactgtaaacggaccatcatgccaggaagccgcaaaatggagttcaagggaaattattggcacgaaacctgttttgtgtgtgagaactgtagacagcctataggcaccaaaccgctgatcagtaaagaaagtggaaattattgcgtcccatgctttgagaaagagtttgcccactattgcaacttttgcaaaaaagttatcaccagtggcggcattacgttttgcgaccagttgtggcataaggaatgcttcctatgtagtggatgtcgcaaggacttgtgcgaggaacagttcatgagccgggacgactatccattctgcgttgactgttataatcatttatacgctaacaagtgcgtcgcctgctctaagcctatttccggactcacaggcgccaagttcatttgttttcaggactctcagtggcatagtgagtgttttaactgtggcaagtgcagcgttagcctggttggaaagggctttcttacccagaacaaagagatattttgtcaaaagtgtggaagcggcatggataccgatatatag

SEQ ID NO: 117452 - DNA, 633 bp, synthetic construct
  misc_feature 1..633: note = Description of Artificial Sequence: Synthetic coding sequence
  source 1..633: mol_type = other DNA
atgacgacggctcatttctactgccagtactgcactgcctccctcctggggaaaaagtacgtcctgaaagatgattccccgtattgcgttacctgctacgatcgggtgttttccaactactgcgaggaatgcaaaaagcctattgagagtgacagcaaggacctttgttataaagaccggcactggcacgagggttgcttcaagtgcaccaaatgcaaccactccctggtggagaagcctttcgccgcaaaggatgaacggctcctttgcacagagtgctattccaatgagtgcagtagcaagtgcttccactgcaagaggaccatcatgccaggcagtcgaaaaatggaatttaaaggcaattactggcacgagacttgctttgtatgcgagaactgcaggcagccaattgggaccaagcctctgatttctaaggagtcaggcaactactgtgttccttgttttgagaaggagtttgcgcactactgcaatttttgcaagaaggtgatcacctctgggggcattacattctgcgaccaactatggcataaggagtgcttcctgtgttccggctgtaggaaggatctgtgtgaggagcaatttatgagccgcgatgattaccccttctgctag

SEQ ID NO: 117453 - DNA, 855 bp, synthetic construct
  misc_feature 1..855: note = Description of Artificial Sequence: Synthetic coding sequence
  source 1..855: mol_type = other DNA
atgaccactgctcacttctactgccagtattgtaccgcctctctgcttgggaagaaatatgtgctcaaagacgatagcccatactgtgtgacctgctatgaccgcgtattttctaattattgcgaggagtgtaaaaagcccatcgaaagcgactcaaaggatctgtgttacaaggataggcactggcatgagggctgctttaagtgcaccaagtgtaaccattcccttgttgagaagccctttgctgccaaggacgaaagacttctttgtactgaatgttatagtaatgaatgctcttccaaatgctttcactgcaaaaggaccataatgccagggtctaggaaaatggagttcaagggaaactactggcatgaaacttgctttgtgtgcgagaactgccggcaaccaattggaacgaaacctctgatttctaaagagtcagggaactactgcgtgccctgttttgaaaaggagtttgcacactattgtaacttttgtaaaaaggtcatcacctccggaggcataacattctgcgatcagctatggcacaaggagtgcttcctttgcagcgggtgccggaaggacctctgtgaagaacaattcatgtcacgggacgattatccattctgtgttgactgctataatcacctgtacgcaaacaagtgtgtcgcctgttcaaagcctattagcggcctgaccggcgccaagtttatttgtttccaggatagccagtggcactcagagtgttttaactgcggtaagtgctccgtcagtctagtcggcaaaggattcttgacccaaaacaaagaaattttctgtcagaaatgcggaagcggaatggataccgacatctag

SEQ ID NO: 117454 - DNA, 1314 bp, synthetic construct
  misc_feature 1..1314: note = Description of Artificial Sequence: Synthetic coding sequence
  source 1..1314: mol_type = other DNA
atgggccgaagaatgcgcggtgccgctgcaaccgcgggcttatggcttctggcgctgggatcccttctggccctatggggtggtttgctgccacctcgaactgagctgccagcttccagacccccggaagatcggctccctaggcggccggctcgatcgggcggaccagcccctgcccctagatttccattaccaccacccctagcttgggatgcccgcggagggtctctcaaaacctttcgcgcgttgctgactctcgccgcgggcgccgatggaccccccaggcagtctagaagcgaaccccggtggcatgtgtccgcacggcagccccggcccgaggaaagtgccgctgtgcacgggggagtgttttggtctcgtggccttgaagagcaagttcccccaggatttagtgaagctcaggccgccgcctggttagaggcggcgagaggcgcgaggatggtggcattagaacgtgggggctgtggcaggagcagcaacaggttagcaaggttcgcggacggcaccagggcctgtgtgaggtatggaatcaacccagagcaaatacagggcgaagctctgtcctactacttagctcgcctcctcggtttgcagcgtcatgtgccaccactggcattggcgagggttgaggcccggggtgcccaatgggcgcaagttcaggaggagctgcgggccgcacattggacagagggatctgtcgtgtctctgacccggtggctgccaaacttaactgatgtcgtggtgcccgcaccttggcggtctgaggatggacgtctgagacccctacgggatgccggcggggagctggcgaatctctcgcaggccgagctggtagatttggtgcagtggactgacctcattctgttcgattatctgacagctaatttcgatcgactggtgtccaacttgttcagtctgcaatgggatcctagggtgatgcagcgtgctacatccaatctacatagaggacccggcggagcactggtgtttctagacaatgaggccggactcgttcacggatatcgtgtggcagggatgtgggataaatacaacgagcctctgcttcagagtgtgtgcgtgtttcgggagcgcaccgccaggcgcgttctggaattacatcgtggacaagacgccgcggctcggctgctgcgcctgtatcgccgccatgagccgagattccctgaactggccgctcttgccgacccacatgcacaactcctgcagaggagattagattttctggccaaacatatcctccattgtaaggcaaaatacgggcgcagaagtggtacttag

SEQ ID NO: 117455 - DNA, 312 bp, synthetic construct
  misc_feature 1..312: note = Description of Artificial Sequence: Synthetic coding sequence
  source 1..312: mol_type = other DNA
atggaacgtcagcaacaacagcagcagcagctgcggaacctgcgggactttctgctagtgtacaatagaatgaccgaattatgcttccagcggtgcgtgccaagccttcatcacagagccctagatgcagaggaagaggcttgcctgcactcatgcgcaggcaagctgatccactccaatcataggctaatggctgcatacgtacagctcatgcctgcattagtgcagcgacgcattgccgactacgaagcggcaagcgccgtgcctggtgtggcagcagaacagcctggcgtatcgccatctgggtcgtag

SEQ ID NO: 117456 - DNA, 312 bp, synthetic construct
  misc_feature 1..312: note = Description of Artificial Sequence: Synthetic coding sequence
  source 1..312: mol_type = other DNA
atggagcgacagcagcagcaacagcagcagttgaggaacctccgcgattttttgttggtgtataatcgtatgaccgagctctgcttccagaggtgtgtgccctctctgcaccaccgcgcattagatgctgaggaggaagcctgccttcattcatgcgcaggaaagttgatacattccaatcacagactgatggccgcttacgtgcaacttatgcccgcacttgtgcagaggcgaattgccgattatgaagccgcttctgctgtccctggagtggcggctgagcagcctggagtgtcaccttcaggcagttag

SEQ ID NO: 117457 - DNA, 312 bp, synthetic construct
  misc_feature 1..312: note = Description of Artificial Sequence: Synthetic coding sequence
  source 1..312: mol_type = other DNA
atggagcgtcagcaacagcagcaacagcagctgcggaatctgagggatttcctgcttgtttacaataggatgactgaactttgcttccaacgctgcgtgcctagtctgcaccaccgcgccctggatgcggaggaagaagcttgtctgcattcatgcgcagggaagctgatacacagcaaccatagacttatggcagcttatgtgcaactgatgcccgcactcgtacagcggagaattgcagattacgaagccgcctcagctgtgcccggagtagctgccgagcagcccggggtgagcccctctggcagctag

SEQ ID NO: 117458 - DNA, 948 bp, synthetic construct
  misc_feature 1..948: note = Description of Artificial Sequence: Synthetic coding sequence
  source 1..948: mol_type = other DNA
atgcacgggcacggagggtacgacagtgacttctcggatgatgagcgatgtggtgagtcctccaagcgaaaaaaacgcaccgtggaagacgatctgttgctgcagaaaccgtttcagaaagaaaagcacgggaaagttgcacataagcaggtcgccgcagaactccttgatcgtgaagaagcccgtaaccggcgattccatcttattgcaatggatgcatatcaacgacacacgaagttcgtgaacgattatattctttactacggcgggaaaaaagaggattttaagaggttgggcgagaatgataagactgacttggatgttattagggagaaccaccgtttcctgtggaacgaggaggatgaaatggatatgacttgggagaaacgtctagctaagaagtactacgacaagctcttcaaggagtattgcatagccgacctaagtaagtataaagaaaacaaatttgggtttcgttggcgagtggagaaggaagttatcagtgggaagggccagtttttctgtggcaacaagtactgcgataagaaggagggacttaaatcatgggaggtcaatttcggatatattgaacacggggagaagagaaatgccctggttaagctccggctgtgccaggagtgtagcattaagctcaacttccatcacagacggaaggaaatcaaatccaagaaacggaaagataagacgaagaaggattgcgaagagagctctcacaagaaatccagactaagcagcgcagaggaggctagcaagaaaaaggataaggggcactccagttccaagaaaagtgaggattcactgctccgcaacagcgacgaagaagaatccgcatccgagtcagagctttggaaagggcctctgcctgaaactgatgaaaagagccaggaggaggaattcgacgaatactttcaggacctcttcctgtag

SEQ ID NO: 117459 - DNA, 948 bp, synthetic construct
  misc_feature 1..948: note = Description of Artificial Sequence: Synthetic coding sequence
  source 1..948: mol_type = other DNA
atgcacggccatggaggctatgacagtgactttagcgatgatgagcgctgtggggaatcctccaaacggaagaagaggactgtggaggacgacctccttttgcaaaaaccgttccaaaaagagaaacatggaaaggtcgctcacaagcaagtggctgctgagctgctggatagggaggaggccagaaataggcgtttccatctgatagcaatggatgcttatcagcggcataccaaattcgtcaatgactacattctgtattatggaggtaaaaaggaggacttcaagagactcggcgaaaacgataagactgacctcgatgtgattagagagaaccatcggttcctatggaacgaagaagatgaaatggatatgacatgggagaaacggcttgctaagaagtattacgataaactgtttaaggaatactgcatcgcagatcttagtaaatataaggagaacaaattcgggttccgctggcgggtcgagaaggaagtgatctctggcaaaggccagttcttctgtggaaacaaatactgtgataaaaaggaggggcttaaatcttgggaggtcaacttcggttacatcgaacacggggagaaaagaaacgctctcgtgaagctcaggctgtgccaggagtgcagcataaaactcaattttcaccacagacgaaaagagattaagagcaagaaacgtaaagacaagaccaagaaagactgcgaggaatcctcacacaaaaagtcacgactttccagcgctgaggaggctagtaagaaaaaagacaagggtcactcgtcaagtaaaaaatccgaagactctctccttcgccggatgctggaagagctgcagatgttcacgtgggagaaaagcgaacgcatggggggcaagcgtctcatcattataatcggggaggaactgtcagcaaacgttacgacattcaagatgtag

SEQ ID NO: 117460 - DNA, 942 bp, synthetic construct
  misc_feature 1..942: note = Description of Artificial Sequence: Synthetic coding sequence
  source 1..942: mol_type = other DNA
atgcacggccatggaggttacgattctgacttcagtgatgatgaaagatgcggcgagtcttcaaagagaaagaaaagaacggtggaggacgacttgctccttcaaaagccatttcagaaagagaagcacggaaaggtcgcacacaagcaggtggcagcagagctgctggatcgggaggaagctaggaacagacggttccacctgattgcgatggatgcctatcagagacacaccaagtttgtgaacgactacattctgtactacggcggcaaaaaggaggactttaagagactgggggaaaatgacaagactgatttggacgttattcgcgagaatcacagattcttgtggaacgaggaggacgagatggatatgacttgggaaaaaaggctcgccaagaaatattacgacaagctctttaaagagtattgtatcgcggacctttctaagtacaaagagaacaaatttggtttccgctggagggttgagaaagaggttatcagcggaaagggccagttcttttgcgggaataagtattgtgataagaaagaaggactgaagagttgggaggttaacttcgggtacatagagcacggtgagaaaagaaacgcgcttgtgaagttgaggctctgtcaagagtgcagcatcaagctcaattttcaccatcggcgtaaggaaattaaaagcaaaaagaggaaggacaagacaaagaaggactgcgaggaatcaagtcacaagaaatcccgtctttcttccgccgaggaggctagcaaaaagaaagacaaaggccactcctcgtcaaaaaaatccgaggatagtctcttgaatggcgtgatgctcttccatcccggctggagtgccgtggctcgatcccaactaacagctgccccggcttctcaagtgcaaaccaataatcactattggcgcggcgtagtgtgctag

SEQ ID NO: 117461 - DNA, 879 bp, synthetic construct
  misc_feature 1..879: note = Description of Artificial Sequence: Synthetic coding sequence
  source 1..879: mol_type = other DNA
atgcatggccacggaggctatgacagcgacttttccgatgacgagcgatgtggtgagagcagtaaaaggaaaaaaagaactgtcgaagatgacttactcctacaaaaacccttccagaaggagaaacacggtaaggttgcccacaagcaggtggctgccgaattactggatcgggaggaggcccggaacaggagatttcacttgatcgcgatggacgcctatcagcggcacaccaagttcgtcaacgactacatactctattatggcggaaaaaaagaagatttcaaacgactgggtgaaaacgacaagacagacctagacgtgatccgggagaaccatagattcctctggaatgaggaggacgaaatggacatgacatgggaaaaaaggctggccaaaaagtactatgacaaactgtttaaagagtattgcatagccgacctttccaagtataaggaaaataagtttggtttcagatggcgggttgagaaggaagtgatctctggaaagggccagttcttctgcgggaataagtactgtgacaaaaaagaagggctgaagagttgggaagtgaactttggctacatcgaacacggcgaaaagagaaatgccctggtaaaactgaggttgtgtcaggaatgtagcataaagttaaattttcaccaccgcaggaaggaaatcaaaagcaagaaacgcaaggataagaccaagaaggattgtgaagagagctcccacaaaaagagcagactctcatctgccgaagaggctagcaagaaaaaagacaaggggcactcgtcgtctaagaagtctgaagatagcctgttaaagacttactttgtcggcttactttcagagtccaacgaaaaaacctacatgtag

SEQ ID NO: 117462 - DNA, 831 bp, synthetic construct
  misc_feature 1..831: note = Description of Artificial Sequence: Synthetic coding sequence
  source 1..831: mol_type = other DNA
atgcacggtcatggggggtatgactctgacttctctgatgacgaacggtgcggagaaagttctaagagaaagaaacgaacggtggaggacgacttgctgctgcaaaagcctttccaaaaggagaagcatgggaaagttgcccataagcaggttgccgctgagcttttggatcgggaggaggcccggaataggcggtttcatttgattgctatggacgcgtatcagcgccacacaaagttcgtgaacgactatattctgtactacggcggtaagaaggaggacttcaagcgcctgggcgagaacgataaaacggacctggatgtcatccgcgagaatcataggtttctttggaacgaagaagacgagatggacatgacatgggagaaaaggttagcaaaaaagtactatgataagcttttcaaagaatattgcattgcagacctgtccaagtataaagaaaacaagtttggatttagatggcgagtcgaaaaagaagtcatctctggcaaaggacaattcttttgcgggaataagtattgcgacaagaaagaaggtctaaaaagctgggaagtgaacttcggatacattgaacacggagaaaagaggaatgccctagtaaagctcaggctgtgtcaggaatgttccatcaagctcaacttccatcaccgacgaaaagagatcaaaagtaaaaaacggaaggacaagactaaaaaagattgtgaagagtcttcacataagaagtcaagactgagcagcgcagaggaagcctccaagaaaaaagataagggacatagcagcagcaaaaagtctgaggacagcctgttaaattag

SEQ ID NO: 117463 - DNA, 978 bp, synthetic construct
  misc_feature 1..978: note = Description of Artificial Sequence: Synthetic coding sequence
  source 1..978: mol_type = other DNA
atgggaattttccctgggatcatattaatatttcttagggtgaaatttgcaactgcagcggtaatcgtgtcaggccatcagaaaagtaccacagtgagtcacgagatgtccgggctgaattggaagccattcgtgtatggcggcctcgctagtattgtggccgaattcgggacttttccagtggacctcacgaagaccaggctccaagtccagggtcaatccatcgacgcacgattcaaggagattaagtaccgcggaatgttccacgctctgttccggatctgcaaggaagaaggggtgctggccctctacagcggaatagccccagccttattgcgccaggcctcttatggaaccatcaaaattggcatttatcaatcactcaagcgactgtttgtcgagagattagaggatgaaacgctgctaatcaacatgatttgtggcgtggtctctggtgtgattagctctaccattgcgaatccgaccgatgtcctaaagatccgtatgcaggcccagggatccctctttcagggaagtatgattggctcattcatagatatctatcaacaggaaggcacacgtgggctgtggagaggcgttgtgccgaccgcacagagagcagccatcgtcgtgggggtggagcttccagtgtacgacatcacgaagaagcacctgatccttagcggaatgatgggggacactatccttacacattttgtgtcttcttttacatgcggattggcaggagcccttgcaagcaaccccgtagacgtcgtccgcaccaggatgatgaatcaaagggcaattgtgggccacgtggacctttacaaggggactgtggacgggatattaaagatgtggaaacacgagggtttcttcgccttatacaaaggcttttggccaaattggcttcgtttggggccctggaacatcattttcttcatcacttatgaacagctcaagcgcttgcagatctag

SEQ ID NO: 117464 - DNA, 894 bp, synthetic construct
  misc_feature 1..894: note = Description of Artificial Sequence: Synthetic coding sequence
  source 1..894: mol_type = other DNA
atggaagaattggtggtggaagtgaggggatccaatggtgctttttacaaagcatttgtaaaggatgtccacgaggatagcattactgttgctttcgaaaacaactggcagccagataggcaaatcccctttcacgacgtccgttttcctccacccgttgggtataacaaagacatcaatgaatctgatgaggtagaggtatattctcgcgctaacgaaaaggaaccctgttgctggtggttggcaaaagtgagaatgatcaaaggcgaattttatgtcatcgagtatgccgcctgtgatgcgacctacaatgagatcgtcaccatcgaacgcttacgatccgtcaacccaaacaagcccgcaaccaaagacacctttcataaaattaagctagacgtgcctgaagacctgagacagatgtgcgccaaggaggcagcacacaaggattttaagaaggcagttggcgccttctccgtgacatacgaccccgagaactatcagctggtgattctgagtattaatgaggttacatccaagagggcacatatgctaattgacatgcacttccgcagcttacgcaccaaactgtccctcatcatgcgcaacgaggaggcctcaaagcagctggaaagctccagacaactggcatcaagattccacgagcaattcattgtcagagaggacctgatgggcttggctattggaacccacggcgcaaatatccagcaggctcgtaaagtgcctggtgtgacggcaattgacctggatgaagacacatgtacgttccatatctacggcgaggatcaagatgccgtgaaaaaggctcggagctttctggaatttgcggaagacgtcatccaggtgcctcgcaacctcgtggggctgaaaatctag

SEQ ID NO: 117465 - DNA, 1773 bp, synthetic construct
  misc_feature 1..1773: note = Description of Artificial Sequence: Synthetic coding sequence
  source 1..1773: mol_type = other DNA
atggaggagctggtagtcgaggttaggggttctaatggagcattttacaaggcttttgtcaaggatgtgcatgaggattcaattacggtggccttcgagaacaattggcaacctgaccgtcagattcctttccatgatgtgaggttcccgccacccgtgggttacaacaaggatattaatgaatccgatgaagtggaagtatattcaagagcaaatgagaaagagccatgttgctggtggctggccaaggtgcggatgatcaagggcgagttttacgtgattgagtacgccgcctgtgacgccacctacaatgaaatcgttaccattgaacgccttcggagcgtgaatccaaacaagcctgcaacaaaggatacatttcacaagattaagcttgacgttcccgaggatctgcggcaaatgtgcgctaaggaggccgctcacaaggactttaaaaaagctgtcggtgcattcagtgtcacgtacgatcccgaaaattatcagctggtcatactgtctatcaacgaagtgaccagtaagagagcccatatgttgatcgacatgcactttagatctcttcggacaaagctatctcttatcatgcgaaacgaagaggctagcaagcagctggagtcatccaggcagctggcctctaggttccacgaacaattcattgtgagggaggacctcatgggcctcgcgatcggtacacatggagctaacatacagcaagcccgcaaagtgccaggcgtgaccgctattgatctggatgaagacacgtgcactttccatatctacggcgaggaccaggacgccgtaaaaaaagcccgaagtttcctggagtttgcagaagacgttattcaggtcccgaggaatctagtgggtaaagtgatcgggaaaaacgggaagctcatacaggagatcgtggacaaatccggcgtggttcgggtccgtatcgaggccgagaatgaaaaaaatgtacctcaggaggaggaaataatgccaccaaattcactcccttctaataatagtcgggtggggcccaacgcaccggaggagaaaaagcacctggacataaaggagaatagtacccacttctcgcagcccaattccactaaggtgcaaagggtgctggtggcctcatcagttgttgctggggagtcgcagaagcccgagctgaaagcgtggcaagggatggtgccttttgtgtttgtcgggacaaaagattcgatcgcaaatgctacagttctcctagactaccacctcaactacctgaaggaagtggaccagttgcggctcgagcgactgcagattgatgaacagctaagacagatcggagcttcctccaggccaccgccaaacaggactgataaagagaagagctacgtgaccgatgatggccaagggatggggcggggcagccggccgtataggaaccgcgggcacggacggaggggtcctggatatacttcagcgccaaccgaggaggagagagagtcattcctgagaaggggcgatggtcgcaggagaggtggtggcggccgaggacaggggggtcggggcagagggggcggcttcaagggaaatgatgatcacagccgaacagacaataggccacgaaatcctcgtgaggccaagggtaggaccaccgatggaagcttgcaaaatacctcttctgagggatctcgcctgaggactggcaaggatcgcaaccagaagaaggagaagccagactctgtagatggccagcagcccttggttaatggagttccttag

SEQ ID NO: 117466 - DNA, 1614 bp, synthetic construct
  misc_feature 1..1614: note = Description of Artificial Sequence: Synthetic coding sequence
  source 1..1614: mol_type = other DNA
atggaggagttagtggtggaagtacggggctcaaacggagccttttacaaggcctttgtcaaagacgtacatgaggactctatcaccgtagcctttgaaaacaattggcaaccagatcggcagattcccttccatgatgtgcgcttcccaccccccgtgggctataacaaggatatcaacgagagcgatgaggtcgaagtgtactcgagagcgaacgaaaaagaaccctgttgttggtggctggccaaagttcgtatgattaaaggtgaattctacgtcatcgagtatgccgcctgtgacgctacttacaacgaaatcgtgacgatagagcgcttgaggtcggtcaaccctaataagccagcaactaaggatacctttcacaagattaaactcgacgtaccagaggatttaaggcagatgtgtgccaaggaggcggcacacaaggacttcaagaaagctgttggcgccttctcggtgacctatgatccggaaaattatcagcttgtgattctctcaattaacgaggtcacctcaaaaagagcccacatgctcattgatatgcatttcagaagcctgcgaaccaaactgtctctgattatgcgaaacgaggaggcatccaagcaacttgagtcgtccaggcagctggctagccgctttcatgagcaatttatagttcgagaagacctgatgggcctggccatcggcacccacggggctaacatccagcaggcccgcaaggttcctggggtgacagctattgatctcgacgaggacacctgcacttttcacatttacggcgaagatcaggacgcggtgaagaaggctcgttcttttctggagtttgccgaggatgtcattcaggtcccccgaaacctcgtgggcaaggttattgggaaaaatgggaaactgatacaggaaattgttgacaaatcaggggtggtgcgcgttagaattgaagccgagaatgagaaaaatgtgccccaggaggaggaaatcatgcccccgaacagtctgccatctaacaatagtcgcgtgggacctaatgctcccgaggagaagaagcacttggacattaaggagaactccactcatttttctcaacctaatagcaccaaggtacaaagggttctggttgcctcttctgtggtggccggggagtctcaaaagccagagctgaaggcatggcagggaatggtgcccttcgtcttcgtcggcaccaaagattccatagccaacgctaccgtcttattagactaccatctcaattacctgaaactgcagcagaggaagcgagggcgcgcttcctgcgctgaggagactgatggaggcgttgaaggcgaggaagaggacaaagaggaggaggacgttgaagaagcttccaaagagacaacgatcacaccagaacaaataatcgtccacgtcattcaagaaaggctcaaggaagagcagcagatggatcctttcagaagcgaactgacagctatcatgaaaggtgtctctactctgaaacactaccgcatccctccagtcaaggtggttggttgtgcacgcgtcaagatagtgacacggagaaagcgttcccaaacggcctggatggtcagtaaccattcctag

SEQ ID NO: 117467 - DNA, 1899 bp, synthetic construct
  misc_feature 1..1899: note = Description of Artificial Sequence: Synthetic coding sequence
  source 1..1899: mol_type = other DNA
atggaagaattagtcgtcgaggtgaggggatctaacggcgccttttacaaagctttcgtgaaggacgttcatgaggactcaatcaccgtggcttttgaaaacaactggcagcccgatagacagatccccttccacgatgtgaggtttcctcctcctgttggctataataaggatatcaacgaatcagacgaagttgaagtctattcccgagcaaacgagaaagaaccctgttgctggtggttggctaaagtccggatgataaaaggagaattttatgtaatcgagtacgcagcttgcgacgcgacttacaatgagatagtcaccatcgaacgactccgatctgtgaatccgaacaaaccagcaacaaaagacacatttcacaaaatcaaactggacgtgccggaagaccttcggcaaatgtgtgccaaggaggcggcccacaaagatttcaagaaagcagtaggagctttctccgtgacatacgatcctgaaaattatcaactcgtaatcttgtccattaatgaagtgacttctaaaagagcccacatgcttatcgacatgcacttcagatcgttacgcacaaagctttccctcataatgcggaacgaagaggccagcaaacaattggagtcctcccggcagctggcgagcagatttcacgaacagtttatcgtgcgcgaggatctgatgggcctggccattgggactcatggtgcgaatattcagcaggctcgcaaagtaccaggcgtgactgcgattgacctggatgaggatacttgtacttttcatatctatggagaggatcaagacgcagtaaagaaggctcgctccttcctagaattcgccgaggacgtgatacaggtcccccgcaacctggtcggcaaagtgatcggtaagaatggcaaactgatccaagagatcgtggacaagagtggtgtagtgagggtccgcatcgaagctgagaacgaaaaaaatgtgccgcaagaagaggaaattatgccacctaactccttaccatctaacaattccagagtcggcccgaacgcaccagaggagaagaaacatttagacatcaaagagaattctacccatttctcccagcccaacagcacaaaggtgcagcgtgttctggttgcttcatcagtggtcgccggcgagagtcaaaaaccagagctgaaagcctggcagggaatggtgccattcgtattcgtggggaccaaagacagtatcgccaatgccacagtcctgcttgattaccatcttaattatctgaaagaagtcgaccagctcagattggaacggctacaaattgacgagcagctgaggcagatcggggccagcagtaggcccccgcctaatcgcaccgacaaagaaaagtcttacgtgactgatgacggccagggcatgggtcggggatcaaggccttacagaaatagggggcacggccgccgggggcccgggtacacctccggcacaaactccgaagcttcgaacgcatcggagaccgaaagtgaccacagggatgagctctcagattggagtttggcccctaccgaagaggagagggaaagtttcctgaggcgaggcgatggccggagacgagggggcggcggcaggggccagggcgggaggggccgcggcgggggctttaaggggaatgatgaccacagccggactgataataggcctcggaacccccgcgaagcaaaagggagaaccaccgacggatccctgcagattcgcgttgattgcaacaacgagcgcagtgtgcatacgaaaaccctgcaaaacactagcagcgaaggtagccggttacgaactggcaaagaccgcaatcaaaagaaggagaaacctgacagtgttgacggtcaacaaccgctcgtaaacggcgtgccttag

SEQ ID NO: 117468 - DNA, 1749 bp, synthetic construct
  misc_feature 1..1749: note = Description of Artificial Sequence: Synthetic coding sequence
  source 1..1749: mol_type = other DNA
atggaggaactggttgtggaggtcaggggcagcaatggggctttttataaagcatttgtcaaggacgtccatgaagacagcataaccgtcgcattcgagaataattggcagcctgataggcagatccccttccatgacgtcaggtttcccccgcctgttggatacaacaaggacataaatgagtcagatgaggtagaggtatacagccgcgcaaacgagaaagagccttgttgctggtggctggccaaggtcaggatgatcaagggagagttctatgtgattgagtacgctgcttgtgacgcgacatacaacgaaattgtaaccattgagcgcctcaggagcgtgaaccctaacaaacccgcaaccaaggacacgttccataagattaagctcgacgtgccggaggacctaaggcaaatgtgcgctaaagaagccgcacataaagacttcaagaaggcggtaggcgcttttagcgtgacctatgaccctgagaactaccaacttgtgatcttatctatcaacgaagtgactagcaagcgcgctcacatgctaattgacatgcacttcaggagcttgagaaccaaactgtctctcattatgaggaacgaggaagcttccaagcaattggagagcagccgccagttggcctctcgattccacgagcagttcattgtccgtgaggatctaatgggcctcgcgattggaactcacggcgcgaatatacaacaggccagaaaagtgcctggggtgacggccatcgatctcgacgaggacacctgtacatttcacatttacggcgaagaccaggacgccgtcaagaaggcccgaagcttcctcgagttcgcagaggacgtgatccaagtgcctcgtaatctggtggggaaggtgatcggcaagaacggtaaactaatccaggaaatcgtggataagtctggcgtagtccgggtgcgaatcgaagctgaaaatgaaaaaaatgtcccccaggaggaggagataatgcctcccaactcacttccatctaataatagccgagtgggccctaatgcacccgaggaaaaaaagcatctggacatcaaggagaattccacgcatttctcccagcctaactctactaaggtgcagcgcgggatggtcccattcgtgtttgtgggcaccaaagatagtatcgcaaacgccactgtgctgttagattaccacctcaactacttgaaggaagtggaccagctgcgattagagagactgcagatcgatgaacagctgaggcagatcggcgcatcttcgcggccccccccaaacagaacagacaaggaaaagagttacgtgaccgacgacggccagggaatggggagaggaagccgtccctacagaaaccgcgggcacggaaggagaggccctggctatacctctgaaagcgatcatcgtgacgagctgtccgattggtctttggcgcccacagaggaggagagggagtcttttctgaggagaggcgatgggcggcgccgcggaggaggagggcggggacagggcgggcgtgggagaggcggcgggtttaagggaaatgacgatcatagtaggactgataatcggccgcggaacccgagggaggccaaggggagaaccacagatgggagtttacagaatacaagtagcgaaggctcccggttgagaacaggtaaggacagaaaccaaaaaaaggaaaaacccgatagtgttgacgggcaacagcctctagtgaatggagtgccttag

SEQ ID NO: 117469 - DNA, 1779 bp, synthetic construct
  misc_feature 1..1779: note = Description of Artificial Sequence: Synthetic coding sequence
  source 1..1779: mol_type = other DNA
atggaagaactggtggtcgaagttagggggagcaatggagcgttctacaaggccttcgtcaaggatgtacacgaggactcaattactgttgcctttgagaacaattggcagccagacaggcagatcccctttcacgatgtaaggttccctcctcctgtgggttataacaaagatatcaacgaatctgacgaggtggaggtgtattctcgggcaaacgaaaaggagccttgctgctggtggttggctaaagtgcggatgatcaaaggggagttctatgtaattgaatacgctgcctgtgacgctacatataatgagattgtcactatcgaaagattgcgtagcgtgaaccccaataaacctgcaactaaagatacattccacaaaattaaattggatgtgccagaagacctgaggcagatgtgcgcaaaggaagccgcccacaaggattttaaaaaggctgtgggcgccttttccgtgacatatgacccagaaaattatcagctggtcatcctgagtatcaacgaggtcacaagtaaacgagctcacatgttaatagatatgcactttcgaagcctgcggactaagctttcgttaatcatgcgaaatgaagaagcctccaaacagctagagtcttctagacaacttgcaagtcggtttcatgagcagtttatcgtacgcgaggacttaatggggttggccattggcacccacggggctaacattcaacaggctcgaaaggttcctggtgtaacagcgattgacctggacgaggacacctgcacttttcatatctatggtgaggaccaggatgccgtgaaaaaggctcgaagttttctcgagttcgccgaagacgttatccaggtgccaagaaacctggtcgttatcggaaaaaacggaaagcttattcaagagattgtggacaagtccggcgtggtgcgcgtgaggatcgaggcagagaatgaaaagaacgtcccgcaagaagaggaaattatgccccctaactctctgcccagcaacaattcacgggttggcccaaatgccccagaggagaagaaacacttggacatcaaggagaactccacccatttttctcagcccaatagcaccaaggttcagcgcggcatggtcccttttgtcttcgttggaaccaaggacagcatagccaatgcgacagtgttgttggattatcatttaaattacttgaaggaagtggaccagcttaggttggaacgcctgcagatagatgagcagctgaggcaaataggagccagtagcaggcctccaccgaatagaacagacaaagagaaatcttatgtgaccgacgatggccaaggcatgggccgcggatcaaggccctaccgcaaccgaggccacggacgccggggcccaggctacacctctgggacaaattctgaagccagcaacgctagtgagaccgaaagcgatcaccgcgacgagctctctgattggtccctagcccctaccgaggaagaacgcgagtccttcctgcggcggggagacgggagaagacgcggcgggggcggccgaggacagggtggtaggggtaggggcggcggcttcaaaggcaatgacgaccactctcggactgacaaccgcccgagaaaccctagggaggctaaaggacgaacaacagacgggtccctgcagaacacctcaagcgagggaagtcgtctccggacaggtaaggacagaaaccagaaaaaggagaagcccgattcggtggacggccagcagcccttagtcaatggcgttccttag

SEQ ID NO: 117470 - DNA, 789 bp, synthetic construct
  misc_feature 1..789: note = Description of Artificial Sequence: Synthetic coding sequence
  source 1..789: mol_type = other DNA
atgcctccaaacagtcttccgtccaataactccagggttggcccaaacgctcccgaagaaaaaaagcacctcgacatcaaggagaattctacccactttagtcagcccaatagcaccaaagtacaaagaggaatggttcccttcgtgttcgtggggaccaaggacagcattgctaacgcgacagtgttactcgactaccacctaaattatctgaaagaagtggatcaactccggctggaaagattacagatcgatgagcagttaagacagattggtgcgtcatcacgcccccccccaaacagaactgacaaagaaaagtcttacgtgaccgatgacggccagggtatgggccgggggtcccgcccctacagaaacaggggtcatggcaggcgaggtcccgggtacacttccggtacaaactctgaagctagtaacgcgtcagagacagaatccgatcatagagacgaattatccgactggtctttagccccaacagaggaagagcgtgaaagtttcctccgcagaggagatgggagacgccgggggggagggggtagaggacagggaggcagagggcgtggcggaggcttcaaggggaacgacgaccattcacgaaccgataatagaccacgaaatcccagagaagcaaagggcagaacaacagatggctctcttcagaacacaagcagcgagggatcgagactcaggacagggaaagatcgcaatcagaagaaggaaaaacccgactcagtcgacggccagcagcctctggtgaacggggtcccctag

SEQ ID NO: 117471 - DNA, 1611 bp, synthetic construct
  misc_feature 1..1611: note = Description of Artificial Sequence: Synthetic coding sequence
  source 1..1611: mol_type = other DNA
atgatgaagggggagttctatgtcattgagtacgcagcgtgcgacgctacctataacgagatcgtcactttcgagcgtcttcgacccgtcaatcagaataagactgtcaaaaagaacacttttttcaagtgtactgtagacgtccccgaggatctacgggaggcctgcgccaatgaaaatgcccataaagatttcaagaaagccgtcggcgcatgccgaattttctaccaccccgagactacccagttaatgattttaagtgcaagcgaagcaaccgtgaaacgcgtcaatatcctgagcgacatgcatctgaggagcatccgaactaagctgatgctcatgtctcgaaacgaagaggctacaaaacatctcgagtgcacaaagcagctggccgcggcattccacgaggagttcgtggtccgagaggatcttatgggcttggctattggaacccacggtagcaatatccagcaggccagaaaggtgccaggcgtcaccgccatagaactggacgaggacacggggacatttaggatatatggagagagcgctgacgccgtcaaaaaggccaggggcttcctcgagtttgtggaggattttatccaggtcccccggaaccttgtcggaaaagtgatcggcaagaacggcaaggtgattcaagaaatcgttgacaagagcggtgtggtcagagtaagaatagagggtgacaatgagaataagctgcccagggaagacggcatggtgccattcgttttcgttggcaccaaggagtcaattggaaatgtgcaagtcctgctggaataccacatcgcgtatttgaaggaggtcgagcagctccgaatggagcgactacagatcgacgaacagctaaggcagattggctctcgctcgtacagtggccgaggacgtggtcgccgcggccccaactatacaagcggatatggcaccaattccgaactgtctaacccttctgagaccgagtcggagagaaaggatgagctaagcgactggagcttggccggggaagatgacagggactctagacaccagcgcgacagtcgcaggaggccaggtgggagaggccgtagtgtgtcaggcggacggggccgaggcggaccacgcggcggcaagtctagtatcagttccgtactcaaggatcccgattctaacccttacagtctgctagacaatacggagagcgaccagaccgcggacacagatgcttctgagagccatcattcaacgaatagaaggcgccggtctcggaggcggcggacagatgaggatgcagtgctgatggatggcatgacagaaagcgacacagcatcagtgaatgagaacggcctagtgacagtggccgactatatctctagggcggaatcccagtcacgccagcgaaacctgccaagggaaaccctggcaaagaataagaaggaaatggcgaaagacgtgattgaagagcatggaccaagcgaaaaagccataaatggtcctactagtgctagcggagatgacatctctaaacttcaacggactcctggagaggaaaaaattaatactcttaaagaagagaatactcaagaggccgctgtgttgaacggcgtgtcatag

SEQ ID NO: 117472 - DNA, 1866 bp, synthetic construct
  misc_feature 1..1866: note = Description of Artificial Sequence: Synthetic coding sequence
  source 1..1866: mol_type = other DNA
atggcagaattgactgtggaagttcgggggtctaatggcgctttttataagggattcatcaaggacgtgcacgaggactccctcaccgtcgtgtttgagaataattggcagcccgagcgccaagtcccctttaacgaggtgcgcttgcccccaccccccgacattaagaaggagatatctgagggcgacgaagtggaagtctatagtcgggctaacgaccaggagccatgcggctggtggctggcaaaagtgcggatgatgaagggtgagttttatgtaatcgaatacgcagcctgtgatgctacgtataatgaaattgtgacattcgagaggctgaggcctgttaaccaaaataaaacagtcaagaagaacaccttcttcaaatgtaccgtggatgtgcctgaagaccttagggaggcatgcgcaaacgaaaacgcccataaagattttaaaaaagcagtaggagcgtgccgcattttctaccatcccgagaccacgcaactcatgattttgtccgctagcgaggctacagtcaagagggtgaacatcctcagcgacatgcacctcagaagtattaggacaaagctaatgttaatgtcccgcaatgaagaagccacgaaacatctcgaatgcaccaagcagcttgctgcggctttccatgaggaatttgtagtacgggaagacctgatgggtctggcaattggtacccacggatccaatatacagcaagcccgcaaagtgcccggggtaacagcaatagagctggatgaagacaccgggactttccgaatctacggtgaatctgcagacgccgttaagaaagccaggggttttctggagttcgtcgaggactttatacaggtacctcggaatctggtggggaaggtgattggaaagaatgggaaagtgatccaggagatcgtcgataagagtggtgttgtgagggtacgcatcgaaggggacaatgaaaataagctccccagggaggacggcatggtacctttcgtgtttgtaggaactaaggagagtattggcaatgtccaggtgctgctcgagtatcatatcgcttacctgaaggaagttgaacaactcaggatggagaggctccagatcgacgaacaattaaggcaaataggatcccgtagttacagcggcagaggccgcgggcgacgaggacccaattacacctcaggatatggaactaactctgaattatcaaacccatccgagacagagagcgagcggaaagatgaactgagtgattggagtttggccggcgaggacgatcgtgatagcaggcaccaaagagatagcagacgaaggcctggagggcgaggcagaagcgttagcgggggtcgtggacggggaggaccgaggggcggcaaatcctccattagctccgttctcaaggatcccgacagtaatccatactcgctgctcgacaacaccgaatcagatcagacagctgacaccgatgcttctgaatctcaccatagcaccaatcgaagacgcagaagccggagacgcagaacagacgaggatgccgtgctcatggatggcatgacagagagcgacaccgccagcgttaatgagaacgggctcgttaccgtggccgactatatttctcgggccgaaagccagtcccggcagcggaatctgccccgagagaccctagcaaagaacaagaaggaaatggcaaaggatgtgattgaggaacacggaccttccgagaaagcgatcaatggccctacatctgcctctggcgatgacatttcgaagcttcagagaacacctggtgaagagaaaattaacaccttaaaggaagagaacacacaggaggcagcagtacttaatggagtcagctag

SEQ ID NO: 117473 - DNA, 1620 bp, synthetic construct
  misc_feature 1..1620: note = Description of Artificial Sequence: Synthetic coding sequence
  source 1..1620: mol_type = other DNA
atggccgagcttacggtcgaggtaagaggcagtaatggagcgttctataaagggttcatcaaggacgtgcatgaggactcacttactgtagtgttcgagaacaattggcagccagagcggcaggtcccatttaatgaggtccgactaccaccaccacccgatatcaagaaggagatctccgagggcgacgaagtagaagtctactccagagccaatgaccaggaaccatgtggctggtggttagcgaaagtgcgcatgatgaagggcgagttctatgtgatagaatacgctgcctgtgacgccacctataatgagatcgtgaccttcgagcgccttagaccggtgaatcagaacaagaccgtcaagaaaaacacgttttttaagtgcactgtggacgttcccgaggacctccgagaggcttgtgccaacgagaacgcacacaaggacttcaagaaagccgtcggagcctgtagaatcttctatcatccggaaacaacacagctcatgatactgtcagccagtgaagcgactgttaagagggtgaacatcttatcagatatgcaccttaggtcaatccgcaccaagctgatgttaatgtcgaggaacgaggaagccactaaacacctagagtgcacaaagcaactggccgccgcattccacgaggaattcgtggtaagggaggatctgatgggacttgccattggtacacacggatcaaacatccagcaggctaggaaggtccctggggtgacggccatcgagctcgacgaagacaccggtacctttcggatctatggtgagtctgccgacgctgtcaaaaaggctcgagggttcctcgagtttgtagaggacttcatccaggtgccgcggaaccttgtcggcaaagtgattggaaagaatgggaaggtgatccaggagattgtggacaagagcggcgtcgtgagagtgagaatcgagggggataacgagaataagcttcccagggaggacggcatggtaccgttcgttttcgtgggcactaaggagtcaattggcaatgttcaagtgctgcttgagtatcatatcgcataccttaaagaagtcgagcagctgaggatggaaaggctccaaatagacgaacagctgcgccagatcggcagcaggagctactcgggccgtggcagaggaaggcggggcccgaattacacttccggctatggtactaactccgaattaagcaatccgtccgagaccgaaagcgaaaggaaggacgagctgtccgactggtccctggccggtgaggatgacagggactccagacatcagagggatagccgaagaaggccgggcggtcggggtcgcagtgttagtggaggacgcggccggggcggtccaagagggggcaagtcatcgatctcttctgtgttgaaagaccccgactccaacccatactccctactggacaatacagaaagtgatcagactgctgatactgacgcctccgaaagccaccatagcacaaatcgtaggagaagatctcgacgccgccgcactgatgaagacgccgttctgatggatggcatgacagagtccgatactgcgagtgttaatgaaaacggtctggggaagcggtgcgactag

SEQ ID NO: 117474 - DNA, 1827 bp, synthetic construct
  misc_feature 1..1827: note = Description of Artificial Sequence: Synthetic coding sequence
  source 1..1827: mol_type = other DNA
atggttaccgagggattcattaaagatgtccacgaggattcattaacggtagtgtttgaaaacaattggcaacccgaaaggcaggtgccatttaacgaagtacgcctgccaccacccccagacatcaaaaaggagattagtgagggcgacgaggttgaggtgtacagtcgagcgaatgatcaggagccttgtggctggtggctggctaaggtgagaatgatgaaaggcgagttttatgtgatcgaatatgctgcgtgcgatgccacttacaacgaaatcgtcacattcgaaaggttaaggccagttaaccaaaacaaaacagttaaaaagaatacatttttcaagtgcacagtggacgtccctgaagatctacgggaagcttgtgctaacgaaaacgcgcataaagacttcaagaaggccgtgggcgcttgccgcattttttaccaccctgaaacgacacaacttatgatcctgtctgctagtgaagcaaccgtgaagagggtgaacatcctatcagacatgcacctgcgctcaatccggactaagctgatgcttatgtctcgcaacgaggaagcaaccaaacatctcgagtgcaccaaacagctggccgctgcgttccacgaggaattcgtggtgagggaagatcttatgggactcgctattggtacccacggatccaacatccagcaggcacgaaaagttcctggggtcacggctatcgagctggatgaggatacaggcacgtttcggatttatggcgagagcgctgacgcggtcaagaaggcccgtggcttcttggagtttgtcgaggattttattcaggtcccacgcaatctggtcggtaaggtgattggtaaaaatgggaaggtgatccaggaaatcgtcgataaatctggtgtggttcgcgtgaggatcgagggagacaatgagaacaaactgcctagggaagatgggatggtacccttcgtattcgtagggactaaggagtctattggcaacgttcaggtgctcttggaataccacatcgcctaccttaaggaggtcgaacaactgcgtatggagcgcctgcagattgatgaacaactacgtcagatcggatctaggagctactccggacggggaaggggcagaagaggccccaattatacttcgggctacggtactaactctgagctcagtaacccctccgaaactgaaagtgaacgtaaggatgagctgagcgactggagtttggctggcgaggatgatagggattcgagacatcaacgagactcgcgtagacggcccgggggccggggccggtccgtttccggagggagggggcggggaggcccacggggaggcaaatcgtcgatctcatctgtgctgaaagaccccgactctaacccatactccttgctcgacaacaccgagtctgatcagaccgcggacactgatgccagcgaaagtcatcactctacgaatcgccgtaggaggagcagaagaagaaggacagatgaagacgcagtcctaatggatggcatgaccgagagtgatactgctagcgtaaacgagaacgggctagtgactgtggctgactatatatcaagagccgagagccagagtagacagaggaacctccctcgcgaaacgctcgccaaaaacaagaaggagatggctaaagatgtgattgaagaacacggacctagcgagaaggctatcaatgggccaacctccgcctcgggtgatgacataagcaaacttcagcgtacccccggggaggaaaaaataaacactttaaaagaagaaaatacacaggaggccgcagttcttaatggggtgtcctag

SEQ ID NO: 117475 - DNA, 2022 bp, synthetic construct
  misc_feature 1..2022: note = Description of Artificial Sequence: Synthetic coding sequence
  source 1..2022: mol_type = other DNA
atggggggcttggcctccggaggcgacgtagagcctggccttcccgtggaggtgaggggcagcaacggagccttttacaagggttttgtgaaggatgtccacgaggacagcgtcactatttttttcgagaataattggcagagcgagcggcaaataccttttggagacgtgaggctgccaccccccgctgactacaacaaggaaatcaccgagggtgacgaggtcgaggtctactctcgggccaatgaacaagaaccctgtggatggtggctcgcacgggtgcggatgatgaagggcgacttctacgtgatcgagtatgcagcttgcgacgccacctataacgagattgtgacactcgaacggctgcgccctgtgaatcctaacccattagccaccaagggatctttcttcaaggtgacaatggctgtcccagaagacttgagagaggcttgcagcaatgaaaatgtgcacaaagagtttaaaaaagcgttgggcgccaattgcatttttctcaacatcaccaattccgagctctttattttaagcaccaccgaggcaccagtcaagagggcctccctgctgggtgacatgcactttcgcagtctgaggaccaagctgctcctaatgagtaggaacgaagaggcaaccaagcacctggagacttcgaagcaactggcagctgcatttcaagaagaatttacggttcgcgaggacttaatgggcctggctattggaacccatggagccaatattcagcaggccaggaaggtgccaggagtgacggctatcgagctcggcgaggaaacatgcacatttaggatttacggggagacacccgaagcatgtcgccaggccagaagttatctggagttctctgaagactctgtccaggtgccaagaaacctggtaggcaaagtgattggcaaaaacgggaaagttattcaagagatcgtggataagtctggcgtcgtcagagtgagggtggagggagataacgacaagaagaatccccgagaagaaggcatggtgcccttcattttcgtcggtaccagagaaaacatcagcaacgcacaagccttactcgaataccatctaagctacttacaggaagtggagcagttacgcttagagcggctgcaaattgacgagcagctcaggcagatcgggctcggctttcggccacccggatccgggcgcggcagtggtggctccgacaaagccgggtattccaccgatgagagtagcagctctagcctgcacgccactcgcacctacgggggctcttatggtggccgggggcggggacgccgtacgggcggccccgcttacggtccatccagtgacgtgtctaccgcatctgagactgaaagtgaaaagagggaagagcctaatcgggcaggtcctggcgatagagaccccccaaccaggggtgaggagagtcggcgccgccccacgggaggcaggggacgcgggcctccccccgcccctaggccaacctcccggtataattcaagctctatttcaagtgtgctaaaggacccagattccaatccatatagcttattagatacctcagagcccgagcctccagttgatagcgagcccggagaaccaccacccgcctcagcacggcgccggcggtctagaaggagacgtaccgacgaagatcggactgttatggatggcgggttggaatccgacggccccaatatgactgagaatgggctcgaggacgaatcccggccccagcggcgcaaccgatctagacgcaggcgcaatcgaggaaacaggacagatgggtcaattagtggagatcgacagccagttacagtggctgattacattagtcgcgcagagagccagtcccgacagcggcccccactggagcggacaaagccttctgaggattcactttccggccagaagggcgacagcgtttctaagcttcctaaaggacctagcgagaacggagaactgtccgctccgcttgaacttggaagtatggtgaacggagtctcttag

SEQ ID NO: 117476 - DNA, 6540 bp, synthetic construct
  misc_feature 1..6540: note = Description of Artificial Sequence: Synthetic coding sequence
  source 1..6540: mol_type = other DNA
atgaattctttgtcatggggggccgcgaacgccgtcctgctgttgctactgctcgcctgggcttcccctaccttcatcagcattaatcgcggcgtgagggtgatgaagggccactccgctttcctatccggagacgacctgaagtttgcgattccgaaggaaaaggatgcgtgcaaagtagaggtggtaatgaatgaacctatcacccagcgagtgggcaagctcacaccacaggtttttgactgtcacttcctgcccaacgaggtgaagtatgtccataacggttgtccaatattggatgaagatacagtgaaactgcggctgtaccgcttcactgagagagacacgttcatcgagaccttcatcctttgggtttatctactagaacccgactgtaacataatccatatgagtaataacgtcctggaggtgcccgagtttaacgggcttagtcaggccatcgataagaacctgctgcgtttcgactacgacagaatggcgtctctggaatgcactgtgtctctggacacagctaggacccgcttgcccgcccacggccagatggttcttggggagcccagacctgaggagccccgtggtgatcagcctcatagtttttttccagagtctcagttaagggccaaactgaagtgcccgggaggcagctgcacacccggccttaaaaagatcggatccctcaaggtgtcatgtgaggagttcctcctcatgggactgagatatcagcacctggatccaccctcacctaatatagattacatctccattcagctggacctaaccgacacaagatccaaaatagtgtacaaatcagagtcggcttggctgcctgtctacattcgggcaggcattcctaaccagatacccaaggcagccttcatggccgttttcatcctggaggtcgatcagttcatcctaacgagtttaacgacgtccgtcttggattgcgaggaggatgaaacgccaaaacccctgctggttttcaatataactaaggctccactgcaggggtacgtaacgcatctgctggatcacacccggccaatttcaagctttacctggaaggacctttctgacatgcaaattgcttaccagcctcccaacagtagccacagcgagcggaggcatgatgaggtggagttggaggtctatgacttcttctttgaacgctccgcccccatgaccgtgcacatctccatacgcaccgcagataccaacgccccgcgggtgagttggaatacgggactgagcctgctggagggtcagtctcgagccatcacctgggagcagtttcaggttgtcgataacgatgatattggtgccgtacgacttgtcacagtcggtggcctgcagcatggatggctgactctgagaggcggaaagggttttttatttaccgtggccgatctccaggcaggcgtcgttcgttatcaccacgatgattccgacagcaccaaggactttgtggtttttcgcatttttgatggtcaccattccatcaggcacaagttccctataaatgttcttcctaaagacgactcaccacccttcctgattaccaatgtcgtgatcgaactcgaggaagggcagactatccttattcaaggcagcatgctgagggcctcggatgtggacgcaagtgatgattacatcttcttcaatattaccaagcctccccaggcaggtgaaattatgaagaaacccggccccggtctcatcggctatcctgtccacggattcttacaaagggatctgttcaatgggataatatactaccggcatttcgggggggagattttcgaagattcttttcagtttgtgctgtgggattctcacgagccccccaaccttagcgtgccgcaggtcgccaccatccacatcaccccggtggacgatcagcttccaaaggaggcccctggcgtgtcaagacacttggtggtgaaagagacagaggtggcctacataactaagaagcaattgcatttcatcgactctgagagttatgatagggagctcgtctacacaattactacaccacccttcttctcattcagccatagacatctggatgccggcaaactgttcatggttgatagcattcccaaggttgtaaagaaccctacagccctagaactacgtagctttacacagcacgctgtgaactacatgaaggtggcatatatgccccccatgcaggacatcggaccccattgcagagatgtgcagtttacttttagcgtgagtaaccagcatggagggacgctgcatggcatttgctttaacatcacaatcttacccgtggataatcaagttccagaggcattcaccaatccgctcaaggtgactgaaggaggtcagtccattatttccacagaacatatcctgataagcgacgcagacaccaaactggacaacattgacctcagcctgcgggagcttccccttcacggcagggtggagctcaatggctttccgctcaactcagggggcaccttttcctggggggacctacatacgttgaaagttcgctaccagcacgacggtactgaagtcctgcaggatgatctcttgctcgaagtcaccgacggaaccaattccgccgaattcgttctccacgtcgaggtcttccccgtcaatgacgagccccctgtcctcaaagcagatttaatgccggtcatgaattgcagcgaaggcggagaagtcgtgattacctcagaatatatttttgcaacagacgttgattccgataatctgaagttgatgtttgtaatcgccagggagcctcagcacggggtggtgcggcgcgcaggcgttactgtagatcaatttagccagagagacgttatctcagaggcagtgacctacaagcacacaggcggcgaaattggacttatgccatgctttgatacaatcacactggtggtaagtgacggcgaggctggcccgtttgtgaacgggtgttgttacaacggccccaacccatcagtcccgttgcacgcaagcttccccgtgtacgacttgaacatcactgtctatcctgtggataatcagcccccatcgatcgcaattggaccagtttttgtcgtcgatgagggttgctcgacagccctgactgtgaaccacttatctgcaacagatcccgacacagcagccgatgacttggaatttgtgctggtgtctcctccgcaatttggttatcttgaaaacattctgccgagtgtcggattcgagaagtctaacattgggattagcattgacagcttccagtggaaggatatgaacgccttccacatcaactacgtccagtctcgccacctaagaattgagccaaccgccgatcagttcacggtatacgtgactgacggcaaacaccatagtctcgaaatacctttcagtatcataatcaacccaacaaatgacgaggcccccgactttgttgtgcaaaacattaccgtgtgtgaagggcaaatgaaggagctcgactcttcaattatctccgcagttgacctggacatccctcaggatgctctcctcttctctatcactcaaaaaccccggcatggactcctgattgatcggggcttctccaaagatttcagcgagaataagcagcccgcaaacccccatcaaaagcacgccccagtccattcattttccatggagctacttaagacaggcatgaggctgacatacatgcacgacgacagtgagtctctcgcagatgactttaccatacaattgtcagatggaaaacataagatcttgaaaaccatttcagtggaagtaattcccgtgaacgatgagaagccaatgctcagcaaaaaggcagaaattgcaatgaatatgggcgagacgaggatcatcagctcagctattttatctgctattgatgaggatagtccacgggagaagatatattatgtgttcgaaagactcccccaaaacgggcagttgcagctgaagatcggcagggattgggtaccactctccccgggcatgaagtgcacacaggaggaggtggaccttaatctcctgcgctatacccacacaggggcaatggactcacagaatcaggattccttcaccttttacttgtgggacggcaataatcgaagccctgccctagattgtcagatcactattaaggacatggaaaagggtgacattgttatcttaacgaagcctctcgtcgtatccaagggggataggggctttttaactacaactacacttctcgccgtcgacgggacggataagccggaggagctgctgtatgtgattacctcgccacctcgctatgggcaaattgaatacgtgcattatccgggagtccccatcaccaatttctcacaaatggacgtcgtgggccaaaccgtttgctacgtgcataagagcaaggttacggtgagctcagaccgctttcggtttattatctccaatgggctgcgaacggagcatggagtatttgaaatcaccctcgagacggttgaccgagcgctccccgtcgtcaccaggaataaaggtttgcgcctggctcagggcgcagttggtctgctgtctccagacctgctgcagttaacagaccctgacactcccgcagaaaacctcaccttcttgctggtgcagctgcctcagcacgggcagctctatctgtggggaactggactcttgcagcacaacttcacccagcaagatgtggactcaaagaatgtcgcataccgacattccggaggggactcacaaaccgattgcttcacctttatggcaaccgatggtacaaaccagggattcatcgtcaacgggagagtgtgggaagagccggtactctttaccatccaagtggaccagctggataagacggcccctcgaataacactccttcatagtccgagtcaggtcggcctcctgaagaacggatgttacggcatctacatcacctctcgtgtgctgaaggctagcgatcctgatacagaggatgaccagattatctttaagatactacaaggaccaaaacacggacacctggagaataccaccaccggagaatttattcatgagaaattctcgcagaaggacctgaactcaaagaccatcctgtatataataaatcctagtctcgaggtgaactcagatactgtcgagtttcagattatggatccgacgggcaattccgctacaccgcagatcctcgagctcaaatggtcacacatcgagtggtcacagaccgaatatgaagtatgtgaaaatgtcgggctgttgccattggagataatcagacgcggctactccatggacagcgcattcgtcgggattaaggtcaatcaggtaagtgccgcagtcggtaaagactttacagtgattcccagtaagttgatacagttcgatccaggaatgagcactaagatgtggaatattgcaattacatatgatggcctcgaggaagatgatgaagtctttgaggtaatcctgaactcacctgtgaatgccgtccttggcacaaagaccaaggctgccgttaagattctcgacagcaagggagggcagtgtcacccctcttactccagcaatcagtccaaacattctacttgggagaagggaatatggcatctgcttcccccggggtcatcttcttcgaccacaagtggttcctttcacctcgagaggcgtcccctgcctagtagtatgcagctcgcggtgataaggggtgatacactgcgtggcttcgacagcacagacctttcccagagaaaacttcggacacgcggcaatgggaagaccgtcaggccgtcatccgtgtacagaaatgggaccgacataatttacaattaccacggcatcgtaagcctgaagttagaagacgacagtttccccacacataagcgtaaggcaaaagttagcattatatcacagccacaaaaaactatcaaagttgcggagctaccccaggcagacaaggtcgaatctacaactgactcacacttccccagacaggaccagctcccgagcttcccaaagaactgcactttagagctgaaaggcctgttccactttgaagagggcatacagaagctctatcagtgtaacggcatcgcctggaaggcctggtcaccccagaccaaagacgtagaggacaagagctgccccgccgggtggcaccagcattctggctattgccacatactaattaccgagcagaaagggacctggaacgcagccgctcaagcttgcagagagcagtatttgggcaatttggtgactgtgtttagccggcagcacatgcggtggctctgggatattggcgggaggaagagcttttggattggcctcaatgatcaggtgcacgcagggcattgggaatggattggcggcgagccagtagccttcaccaacgggcgccgggggcccagtcagagaagcaagctcggcaagtcatgcgtcctggtccagcgccaagggaaatggcagactaaggattgtcgacgagctaaaccccacaactatgtgtgttcccgtaagttgtag

SEQ ID NO: 117477 - DNA, 6543 bp, synthetic construct
  misc_feature 1..6543: note = Description of Artificial Sequence: Synthetic coding sequence
  source 1..6543: mol_type = other DNA
atgaactccctgagctggggcgctgccaacgcagtgctattgcttctcttgctggcctgggccagcccgacattcatttctatcaatcggggagtgagggtgatgaaagggcatagtgccttccttagcggcgacgacttgaagttcgcaattcccaaggagaaagatgcctgcaaagttgaagtggtaatgaacgaacccatcactcagcgggttgggaaactgactccacaggtattcgactgtcacttcctccctaatgaagtcaagtatgtccacaacggttgtccaattctggacgaagacacagttaagctccggctttacaggtttaccgaaagagatacatttattgagacatttatactgtgggtgtaccttctcgaacctgattgtaacataatccacatgtctaataacgtactcgaggtgccagagttcaatgggttgtctcaggccatcgacaaaaatctcctgcggtttgattatgatcggatggcgtcgttagagtgcacagtgagccttgacactgcacggactcgcttaccagctcatggccaaatggtgcttggggagcctaggcctgaggaaccgcgtggagaccagccccactccttctttcccgagagtcagcttcgggcaaaactcaagtgtcctggcggatcctgcacacccggcttaaaaaagatcggatctctcaaggtttcctgcgaagagttcctcttgatgggtctgcgctaccagcatctagacccgccaagccccaatatcgactacatttcaatccaattagatctgacagatacccgcagtaagattgtgtacaagaaatctgaatctgcctggctgcctgtgtatatcagagcaggaattcccaaccagatccccaaggctgcatttatggcagtgtttatcctggaagtagaccaatttatcttaacatccctgaccacgtcggtccttgactgtgaggaagacgagacccctaaaccactgctggttttcaatataacaaaagcccccttgcagggctatgtcacccaccttcttgatcacacgagaccaattagtagctttacttggaaagacctaagcgatatgcagatcgcctaccagccacccaattctagtcatagcgaacggaggcatgatgaagtagaattagaggtgtatgatttttttttcgagcgctcagcccctatgacagtccatatatctatacgaaccgctgatacaaacgcgccgagagtgtcatggaacacgggattgtctctgctggaggggcagtctcgggccattacgtgggagcagttccaagtcgtagataacgacgacatcggcgctgttcgtctcgtgactgtcggtggccttcaacatggctggctcactctcagaggtggaaagggattcctgttcaccgttgctgacctgcaggcaggggtggtccggtaccatcatgacgatagtgattctactaaagacttcgtggtcttccgcatctttgacggccatcattccatacgtcacaaatttcccattaacgtgctgcccaaggacgactctccacccttcctgatcaccaacgtcgtgattgaattggaggagggacagacaattttgatccaggggtccatgctgagggcgagtgatgtcgacgcttcagacgactacattttctttaacattaccaagccaccacaggctggagaaatcatgaagaagcctgggcctggcctgatcgggtatccagttcatgggtttctgcagcgcgacttgttcaacggcataatatactaccggcacttcggaggagaaatcttcgaggacagctttcagtttgtattgtgggatagccatgaaccacccaacctctccgtaccgcaagtggctacaatccatattacaccagttgacgaccagcttcccaaggaggctccaggtgtctctagacatctggtggttaaggaaaccgaagttgcatatataactaagaaacagctgcactttattgactccgagtcttatgatcgtgaattagtctatacaataacaaccccgccatttttcagtttctctcataggcacctggacgccggcaagctgtttatggtggatagcattcccaaggttgtgaagaaccctaccgccctggagcttcgttcatttacccaacatgcagtgaactatatgaaagttgcctatatgccccccatgcaggatattggacctcactgccgggatgtgcagttcacattcagcgtgagcaatcagcatggcggaaccctacatggcatctgcttcaacattacgatcttgccagtcgacaatcaagtgcctgaagcttttacaaatccactcaaagtgacagagggggggcagagcatcatttcaaccgagcacattctgattagtgacgccgacactaaacttgacaatattgatttgtctctccgcgaattacccctgcacggtagagtggagctgaacggtttcccgcttaattccggcgggacctttagctggggggatttacacactcttaaagtccgctatcagcacgacgggacagaggtacttcaggacgacctgctgctggaagtgacagacggcactaatagcgcggagttcgttctccatgttgaagtcttcccagtcaacgacgaacccccggttttgaaggcagatctgatgcctgtgatgaactgcagcgaaggcggggaggtggtgataacatcagagtacatttttgccaccgacgtcgatagtgacaacctaaaattgatgtttgttattgccagagaaccccagcatggcgtcgtgagacgggctggggtgactgtggaccaattttcacaacgtgatgtaatctcagaggccgtgacctacaaacacaccgggggggaaattgggctcatgccatgctttgacactatcaccctcgtagtatctgacggagaggcgggcccattcgtgaatggctgctgctacaacgggccaaatccatctgtgccattacacgcctctttccccgtgtatgacctgaacattactgtttacccagtggataatcaacctccaagtatcgctattggacccgtttttgtagttgacgaaggttgtagcaccgctctcaccgtcaaccaccttagcgcgacagacccagacacagctgcagatgatctcgaatttgtgctcgtgtctcctcctcagtttggatatttagagaacatcctcccgtctgtgggattcgagaaatcgaacattggaatttccatcgatagcttccagtggaaagacatgaacgcgtttcacataaattatgttcagtccagacaccttcggattgaacccacagccgaccagtttaccgtctacgtgacagatggcaagcatcattcgctcgagatcccgttctcaattatcatcaacccaacaaacgacgaggcgccagacttcgtcgtgcagaacatcacagtttgtgaggggcagatgaaagagttagattcaagtattatttccgccgtggatctggatatccctcaggatgcactgctcttctctatcactcagaaacctcggcatgggttgctcattgatcggggtttcagcaaggacttttcagagaacaaacaacccgccaaccctcatcagaaacatgcccctgtgcatagtttctcgatggaactgctgaaaacagggatgcgtctaacttatatgcatgacgactccgagtccctggccgatgactttactatccagctctctgatggtaaacacaaaattcttaagacaatatccgtcgaagtgataccagtgaacgacgagaaacccatgctttctaagaaagctgagatcgccatgaacatgggtgaaaccagaattatatctagcgcaattctgtccgcaatcgacgaagattcaccaagagaaaagatttactatgtgtttgagagattacctcagaacggccagctccagctgaagataggcagagactgggtgcctctcagtccgggcatgaagtgtacacaggaagaggtggatctgaatctgttgagatatacacataccggagccatggactcccagaaccaggactcttttaccttctacttatgggacggcaacaatcgctctcccgccttggattgccagattaccatcaaagacatggaaaaaggcgacatcgtaattctcacaaaacccctcgtcgtgtctaagggagatcgcggattcctgactacgaccacactgctcgctgtggacggtactgacaaaccagaagaactactatatgtgataacttcaccaccacggtacggtcaaatcgagtatgtgcattaccccggggttcctatcacaaacttcagtcagatggacgtggtgggccagaccgtgtgctatgtccacaagagtaaagtaacagtcagctcagatcgatttagatttattattagtaacggactgcgaaccgagcatggcgtgttcgagattacactcgagacggtggacagagctctaccagttgtcacccgcaacaaaggcttaagactagcgcagggggcagtgggattgctgtctcccgatcttctgcagctgaccgacccagacactcccgcagagaatctaacctttcttctcgtgcaactcccacagcacggccaactgtacctttggggaactggactgctgcagcataactttactcaacaggatgttgatagtaaaaacgtcgcctaccgccacagtggaggagacagccagacagattgcttcacctttatggctaccgacggcacgaatcagggcttcatcgttaacggtcgggtctgggaggagcccgtcctctttaccattcaagttgaccagctcgataagactgctcctaggattactctacttcacagcccttcgcaggtcggactactcaaaaatggttgctatggtatctatattaccagccgtgtacttaaagcctccgaccccgatacagaagatgaccagatcatctttaagatcctgcagggccccaagcacggccacttggagaatacgacaacaggggaatttattcacgaaaagttttcccagaaagatctcaactcaaagaccatcctgtacattattaacccatctctggaggtgaattcggacactgtggagttccagatcatggatccaaccggcaactccgccaccccacagatacttgagttgaagtggagtcacattgaatggtcccagaccgagtacgaggtttgtgagaatgtggggcttctgccactggagatcatccggcggggctactcaatggacagcgcctttgtcggtataaaagtaaaccaagtgtcagccgcagtgggtaaggacttcacagtgattccaagcaaactgattcagtttgaccctgggatgagcacgaagatgtggaacatagccatcacttatgatggactggaagaggatgatgaagtcttcgaggtcatcctgaatagtcccgttaacgctgtgttgggcactaaaacgaaggccgcggtgaagatcttagactccaagggggggcagtgccatcccagctattctagtaatcaatctaaacactcaacatgggagaaggggatttggcatctcctcccgcctggcagttctagctcgacgacttcggggtcttttcatctcgaaaggcgtcctctccccagtagtatgcagcttgccgtaatccggggtgacacactccgaggttttgattctacagatctgtcccagagaaaactgagaactaggggtaatgggaaaaccgtccgtccttcttccgtgtatagaaacggcactgatatcatctataactatcatggaattgtgagcttgaaactcgaggatgattcttttcccacccacaaacgaaaagccaaagtctcaattatatcccaacctcaaaaaaccattaaggtggctgagctgccccaggccgataaggtggaaagcactaccgattcccactttcccaggcaagaccagcttccgtccttccctaagaattgcactctggagttgaagggcctgttccatttcgaagagggcattcaaaaattgtatcagtgtaatggcattgcttggaaagcctggtccccgcagactaaagacgtcgaggataagtcctgccctgcgggctggcaccagcactcggggtactgccacattctgattaccgaacagaagggaacgtggaatgctgccgcacaagcttgccgggaacaatatctggggaatctggtcaccgtgttttccagacagcatatgcgctggttatgggatattggaggccgaaagagtttttggatcgggctgaacgaccaagtgcacgccggccactgggagtggatcggaggcgagccagtggcctttacaaacgggcgcaggggaccgagtcagcgatctaaactgggcaaaagttgcgtcctcgtccaacgccaggggaaatggcaaaccaaggattgtcgaagagccaagccccacaattatgtgtgttccaggaagctctag

SEQ ID NO: 117478 - DNA, 648 bp, synthetic construct
  misc_feature 1..648: note = Description of Artificial Sequence: Synthetic coding sequence
  source 1..648: mol_type = other DNA
atgctcgatgagtccttggctgttcggcgcagtaaaaaatgcaaagagatgatcatgcattgggagaagaaggaggatatcgatattgtgaataccgtggatcagctggataagacagcaccaaggatcacgctcttgcacagcccatcacaggtgggcctgctcaagaacggctgttacggcatttatatcactagtcgtgtgctgaaagcctctgatccagacacagaggatgatcagattatattcaagatcctacaaggaccaaagcatgggcaccttgagaacaccactacaggagagtttattcacgaaaagttttctcagaaggatctaaacagcaaaacaattctgtacattattaatcccagcctggaagttaattcagatactgtcgaatttcagattatggatccaaccgggaatagcgccaccccgcagatcctggaactgaagtggtcccacatagaatggagtcagacagaatatgaggtgtgtgagaatgtcggtctcctcccccttgagataattcgccggggatattcaatggatagtgcctttgtcggaatcaaggtaaaccaggtgtcagcagccgtgggcaaagatttcactgttatcccgagtaaactaatccagttcgatccgtag

SEQ ID NO: 117479 - DNA, 2148 bp, synthetic construct
  misc_feature 1..2148: note = Description of Artificial Sequence: Synthetic coding sequence
  source 1..2148: mol_type = other DNA
atggtgacccaggagtctatgctgaaggccgccttacctctgttcaccaggttcatcatatccaatggcttgaggaccgagcatggcgttttcgagataacacttgagaccgtggatcgagcactgcctgtggtgaccagaaacaaggggctacgcctggcacagggcgctgtcggcctgttgagcccagacctcctgcaattaaccgatccggacactccagccgagaatctgaccttcctgctggtacagctcccacagcatgggcagctgtacctgtgggggactgggctccttcaacacaattttacacagcaagacgtcgactcaaagaatgttgcctaccggcattccggcggcgattcccagactgattgcttcacttttatggcgaccgacggtaccaaccaaggatttatagtcaatggccgagtgtgggaggagcccgtactgtttacaatccaggtcgaccagctcgataaaaccgctcctcgtataacactgctccacagcccttcccaagtcggtttacttaaaaacgggtgttacgggatttatattacaagccgtgttcttaaagcctcagaccccgacactgaggatgatcagattattttcaaaatactgcaggggccaaagcacggccatcttgaaaacaccaccaccggagaattcatccatgagaagtttagccagaaagatcttaattccaagacaatcctgtatattattaacccaagtctggaggttaattccgacaccgtggaattccaaatcatggaccctactggaaattccgctacgccccagattctggagcttaagtggagccacattgaatggtcccagacggaatatgaagtctgtgaaaacgtggggcttctgccattagaaatcattcggaggggttattctatggactcagccttcgtgggtataaaggtcaatcaagtcagtgctgccgtgggcaaagatttcactgttattcccagcaagttgatacaattcgaccccggcatgagtaccaagatgtggaatattgctatcacgtacgatggactagaagaagacgacgaggtatttgaggttatcctgaatagtcccgtgaatgctgtgttaggtaccaagactaaagccgctgtgaaaatattggattcaaagggtggacaatgccacccgtcgtactcctcgaaccaaagcaaacactctacctgggagaaaggcatttggcacctactcccaccgggcagttcatcatcaacaacctcaggaagcttccaccttgaaagacggcccctccctagcagtatgcagctggcagtgattagaggtgacacactacggggatttgactctacagatttgagccagaggaagttgaggacccgcggaaacggtaagacggtgagaccctctagcgtctaccggaacggcaccgacataatctacaattaccatgggatcgtttccctcaagctcgaggatgatagttttcctacgcacaaaagaaaagctaaggtgtccatcatatcacagcctcaaaaaacaattaaggttgccgaactgcctcaggctgacaaagtggagagcactacagatagccattttccacggcaggaccagctgccctcgtttcctaaaaactgtacacttgagctcaagggtctcttccacttcgaagaaggcatacagaaactttatcagtgtaacggcatcgcttggaaggcttggtccccgcagacaaaagatgtggaagacaaaagctgtcctgccgggtggcaccagcacagtggctactgccacatactgatcactgagcagaaaggaacttggaatgcagctgcccaagcttgccgggaacaatatcttggcaatctcgtcaccgttttctctcggcaacatatgaggtggctgtgggatatcggtggaagaaagtcattctggatagggctcaatgatcaggtccacgccggacattgggaatggattggaggagagcccgttgctttcaccaatggccgacggggcccttcacagcgcagcaagttggggaagtcgtgtgtgcttgtgcagagacagggaaagtggcagactaaagattgtcgccgcgctaaacctcacaattacgtctgttctcgcaagctgtag

SEQ ID NO: 117480 - DNA, 6540 bp, synthetic construct
  misc_feature 1..6540: note = Description of Artificial Sequence: Synthetic coding sequence
  source 1..6540: mol_type = other DNA
atgaactctctgtcatggggagctgctaacgcagtgctgttgttacttttgttggcatgggcaagtcccactttcataagcattaatcgaggagtgcgcgtgatgaaaggccacagtgcttttctttcgggggacgacctcaaattcgcgatccctaaggaaaaggacgcttgtaaagtagaagtggtgatgaatgaacccattacccagcgagtggggaagcttacccctcaggtgttcgactgccacttcctccctaatgaagtgaagtacgtacataatggatgtccgatcctggacgaggacacagttaaactacggctctatcggttcaccgaacgagatacattcatcgagacttttattttatgggtgtaccttctcgaacctgattgcaatataatccacatgtcgaataacgtgctcgaggttcctgagtttaacgggttgtcccaggcgatagacaagaacttactgcgcttcgactatgataggatggccagccttgagtgtacagtgtccctagatacggcccgcactcgactgccagctcacgggcagatggttctgggcgaacctcggcccgaggaacctcgcggagaccagcctcatagcttctttcccgaatcacagctgcgagccaagctgaaatgcccaggcggcagctgcacgcctggactcaaaaagatcggctccctgaaagttagttgcgaggagttcctccttatgggcctgcggtaccaacacttggaccctccctcacctaacattgactatataagtatccagttggacctaaccgacacacggtctaagattgtgtataagagcgaaagcgcatggctaccagtctatattagggccggcattccaaaccagatccccaaggccgccttcatggccgttttcatcctggaagttgatcagtttatcctcacaagcttaaccacctcggtgctcgactgtgaggaagatgaaaccccaaagcccctgctggtgtttaatataaccaaagcgcccctgcagggctacgtgacccacctgctcgatcatacccggcccatcagctcatttacatggaaggatctcagcgacatgcagatagcctatcagccccctaactccagtcatagcgagagaagacatgatgaggtggagcttgaagtatacgacttctttttcgagcgctccgccccaatgactgtgcatatttccattcggactgccgacaccaacgccccacgagtatcatggaatacggggctgtcactgttggaaggtcaatcgcgcgccatcacttgggagcagttccaggttgtcgacaatgatgacatcggagccgtccgcctcgttaccgtcggcggactgcaacacggttggctcacattgaggggcggaaagggctttttgtttacagtggcagacttacaggctggcgttgtaagatatcatcacgatgatagtgactcaacaaaggactttgtagtgttcaggatcttcgacggtcaccatagcatacgccataagttccccatcaatgtgctccctaaggatgacagtccacctttcctcatcactaacgtagtaattgagctagaggagggccaaacaattctgatccagggaagtatgctccgcgccagcgatgtggacgcatccgacgattacatatttttcaatataacaaagcccccccaggctggtgagatcatgaaaaaaccggggcccggactgatagggtatcctgttcacggatttctgcagagagacctcttcaatggcatcatctattaccgtcactttgggggggaaatctttgaagattcatttcaatttgtgttgtgggactcacacgagccacctaatctctcagtccctcaggtggctaccatacacatcacccctgtcgatgaccagctgccaaaggaggcacccggcgtcagccggcatctcgtcgtcaaagaaactgaagtcgcttacattaccaagaagcagttgcactttattgactccgagagttacgatagggaactcgtgtacaccatcaccactccaccattcttctccttctcccaccgacacctggacgcagggaaactgttcatggtggacagtatccctaaggtggtcaagaatcccacggccctggaacttcgttccttcacccagcacgcggtgaactacatgaaagtggcctacatgccacccatgcaagacatcggcccacactgccgcgacgtgcaattcactttctctgtgtcgaaccagcatggaggaactctgcatggcatctgtttcaatatcactatcctcccggtggacaatcaggtgcccgaagcctttaccaatcctttgaaggtgaccgagggcggccagtctatcatctccaccgagcacatactgatcagcgatgctgatactaaactcgataacatagatctttcattacgcgagctacccctgcatggacgtgtggagttgaatggcttcccattaaattcaggtgggacctttagttggggcgacttgcacacactgaaggttcgataccagcacgacgggacagaagtgctccaggatgatttgctgctagaggtaaccgacggtaccaattcagccgagtttgttttgcacgtcgaagtgttcccagtcaatgatgagcctcctgtgctcaaggcagatctgatgcctgtcatgaattgtagcgagggcggcgaggtcgtgattacctccgagtacattttcgccaccgatgtggactcggacaatctcaagctcatgttcgtgatagcacgcgagccacagcatggtgttgtgcggagggcgggtgtcaccgtggatcagttctctcagcgtgatgtgatttccgaagcagtcacgtacaagcatactgggggcgagattggcttaatgccctgctttgatacgatcactctggttgtgagtgacggcgaagctggaccgtttgtgaacggctgctgctacaacggcccgaatccgtccgtcccactgcatgcttcattccctgtttatgatttgaacattactgtttatcccgtcgataaccagccccccagtattgcaataggccccgtgttcgttgtggatgaaggctgctctacggctctcaccgtgaaccatttgagcgctacagaccccgacaccgccgcagatgacctggagtttgtgctggtcagcccccctcagttcggttacctcgagaacattcttccaagcgtagggttcgaaaaatctaatattggaatttccatagacagctttcagtggaaagacatgaacgctttccatattaattacgttcagtccaggcacctgaggatagaaccaacagccgatcagtttactgtctacgtaacagacgggaagcaccactctctggaaatacctttcagcatcatcattaatcccaccaacgatgaagctcctgactttgttgttcagaacattactgtgtgcgagggccagatgaaggagcttgattcttcaatcatcagtgctgttgatcttgacattccacaagatgccctactcttctcaattacgcaaaaacctagacatggcctcctcattgatcgaggcttctctaaggatttcagcgaaaacaaacagcctgctaatccacatcagaaacacgcaccggtacattctttctcaatggaactactcaagaccggcatgagactgacatacatgcacgatgactcggagagcctggcggatgattttactattcagctgagcgatggtaagcataagattctgaagacgatttcagtcgaggtgattcctgtgaatgacgagaagccgatgctttctaaaaaagccgaaattgctatgaatatgggggagactcgaatcatcagcagcgcgattctttctgctatcgacgaggattctcctagagagaagatctactacgtgtttgaacggctgccgcagaatggacagttacagctgaaaattggcagagactgggttcctctgtccccaggcatgaaatgcacccaagaggaggtggacctcaacctactcaggtatactcacaccggcgccatggactcacaaaaccaagactctttcaccttttacttgtgggatggtaacaatcgctctccagccctggattgccagattacaatcaaggacatggagaaaggggacatcgtgatactgactaagccattggtagtgagtaaaggcgacaggggcttcttaacaaccaccaccttgctcgctgtagatggtaccgataagccagaggagctgctctacgtgattactagcccccctcggtacgggcagattgagtacgtccactacccaggagtacccatcaccaatttctcgcagatggacgtggtagggcagactgtctgttacgttcataagagcaaggtgaccgttagtagtgacagatttcgttttatcattagtaacggattgagaaccgagcacggggtttttgagattactctggaaacagtcgaccgcgcgcttcctgtggtcacccgcaacaaaggcctgagacttgcccagggagctgtgggcctgctgtcccccgacttgctgcagttaactgatcctgacactcctgctgaaaacctcacatttctgctggtacagctgccccagcatggtcagctgtatctctgggggaccggcctcctgcagcacaactttacacagcaagatgttgactccaaaaacgtagcctaccgccatagcgggggggatagccagacggactgcttcacgtttatggccacagacgggacaaaccagggatttattgtcaatggtagggtgtgggaggaaccagttctctttacaatccaagttgatcaactggacaaaacagcgcccagaattactcttctacattctccatcccaggtgggcctgctgaagaatggctgttacgggatctacatcacctcacgtgtgttaaaggcgtctgatcccgacaccgaagatgaccagattatctttaagattctccagggccccaagcatggccacctggagaatacaacaactggcgaatttattcacgagaaattttctcagaaagaccttaacagtaagactatactgtatatcatcaatccaagcctcgaggtcaattctgacactgtcgaattccagatcatggacccgacaggaaacagcgcaacacctcagatcctggagctcaaatggagtcacatagagtggtctcagactgagtacgaagtttgcgaaaacgtggggctcctcccactggagatcatcagaagaggctacagcatggattctgcattcgtgggcattaaagttaaccaggtatcagctgccgtgggaaaagactttaccgtcatcccatccaagctgatccagttcgatcccgggatgtcaacaaaaatgtggaatatagccattacgtatgacggcctcgaagaagacgacgaggtgtttgaggtcatactgaactcgcccgtgaacgctgtgctgggaaccaagacgaaggctgcagtaaagattctggattcaaagggcggacagtgccatcccagctattccagtaatcagtctaaacacagcacctgggaaaaagggatttggcatctgttacctcccgggtcttcttctagcaccacatccgggtccttccatctggaacgcagacccctcccctccagcatgcaacttgccgtcatccgcggggacacactccgtggatttgattctaccgatttaagccaaagaaagttgcgaaccagggggaatgggaagactgtgagaccaagctcggtttaccgcaatggaaccgatattatatataactatcatggcatcgttagcctgaagttagaggatgacagctttccaacgcacaagcgcaaagcaaaagtgagcatcataagccaacctcagaagaccatcaaggtggcagagctcccccaagctgataaagtggaaagcacaaccgacagccacttcccccggcaggatcagttgccctccttcccaaaaaactgcaccctggagctcaaagggttatttcacttcgaggaaggtatccaaaaactttatcagtgcaatggcatagcctggaaggcttggtctccccagaccaaagacgtcgaagataagtcgtgcccggctggttggcaccaacattcaggttactgccacatcctgatcacggaacagaaaggaacttggaatgcggccgctcaggcctgccgggaacagtacttggggaatttggtaaccgtcttttcccggcagcatatgaggtggctgtgggacatcggcggtcgcaaatccttctggataggactgaatgatcaggtgcacgccggccactgggaatggattggcggggagcccgtggcattcactaatggccgacgcggtcccagccaaagatcaaagttgggaaagtcttgcgtgctcgtccaaagacaagggaagtggcagacaaaagactgcagacgtgcgaagcctcacaactatgtctgcagtcggaagctgtag

SEQ ID NO: 117481 - DNA, 9510 bp, synthetic construct
  misc_feature 1..9510: note = Description of Artificial Sequence: Synthetic coding sequence
  source 1..9510: mol_type = other DNA
atgcattcagccggcaccccaggcctgagcagccgcaggactggcaactccacctctttccagccgggtccaccccccccacccaggcttctgttacttctattgctactgcttagcctggtatcccgggtgccagctcagcccgcggcttttggcagggccctcctgagccctggcttggctggtgccgccggggtcccagcggaagaggctatagtgctggctaaccggggactgcgcgttccattcggcagggaagtgtggctagacccgctgcatgacttggtactgcaggtccagcccggcgatcgttgcgcagtttcggtgttagacaatgacgctcttgcccagagaccagggaggctgagtccgaaacggttcccctgtgattttgggcccggggaggttcggtacagtcatttaggcgcccgcagcccgtctcgcgacagagttcgcctgcagctccgctacgacgcccccggaggggccgtggtcctgccactagttctggaagtagaagtggtgtttactcagctggaggtagtgacgcggaatctgccattggtcgtggaagagttgttaggtacctcgaatgctctggacgctagatctcttgagttcgcatttcagcccgagaccgaggagtgcagagtgggaatcctttctggcctaggtgccctgccgcggtatggtgaactgcttcattacccacaagtgcccggcggcgcccgagagggcggcgcccccgaaactctcttaatggactgtaaggcgtttcaggagcttggtgtgcggtaccgacacactgcagcctcccgttctcctaaccgagactggattcctatggtggtcgagctgagaagcagaggagcacccgtggggtcccctgcactgaagcgggagcatttccaagtccttgtgaggatccgaggcggggccgaaaacacagcacccaaaccttcgttcgtcgcaatgatgatgatggaagtggatcagtttgtcctgaccgctctgaccccggatatgctggccgctgaggacgccgagagtcccagcgatctgctgattttcaatctcacgtctccattccagccaggccagggttaccttgtttctacagacgatcgctccctgcccctttctagttttacacagcgagacctccgtctgttgaagattgcctatcagccgcctagtgaggactccgaccaggaacgcctgtttgagctggagctagaggtcgtggatctggaaggcgctgcctctgaccctttcgcctttatggttgttgttaagccaatgaatacaatggcacctgtcgtcacccggaacaccgggctgattttatacgagggccagtctagaccattgactgggcccgcgggatccggaccccaaaatctggtcattagcgatgaggatgatcttgaggcagtgagactggaggtggtagctgggcttaggcacggccacctggtgatcctaggcgccagttccggatcatctgccccaaaaagctttacagtagcagaactggccgcaggccaggtggtctaccaacatgacgacagagacggcagtctcagcgacaacctggtcctgagaatggttgatggcggaggtaggcaccaggtgcagtttcttttccctattacattggtgcccgtggacgatcaaccgcctgtgctgaatgcaaacaccggcctgacgctggcagaaggcgagactgtacctattctgccactgtccctcagtgcaacagacatggacagcgacgactccctactacttttcgttttagaatcccctttcctgactactggccatcttctgcttcgccaaactcaccccccccatgagaaacaggaacttttgcgtggactgtggcgcaaggagggggccttctacgagaggactgtaacagaatggcaacagcaagatatcaccgaaggcaggttgttttaccggcattctggtccccattctcctggtcccgtgaccgaccagttcactttcagagtacaggacaatcacgatcccccaaatcaatccggcctccagcggttcgtaatccggatacatccggttgatcgcctgcctcccgaactcggcagcggttgtcctttgaggatggtggtacaagaaagtcagctcactcctctgaggaagaagtggctgaggtacacggacttggatacagacgacagggagctgcgttacactgtcacgcaatcgccaacggatacagacgagaaccatttacctgctccattggggacactggtgttaacagataatccttctgttgtggtgactcacttcacacaggcccagattaaccatcataaaatcgcatacaggccacctggacaggaattgggcgtggcaaccagggtagcccagtttcagtttcaggtggaggatcgtgccggcaatgtcgcaccgggcacgtttacactgtaccttcaccccgtcgataaccaaccccccgaaattttaaataccggcttcacaatccaagagaagggccaccatatcctttcagagaccgaactgcacgttaacgatgtagacacagacgtcgcccacatttcctttaccctaacacaggcgcctaaacatggccacatgagggtatcaggccagatcctccacgtaggtggactctttcatctggaagatatcaagcagggccgtgtatcgtacgcccacaacggggataaatctctcacagatagttgcagtttggaggtgtccgatcggcatcatgtggttcctatcaccctgcgagtgaatgttcgccctgtggacgacgaagtgccaatcctgtcgcacccgactggtacactcgagagctacctggacgtcttggagaacggggccacagagattactgcgaacgtgataaaaggtactaacgaggaaacggatgatctgatgcttacattcctcctggaggatccacctctttacggcgagatcctcgtcaacggcatccccgctgagcaattcactcagcgggatatactggagggcagtgtggtttacacccatacaagcggcgagattggattattacctaaagcagattcgtttaatctctctttgtccgacatgtcgcaggagtggaggataggcgggaacaccattcagggcgttactatttgggtaactattctgccagtggatagccaggcacccgagatttttgttggcgaacagcttattgtgatggagggcgataaaagcgttatcacctctgtccacatttctgctgaggatgtggatagcctgaatgacgatatcctgtgcaccatcgtgatccagcctacgtctggctacgtcgagaacatatcaccagcacctggttcagagaagagccgtgcgggtatagccatcagcgcttttaaccttaaggacctgcggcagggacatatcaattatgttcaaagtgtgcataaaggagtcgagcccgttgaggaccgcttcgtatttcgatgtagcgatggcattaatttcagtgaacgacagttctttcctatagtgatcatcccaaccaacgacgaacagccagagatgttcatgagggagttcatggtgatggagggcatgtctctcgtcatcgacactcctattttgaatgctgcagacgctgacgttcccttggacgacctcacttttaccattacacagttccctacccatggacacataatgaaccagctcattaacggcaccgtattggtagagagcttcaccctggatcagatcatagagagtagctccattatttacgaacacgacgactcagagactcaagaggacagttttgtaatcaagctgaccgacggaaaacatagcgtcgaaaagaccgtgctgatcatcgtgatcccagtcgatgatgaaaccccacgcatgactattaacaatgggctggagattgaaatcggcgacactaagataattaacaataagattctaatggctaccgacctcgactcagaggacaagtcactggtctatataatcaggtatggtcccgggcacggactgctgcagcgccgaaagcccacaggtgcctttgagaacatcacactcggcatgaacttcacgcaggatgaagtggaccgcaacctcatccagtatgtgcatcttggtcaggaagggatccgagacttgatcaagttcgacgtcaccgacggcatcaatcccctcatcgacagatacttttacgtgagcattggatctattgacatcgtattcccggacgtcatttcaaagggggttagcctaaaggagggcggtaaagtcactttgactactgatcttctgtctacgagcgatctgaactctcctgatgagaatcttgtctttaccatcacccgagctccaatgcgcggccacctcgaatgcacagatcaacctggggtctccatcacctccttcacacagcttcagctagccggcaataaaatatactatattcacacggcggatgacgaggttaagatggatagcttcgagttccaagtcaccgatggccgcaatccagtatttagaacattcagaatctcaataagcgatgtggataataaaaaacctgtggttacgattcataaattggtagtatctgagtcagagaacaaactgattacgccattcgagttgaccgtggaggatagggataccccagataagctactgaaatttactataacccaggtgccgatacacggccatctgctgtttaataacacgcgccctgtgatggtcttcaccaaacaagatctgaatgaaaacctgatttcatacaagcacgatgggaccgaaagttccgaagattctttctcatttactgttacagatggaacccatacagacttttacgtgttccctgacaccgtcttcgagaccagacgcccgcaggtgatgaagatccaagttctcgccgtagataacagcgtccctcaaatagccgtgaacaagggcgcctctactctgcggaccctggccaccgggcatctgggattcatgatcacaagtaagattctaaaggtcgaggatagggatagtctgcacatttcgctgcgatttatcgtcacagaagcaccccagcatggatatctgctcaatcttgataaaggaaatcattccatcacacagttcactcaggctgacattgacgatatgaaaatttgctatgtactgcgcgaaggcgctaatgcgacgtccgacatgttctattttgcagttgaagatggcggcggtaacaaactcacctatcagaactttaggctgaattgggcctggatatccttcgaaaaggagtattatctggtgaacgaggattccaagttcctcgacgtggtgttaaaacgacgcgggtacttgggggagacttcatttatatccatcggcactcgagaccgcaccgctgaaaaagacaaagactttaaggggaaggcccagaagcaagtgcagttcaatcccgggcagacgcgcgctacatggcgtgttaggatcctctcagatggagagcatgagcagagcgagactttccaggttgtgttatccgagccagtgctggctgccctagagttcccaactgtggcaacagtcgaaatcgtcgacccgggcgacgagccaactgtattcataccacagagcaaatatagtgttgaggaagacgtcggtgaattgtttatcccgatccggcgctccggtgacgtgtctcaggagctgatggtagtgtgttacacccagcaaggtacggctacgggtactgtgcccacctcagtgcttagttattcagactatatttcacgacctgaagatcatacttccgttgtacgcttcgacaaggatgagcgagagaaattgtgcagaatagtgatcatcgacgactcgctctatgaggaagaggaaacctttcacgtactgctttctatgccaatgggaggacgcattggatccgaatttccgggtgcccaggtaaccatagtgccggacaaggacgatgaacctattttctatttcggggatgttgagtacagcgtggacgagagtgctggttatgtcgaggttcaggtgtggaggaccggaaccgatctctcaaaaagctctagcgttaccgtgcggagccggaagacagaccctcctagcgccgatgcgggcacagattacgtaggtatctcaaggaacctcgacttcgcacccggtgtcaacatgcagcccgtgagagtagtgatattggatgatctgggtcaacccgcacttgaaggaattgaaaaatttgaattggtgctaaggatgcctatgaacgccgcactgggtgaacccagcaaagccacagtcagtatcaatgattccgtcagcgacctgccaaaaatgcagtttaaggaacgaatttacacaggctcagagagcgacggtcagatcgtgactatgatccatagaaccggcgacgtgcaatacagatctagcgtacgctgctataccaggcaagggtccgcccaggtgatgatggatttcgaggagaggcccaatacggacacatctatcatcacgtttttaccaggcgagactgaaaagccttgtatcttggaactaatggacgatgtgctgtatgaagaagttgaggagctccgcttggtacttggaactccgcagagtaattcaccatttggcgcggcagtgggtgaacagaacgagacattaatacggatacgagatgacgccgataaaactgtgatcaaattcggggaaacaaaattctcagtaacagaacccaaggagccgggcgaatcagttgtgattcggattcccgtaattcgccagggagacacatcgaaggtgtccatcgtgagggtacatacaaaggacggttctgccacgtccggtgaagattatcacccagtttccgaggaaatcgaatttaaagaaggtgagacccaacatgtcgtggaaatcgaggtgaccttcgatggcgtgagggaaatgcgagaggctttcaccgtgcacctaaagcccgatgagaatatgatcgcagaaatgcagctcaccaaagccatcgtttacatcgaggagatgagttccatggcggatgtcacctttcctagcgtccctcagatcgtgagcctcttaatgtatgatgatacttctaaggccaaagagtccgcggagccaatgtctggctacccagtgatctgcatcacagcgtgtaatccaaagtacagtgactatgacaagactggctccatctgcgccagtgagaatatcaacgacacactgaccaggtatcgctggctcatctcagcgcccgcaggtcctgacggggtcacctctcctatgcgcgaagttgacttcgacaccttttttacctcttcaaagatggtgacgctggatagcatttactttcagcctggatctcgggtccaatgtgccgcccgcgcggtgaacacaaacggtgacgaggggttagaattgatgagtcctatcgtaactatctcacgtgaagagggcctgtgccaacctcgagtacccggcgtagtcggggcagagcctttttccgctaagctgaggtatacaggccccgaggacgctgattacacaaacctgatcaaactcaccgttaccatgccccacatcgacggcatgctgcctgtaatctccacgcgcgagctctcaaatttcgagctcacactttcgcctgacggcacccgcgtcggaaatcataagtgttctaatcttttggactacaccgaagtgaaaacccactacggtttcctgaccgacgcaaccaagaatcctgagatcatcggcgaaacatacccctatcagtattccctatccattcgtggaagcacaacactgaggttctatcgcaatctgaatcttgaggcttgtctctgggagttcgtctcttactacgatatgtcagaacttctggcagactgtggaggcactataggcaccgacggtcaagtcctgaacctcgtacagtcttacgtgactttacgggttcccctatacgtatcttacgtctttcattcgccagtgggagtcggcggatggcagcacttcgatttaaagtccgaactgagactgacctttgtttacgacaccgctatcctgtggaacgatgggattgggagtccccccgaggctgagctccagggctcactctacccaacatccatgcggattggcgatgaagggcgcttagccgttcattttaaaacggaagcacaattccatggcttgttcgtcctcagtcacccagcgtctttcacaagctccgtcattatgagcgccgaccacccgggtttgacattcagcctaagactgatccgaagcgagcccacttataaccagcccgttcagcagtggagctttgtgtccgactttgcagttagggactactccggaacgtataccgtcaagctggtgccttgcacagctccatctcatcaagaatataggctcccagtgacttgtaatcctcgcgaacccgtgaccttcgatctggacattcgcttccagcaagtttccgatcccgtggccgccgagtttagcttgaacacgcaaatgtacctgctctctaaaaagagcctgtggttgagcgatggaagcatggggtttggccaagaatctgacgtagcgtttgcagaaggagacattatatacggacgggttatggtcgacccggtgcagaaccttggcgactctttctactgcagcattgaaaaggtctttctatgtaccggcgccgacggctatgtccccaagtacagcccgatgaacgccgagtatgggtgcttggctgacagtccgtctctgctgtacagattcaaaatcgtggacaaagcgcagcctgagactcaggccactagctttgggaacgtgctctttaacgctaaactagctgtggacgatccggaggcgattctgctggtcaaccagcccggttctgatgggttcaaagtcgactccacccctctgttccaagtggccctaggccgggaatggtatatacatacgatctacacagtacggtctaaagataatgcaaatagaggaatcgggaaaaggagtgtcgagtaccacagcctcgtttcacaaggcaagccacagtccacaactaagagcagaaaaaaacgggagattaggtccacgccgtcattggcctgggaaatcggcgcggagaatagcagaggaaccaatatccaacacatcgctctcgaccggacaaagcggcagatcccgcacggcagagcccccccagatggaatcctaccttgggagttgaacagcccgtctagcgcagtttctctagtcacagttgttggtgggaccactgtaggcctgctgaccatctgcctcactgtgattgccgtgctgatgtgtagaggcaaagagtcctttcgcggcaaggacgctccgaaagggtcttcctcctcagaaccgatggtgccccctcaatctcaccacaatgacagcagcgaggtttag

SEQ ID NO: 117482 - DNA, 12039 bp, synthetic construct
  misc_feature 1..12039: note = Description of Artificial Sequence: Synthetic coding sequence
  source 1..12039: mol_type = other DNA
atgggggtcctaaaggtatggctggggctggccctggctttggcggagtttgccgtactgcctcatcacagcgaaggcgcttgcgtctatcaggacagtttattggctgacgctactatctggaaacccgattcatgtcagagttgcagatgccacggggacatcgtcatatgcaagccagccgtgtgccgcaatcctcaatgcgccttcgaaaaaggtgaagtgttgcaaattgccgccaaccagtgctgtccagagtgcgttctgagaactccagggtcgtgccaccacgagaagaaaatacatgaacatggaactgaatgggcatccagtccttgttcagtctgctcgtgcaaccacggggaagttaggtgtacccctcaaccatgtcctcctctgtcttgcgggcatcaggagctcgcctttattcccgagggcagttgttgcccagtgtgcgtcggattagggaagccttgcagttatgaaggccacgtgttccaagatggggaggattggcggctatcacgctgtgctaagtgcttgtgcagaaatggggtggcccaatgctttaccgcacagtgtcaaccactgttctgcaaccaagatgaaaccgtcgtgcgcgtgcccggaaagtgctgcccccagtgttccgcacgcagttgcagcgccgcgggtcaggtgtacgagcatggcgagcagtggagcgaaaatgcttgtacaacttgcatctgtgaccggggggaagtacgctgccacaagcaggcatgtcttcccttgaggtgcggcaagggtcagagtcgtgctagacggcatggccagtgctgcgaggagtgtgttagcccagcgggtagctgcagctatgacggcgtggttcgctaccaggacgaaatgtggaagggttctgcttgtgaattttgcatgtgtgaccacggtcaggtaacttgccaaactggtgagtgtgctaaagtggagtgcgctcgcgatgaggaactgatccatttagacgggaagtgttgtcccgaatgtatctccagaaacgggtactgcgtgtacgaggagacaggcgagtttatgtcttccaacgctagtgaagtcaagcggatacctgaaggcgaaaaatgggaggacggaccttgcaaggtgtgtgagtgccgtggtgctcaggttacatgttacgagccctcatgccccccctgtccagtgggaacacttgcacttgaggttaagggccaatgctgtcctgactgcaccagcgtgcactgtcaccccgactgtttgacctgttcccagtctcctgaccattgtgatctgtgccaagacccaaccaagctattgcaaaatggttggtgcgtgcactcctgtgggctcgggttttaccaggccggttcattgtgcctcgcctgccaaccccagtgcagtacttgtacgtccgggcttgagtgttcgagttgtcagcccccactgctgatgcgccatggccagtgcgtccccacttgcggcgacggcttttatcaggatcggcacagctgcgcggtgtgtcatgagagttgtgccgggtgctggggcccaacagagaaacactgcttagcctgccgggatcccttgcacgttctgcgggacggcgggtgcgagagtagctgtggaaagggtttctacaaccgccagggtacttgcagtgcttgtgatcagagctgcgatagctgcggccccagctctcccagatgcttaacttgtacagagaagacagtcttacatgacggaaagtgtatgagcgaatgtcctggcggctattacgcagatgccacgggccgatgcaaggtctgccataattcctgcgcctcttgttccggtcccacaccctcccattgtacggcctgctctcctcccaaggcactgcggcaggggcattgcctgcccaggtgtggggaggggttctactcagaccatggggtctgcaaagcctgccactccagttgtctggcctgcatggggcccgctcctagtcattgtaccgggtgtaaaaagcccgaggaggggttgcaggtcgagcaactcagcgatgtcggaatcccttcaggcgaatgcctcgcccagtgtcgcgcacacttctatctggagtcaacaggaatttgtgaagcatgccaccaaagctgtttccgttgcgccggaaaatccccccataattgcaccgactgcggcccgagccacgtccttcttgacgggcagtgtctaagtcagtgtccagatggctactttcatcaggagggaagttgtaccgaatgccaccctacgtgtagacaatgccatggaccactggagtccgactgtattagttgttatccccacattagcctcaccaacggcaattgcaggacgagttgtagagaagagcaattcttgaacctggttggctattgtgccgactgccaccacttgtgccaacattgtgcggccgatctgcataataccggatcgatctgcctgagatgccaaaacgctcactacctcctcctaggagatcattgcgtacccgactgcccttcaggttactacgctgagcgcggcgcctgtaaaaagtgtcacagctcatgtcggacctgtcagggacgtggccctttttcttgtagctcctgtgatactaatctggttctcagccacacggggacttgctcgactacgtgtttccctggtcactatctggatgacaaccacgtttgtcaaccctgtaacactcactgcggctcatgcgatagccaggcctcttgcacgtcctgccgggacccaaacaaagtactgctctttggcgaatgccagtacgaatcatgcgccccccagtattacctcgatttctctacaaacacctgcaaggaatgtgattggtcgtgcagcgcttgttctggcccactgaagacggactgtctgcagtgcatggacggatatgtgcttcaggatggcgcttgtgtggagcaatgtctgagctccttttatcaggactccgggttatgcaagaactgtgacagctattgcctccagtgccaggggccacatgagtgcacacgctgtaagggtccattccttctactagaggcacaatgcgtgcaagaatgcggcaagggctatttcgctgatcacgccaagcacaagtgtacggcttgtccccagggatgtttgcagtgcagccacagggatagatgtcacctttgcgaccacggcttcttcctgaagtccggcttatgtgtctacaattgtgttccaggcttctcggtgcacacgagtaacgagacctgctctggaaaaatacatactccctcactccacgttaacggctccctgattctcccgattggttccataaagccattggatttctccctgctgaacgttcaggatcaggagggcagggttgaggacctgctgttccatgtcgtttctaccccaactaatggccagctcgtgttgtctagaaacggaaaggaggtccagttggataaagcaggtaggttcagctggaaagacgtgaacgagaagaaagtgcggtttgtgcactcaaaagaaaaattacggaaggggtatctgttcttgaagatctctgaccagcaatttttcagcgaaccccaacttatcaatatccaggcatttagtactcaggcaccttacgttcttaggaacgaagtgctgcatatttctcggggggaaagagcaactattaccactcaaatgctagacatccgggatgacgataatcctcaggatgtggtgatagagatcatcgatcccccactgcatggtcaattgctccagacattgcaatctccggcaacccctatctatcagttccagctagatgaactcagtcggggtttactacactatgctcatgacggttcagactccaccagcgacgttgccgtcctgcaggccaacgacggacactcctttcataatattctgttccaggtgaaaacggttccccagaacgacagaggcctccagcttgtcgccaactctatggtctgggtgccagaaggcggaatgctccagatcacaaacaggattctgcaggccgaggcgccaggcgcatcagccgaagaaatcatttataaaataacccaggactacccccaattcggggaagtggtgttactcgtcaacatgccagccgacagccctgcggatgaaggccagcatttaccagacggacgcacagccactcccacctccacgttcacgcagcaggacatcaacgaggggattgtctggtacaggcactccggagctcccgcccaaagcgatagctttagatttgaagtctcatctgcaagcaacgcacagactaggctggaatcccatatgttcaacatagcaatcctgccccaaacgcctgaggctccaaaagtgtctctggaggcatccctacacatgaccgctcgtgaagacggcctgactgtgatccagcctcactctctctcttttattaattcggaaaaaccctctggcaagattgtgtataacatcactttgcccctccaccccaatcaggggatcattgaacacagggaccacccccacagccccatacgatactttacccaggaagacataaatcagggaaaggtgatgtacagacctccaccagctgctccccatctccaggaactgatggccttctcattcgctggccttccagagtccgtcaaatttcatttcactgtatccgacggtgaacacacttctcccgagatggtactgaccatccatcttctgccgagcgaccagcagctgcctgtatttcaagtgaccgctccccgcttggccgtgagccccgggggatctacctcggtgggactgcaggtcgttgtccgggacgcagagaccgcacccaaggagcttttcttcgaattgagacgccctcctcagcacggtgttctgctgaagcacaccgcagagttcaggcgcccgatggctacgggtgacacatttacctatgaagacgtggaaaaaaacgccctgcagtacatccatgacggatcctccacacgggaggactccatggagatctccgtgaccgacggactaacagtcaccatgcttgaagtccgagttgaggtgtcgctaagcgaggatagggggcccaggctggccgcaggctccagtctcagcatcacagttgcaagcaaatccacagctatcatcaccagatcccatctcgcctacgtcgacgacagcagccctgatcctgagatctggattcagctgaattacctgccatcttacggcaccttgttgcggatttcagggtctgaagtcgaggaactatccgaggtgtctaatttcacgatggaggatatcaacaacaaaaagatccgctattccgctgtcttcgagactgatggtcatctcgttacagactcattttactttagcgtgtcagacatggaccataaccacctggacaatcagatcttcactatcatgattactcctgctgaaaaccctcctccagtgatcgctttcgccgatttgattacagtcgacgaaggtggaagagcaccgctgtcctttcatcactttttcgcaaccgacgatgatgacaatctacagagagatgccatcataaaactctccgccctccccaaatacggctgcatcgagaacacaggaaccggcgaccgttttggtcccgaaaccgcctcggatctggaagcttctttcccaatacaagacgtgcttgagaattatatctactactttcaatcagtccatgaatccatcgagcctacccacgatatctttagtttctacgtctcagacggcacatctagatccgaaatccactcaattaacattacaatcgagagaaagaacgacgaaccacctagaatgacacttcagccactccgcgtacagctgtctagcggagtggttatttccaattcaagtctatctttacaagatctggacacacccgacaacgagttgatctttgtgctgaccaagaagccggatcatggccacgttctgtggcggcagaccgcatccgaacccttagagaacggaagagtgctagtgcagggttccacgttcacctaccaggacatactggctggcctggtgggctacgtgccctccgtgccaggaatggtagtcgacgagttccagtttagcctgacagatggtttgcacgtggacactgggcggatgaaaatttacaccgagttgcccgccagtgatactcctcacctggctattaaccagggtttacagctgtccgccggcagcgtggcccggatcactgagcaacacctcaaggtgacagacattgattctgacgaccaccaggtgatgtacatcatgaaagaagatcccggcgctggacgcctccaaatgatgaagcatgggaacctggaacagatcagcatcaaggggcccatcaggagcttcacacaagctgatatatcacaaggacacgtggagtacagccatggaaccggtgagcccggaggttcttttgccttcaaattcgacgtcgtcgatggagagggcaaccgactcatcgacaagtctttctcaatcagcatactagaggacaaatccccacccgtaattaccacaaacaaaggactagtcctagacgaaaattccgtcaagaaaatcaccactctgcagttgagtgccactgatcaagacagcgggcccaccgagctcatctatcgtatcactcgacaaccacagttagggcatctggaacatgccgctagcccaggaatccagattagctcgtttacacaggctgatctgacgtcgaggaatgtccagtacgtgcactcctccgaggctgaaaagcactctgatgccttctcgtttacactgagcgatggggtttctgaggtgacccaaaccttccatattacactgcatccagttgatgactccctccccgttgtccagaatcttggaatgcgggtacaagaggggatgcgaaaaaccatcacagaatttgagctaaaggcagttgacgcggacacagaggccgagtcagtcacctttactatcgtgcagcccccacgccacggaaccattgagagaacctctaacggtcagcactttcatcttacttccacattcacaatgaaagatatctatcagaaccgggtgtcctactcgcacgatggctctaatagtctcaaggaccgatttactttcaccgtgtcggacggtaccaatccgttctttatcatcgaggagggcggaaaggagatcatgaccgccgcccctcagccctttcgggtggacatactgccggtggatgatgggacaccacggatcgttaccaacctgggactccagtggctcgagtacatggatggcaaagctactaaccttatcaccaaaaaggagctcctcaccatggatcctgataccgaggacgcgcagctggtatacgagataactacagggcccaaacacggattcgtagagaataaacttcagcctggacgtgccgctgcaacttttactcaggaggacgtgaatctggggctgattcggtatgtgctccataaggagaagatccgcgaaatgatggactcatttcagtttttggtgaaagatagcaaacctaacgtggtgtctgataacgtctttcacatccaatggtcactgattagtttcaagtacacaagttataatgtttctgaaaaggctgggagtgtatctgttactgtgcagagaaccggcaatctgaatcagtacgctattgtcttgtgtagaacagaacagggaacagcatccagcagcagtcgtgtcagcagccaaccgggtcagcaagactacgtggagtacgccggacaagtccagtttgatgagcgggaggacaccaaaagctgtacaatcgtgatcaacgacgacgatgttttcgaaaatgtggagagtttcacggttgagttgagtatgcctgcgtatgccttgctgggagagttcacgcaggcgaaagtgatcatcaacgacaccgaggatgaacctacactcgaatttgacaagaaaatctactgggtgaacgagagtgcgggattcctgttcgcacctatcgagcgcaaaggtgatgcttccagcatagtatccgctatttgctacacagtccctaagtcagccatgggctctagcctctacgctctggagtctggaagcgacttcaaaagtaggggaatgagtgcagccagtcgggtgattttcgggcctggagtaacgatgagcacatgcgacgttatgcttatcgacgactcggaatatgaggaggaagaggaattcgagattgccctagctgacgctagcgacaacgcgagaattggaagagtggcgaccgcaaaggtgcttatcagcggccccaacgacgcctctaccgtgagcctgggcaacacagcgtttacagtgtccgaggacgccggcacggtgaagattcctgtgatacgccacggcaccgatcttagcaccttcgcttccgtctggtgcgccacaagacccagtgaccccgccagcgctacccctggagttgattacgtgccttctagccggaaggtagagtttggaccgggcgtgattgagcagtactgtactttaaccatattagacgatacccagtatccggtcatcgagggccttgagacgtttgtcgtttttctatcctcggcccaaggagccgagcttactaagccgttccaggcagtgattgccatcaacgatacattccaggacgtgcccagcatgcaattcgccaaagacctcctgctagtaaaagagaaggaaggggtgctgcatgtgcctattacccgatccggcgatttaagttacgagagtagcgtaagatgctacacccagtcccactcagcacaagtcatggaagatttcgaggagcggcaaaacgccgacagttcgcgaatcacttttcttaagggtgacaaggtaaaaaactgcacagtgtatattcatgacgatagcatgtttgagccagaagagcagttccgagtgtatctgggactccccctgggcaaccactggagcggggcacggattggtaaaaacaatatggcgacaataactattagcaacgatgaggatgctcctactattgaattcgaagaggctgcctatcaggtgagggaacctgctggtccagacgccatagcgatccttaatatcaaggtgattaggaggggagaccaaaaccggacatcgaaggttcggtgcagcacaagagatggatccgcacaaagcggcgtggactactacccaaagtcacgggtgctcaagttcagtcccggagtcgaccatatcttctttaaagtggagatcttgtctaacgaagaccgggagtggcatgagagcttttctctggtactgggacccgacgaccccgtggaggccgtcctaggagacgtgacgaccgccaccgtgactattctcgatcaggaggcggctggttctctcattctgcctgcccccccgatcgtggtgaccctggcagactatgaccacgtagaggaggtaacaaaggaaggcgtgaagaagtcccccagcccagggtatcccctggtgtgtgttacaccttgtgacccccacttcccaaggtatgccgtgatgaaggagcgctgctcggaagccggtatcaatcagacgagcgtccagttttcttgggaagtggccgcccccacagacggcaacggcgctagaagtcctttcgagacaatcaccgacaataccccgtttacatccgtgaatcatatggtgctcgatagtatctattttagtaggaggttccatgtgcggtgcgtagcaaaggcggtggacaaggtgggccacgtgggtacaccactccgcagcaacattgtaacaattgggactgattcagctatatgtcatacccctgtggttgccgggacatcaagaggtttccaggcccaatcatttatcgctaccctgaagtacctggatgtgaagcataaagagcatcccaaccgaattcatatctctgtccagattccacatcaggatggaatgttgcctctgataagcactatgccactccacaatctacacttcttattgagtgaaagtatttataggcaccagcatgtatgttctaatctcgtgacaacatacgatctgcgaggcattagcgaggcgggctttctcgatgatgtggtatatgatagtacagcccttggcccaggctatgataggccgttccagttcgacccctcagtcagggagcctaagaccatacagttgtacaagcacttgaatttgaaaagttgtgtgtggacatttgacgcatattacgacatgaccgagctgatcgatgtgtgtgggggaagtgtgactgctgatttccaggtgagagactctgcccagtcgttcttgacagtacatgtgcccctctacgtctcttacatttacgttacagcccctcgcggatgggcatccttagaacaccatacagagatggagttctctttcttctacgacaccgttttatggcgcactggtatccaaactgacagtgttctttctgccaggctacaaatcatccggatctatatcagggaggacggccgtctcgtgattgagttcaagacccatgccaaatttagggggcaattcgtgatggagcatcacaccctgcctgaggtgaagtcatttgtgctcacccctgaccatctgggaggaatcgaatttgatttgcagctactgtggagtgctcagacatttgactctccacaccaactgtggagggcaacgtctagctacaataggaaagattactcaggagaatacacaatctacctcataccttgcaccgtgcaacctactcagccatgggtcgatccaggggaaaaaccactcgcgtgtacagcgcatgctcctgagcgcttcttgattccaatcgctttccagcagacaaaccggcccgtacctgtcgtgtattccctgaatacggaattccagctgtgcaataacgagaaagtgttcttgatggacccaaatactagcgatatgagtttggcagagatggattacaaaggagccttttccaaaggccagattctgtacggaagagtgttgtggaatccggagcagaatcttaattctgcgtacaagttacaactcgagaaggtctacctatgcactggtaaagacggatatgtgccgttttttgatccaacgggcacgatttacaacgaggggccccaatatggctgtattcagcctaataagcacctcaaacacaggttcctgcttctagataggaatcagccagaagtcacggataaatacttccacgatgtgccattcgaagcccatttcgcatctgagctaccagattttcatgtggtaagtaacatgcccggcgtagatgggtttacattaaaggtggatgctctctacaaagtcgaggcgggccatcagtggtatctgcaggtgatatacataatcggccctgataccatttctggtcccagagtccaacggtctcttacagccccactgagacgtaaccgcagagatttggtagagccagatgggcagctgatattagatgattcccttatctatgacaacgagggggaccaggtcaagaatggtacaaacatgaagagcctgaatctcgagatgcaggaactcgccgtggcagcaagcctttctcagaccggggcctccattgggtccgctctggctgccatcatgctgttgctgttggtattccttgtggcctgttttattaacaggaagtgtcagaagcagagaaagaaaaaacccgccgaggacatcctggaagagtacccactgaacactaaagttgaggtccccaagcggcacccagatagggtggagaaaaacgtgaacagacattactgtaccgtgcggaacgttaatatattgtccgagccagaggcagcttacaccttcaagggtgctaaggttaaaaggctgaaccttgaagtgagggtccataacaaccttcaagatgggaccgaggtttag

SEQ ID NO: 117483 - DNA, 2214 bp, synthetic construct
  misc_feature 1..2214: note = Description of Artificial Sequence: Synthetic coding sequence
  source 1..2214: mol_type = other DNA
atgggggtgctgaaagtgtggctggggcttgccctggccctggctgagtttgctgtcttgccccatcactcagagggtgcctgcgtgtaccaggatagcctgcttgcagacgccaccatctggaaacccgattcgtgccagagctgtcgctgccatggagatattgtgatctgcaagccggctgtttgtcgaaatccccagtgcgctttcgagaaaggcgaggttctgcagattgccgctaaccagtgctgccccgagtgcgtattgaggacacctgggtcctgtcaccacgagaaaaaaattcatgaacatggaacagaatgggcatcgagtccctgtagtgtgtgcagttgtaaccatggtgaagtgcgctgtacgccacagccatgtccacccctgtcttgtggacaccaggagctcgccttcatacccgagggttcttgttgccctgtctgtgtgggcctgggcaagccctgtagctacgagggacatgtgttccaagatggcgaggactggaggctgagtagatgtgcaaaatgcttatgtcgcaacggagttgcccagtgctttactgctcagtgccagccgctcttttgcaatcaggatgaaactgtcgtgcgggtgccaggaaagtgctgcccccagtgctctgctcgtagttgttcagccgcgggccaagtgtatgagcatggagagcagtggtcagagaatgcgtgtacaacctgtatttgcgaccgtggcgaagtacggtgccataagcaggcctgtctgccccttaggtgcgggaagggacagagtcgcgcccgccgacacgggcagtgttgtgaagaatgtgtttcaccggccggttcttgctcttacgatggggtggtgagatatcaagatgaaatgtggaaaggttccgcctgtgagttctgcatgtgtgaccacggccaggtgacgtgccagaccggagaatgtgccaaagtggaatgcgcaagagacgaagaactgattcatcttgacggtaaatgctgcccggaatgcatcagccggaacgggtattgtgtctacgaggagaccggagagttcatgtcctccaatgcgtcagaagtgaaacggatcccggagggcgagaaatgggaggacggaccttgcaaggtatgtgagtgtagaggcgcacaggttacgtgctatgagcctagctgcccaccttgcccagtcggaacattggctctggaggtgaagggccagtgctgcccagattgcacgagtgtacactgtcaccctgactgtctgacctgctctcagtctcccgatcactgcgacttgtgccaggatcccaccaaacttctccagaatggctggtgcgtgcactcctgcggactcggattctatcaagctgggagtctgtgcctcgcgtgccaaccccagtgcagtacctgcacatccggcctggagtgctccagctgtcagcccccactgctcatgcggcacgggcagtgcgtacccacatgcggggatggattctaccaggatcgccacagttgtgcagtttgccacgagtcatgcgcagggtgttggggcccaaccgagaagcactgcttggcgtgtcgagatccattgcatgtcctgcgggatggtggatgcgaaagctcttgcggtaagggcttctataacaggcagggaacctgttcggcctgtgaccagtcctgtgactcttgtgggccttctagtcctagatgtttaacatgtacggaaaagactgtgctccacgatgggaagtgcatgagcgaatgccccgggggttattacgcagatgccacggggagatgtaaagtgtgtcacaattcgtgtgcgagctgtagtggaccgactccatcacactgtaccgcctgctcaccgcccaaggctttaagacagggccactgcttgcccagatgcggggagggcttctactcggatcatggagtgtgcaaggcatgccactccagttgcctggcctgcatgggacctgctccatctcattgtaccggctgcaagaaaccggaagagggacttcaggtagagcaactcagtgatgttggcatacccagtggagaatgtctggcccagtgcagggctcatttctacctggaatccacgggtatctgcgagggtcagaacctggatttttgtcagaatctcgaggttattagcgccgtgtgtctcggtatttccagcactgagaactag

SEQ ID NO: 117484 - DNA, 954 bp, synthetic construct
  misc_feature 1..954: note = Description of Artificial Sequence: Synthetic coding sequence
  source 1..954: mol_type = other DNA
atgggagtgttgaaagtctggctcggcctcgcgctggccctggctgagttcgccgtcctgccgcatcactctgagggggcctgcgtttatcaggattccttgctggcggacgctaccatctggaagccagactcctgccaatcttgcagatgccacggcgacatcgttatatgcaagcccgccgtatgccgaaatccccaatgcgccttcgaaaagggggaagtgttgcagatcgccgctaaccagtgttgtccggagtgtgtcctgcgaaccccagggtcctgccaccacgagaagaagatccacgaacatggaactgagtgggccagttctccttgtagcgtgtgttcttgcaaccatggagaggttcgctgcacaccgcagccttgccctcccctgagttgcggccatcaggaattggctttcatcccagaaggaagctgctgtccggtgtgcgtgggactaggcaaaccctgcagctacgaaggacacgtgttccaagatggagaagactggcggctatcaagatgcgccaaatgtctgtgtagaaacggcgtcgcccagtgttttactgcccagtgccagccgctgttctgtaaccaggacgaaactgtagtgagagtcccgggtaaatgctgtccacaatgctccgcaagatcgtgcagcgcagccggacaggtttatgaacacggggagcaatggagcgagaacgcatgcactacctgcatatgcgaccgcggcgaggtccgctgccacaagcaagcctgtctgccactccggtgcggcaaggggcagtcacgcgcccggaggcatggtcagtgttgtgaagaatgcgtatctcccgcattagcaagccagtccgtcggaattaccggtatgtcacatcacgcgcaatctctcctgggacctttcctgactcagatcaaaaaaccccacttctcctgtctggaatag

SEQ ID NO: 117485 - DNA, 6726 bp, synthetic construct
  misc_feature 1..6726: note = Description of Artificial Sequence: Synthetic coding sequence
  source 1..6726: mol_type = other DNA
tagagtgaagtttccaattttactatggaggatatcaacaacaaaaagatcaggtatagcgctgtgtttgaaaccgacgggcatctggtgacagactcgttttattttagcgtgagcgacatggaccacaatcatcttgataatcagattttcactatcatgatcacgccagctgagaaccctcccccagtcatcgcctttgctgaccttataacagtcgatgagggtggcagagcccctctgtccttccatcatttttttgcaactgacgacgacgataacctgcaaagagatgcaatcataaagttgtccgcattgccgaagtacggctgtatagagaacacaggaaccggcgaccgctttggtcccgagacagcctctgatctcgaagcttcctttcccatccaggacgtcctggaaaactacatctactatttccagtccgtccatgagagcattgaaccaacacatgacattttctccttttatgtgagcgacggcacaagtagatccgaaatccatagtattaacatcactatcgagcgcaagaacgatgaaccccctagaatgactctccagcctttgagggtccagttgagtagtggggtggtgataagcaatagtagtctctccttgcaggatctggacacacctgataatgagctgatcttcgtactgaccaaaaaacctgaccatgggcatgtgttgtggaggcagactgcctccgaaccactcgaaaacggcagggtgctggtacagggttcaacgtttacctaccaagatatacttgctggcctcgttggatacgtgccctccgttcccggtatggtagtcgacgaattccaattctctcttacggacggactgcacgtcgacactgggcgcatgaagatctacaccgaactcccagcttccgatacaccccatttagcgataaatcagggtcttcagctttccgccggctctgtggctaggattactgagcagcacttgaaggtcactgatatcgattccgacgaccatcaggtgatgtatattatgaaggaagacccgggggccggtcgacttcagatgatgaagcatgggaacctggagcagatttccattaagggccctatcaggtcattcactcaagccgacatcagccagggccacgttgagtatagccatggaaccggtgagcctggtggctcgtttgccttcaaattcgacgtggtagacggggaggggaatcggttgatagacaagtcgttctccattagcattcttgaggataagtcaccacctgttataactacgaacaagggtctggttctggacgagaactccgtgaaaaagatcaccaccctccagctgtcggcaacggatcaggactcgggtcctacggagcttatatatcgtatcacccgacagcctcagctcggccatctcgaacatgcagcttcccctggaattcagatctcatcatttactcaggcggaccttacctccaggaatgttcagtatgtccatagcagtgaggctgagaaacactccgatgcgttcagtttcacacttagcgacggagtgtcggaggtaacccagacgttccacattacccttcacccggtggacgattctctacctgtggtccagaacctgggtatgagggttcaggaaggcatgcgcaagacgatcacagagtttgagcttaaagccgttgacgccgacacggaggccgaatcagtgactttcacaatagtgcaacctccgcgtcacggcaccattgaacgaacctcaaatggacagcactttcacttgacaagtacgttcacaatgaaggacatctaccaaaatagagtgtcttacagtcacgacggtagtaactcattaaaagatcgcttcaccttcactgtttctgatggtactaacccatttttcattatcgaggaagggggaaaagagatcatgaccgcggctccccagccgttccgtgtagacatactgcccgttgatgatggcactccgaggattgtgaccaatttggggctccagtggttagagtatatggatgggaaggcaaccaacttaatcaccaaaaaggagctgttaaccatggaccccgacaccgaggacgctcagctcgtttacgaaattaccacaggccctaagcatggattcgtcgaaaacaagctccagcccggccgtgctgcagcaacctttacacaggaggacgtcaacctggggcttatcagatatgtcctgcataaggaaaagatcagggaaatgatggatagcttccaatttctagttaaggatagtaaaccgaatgtagtgagtgataacgtattccacattcaatggtctctcatctcctttaagtatacctcctataacgtgagtgagaaggcaggatctgtttcggtgaccgtacagcgaacgggcaacctcaatcagtacgcaatcgtgttgtgccggacagagcagggaaccgcttctagttcttctcgcgtttcatcccagcctggccagcaggattacgtggagtacgctgggcaggtccagttcgacgagcgggaggatacaaagtcctgcacgattgtgattaacgacgacgacgttttcgagaacgtggagtcttttacagttgagctgtcaatgcctgcttacgctctcctgggcgaattcacccaggccaaagtgattatcaatgatactgaagacgagccaacattagaattcgacaagaagatttattgggtcaacgagtcagctggatttctgtttgcaccgattgaacgaaagggagacgcaagctctatcgtgagtgcaatttgttacacagttccaaaaagtgcaatgggctcctcactttatgccctggaatcaggaagtgattttaagagccggggaatgagcgccgcttcgagagttatatttggtccaggtgtgactatgtccacctgcgacgtaatgcttattgacgacagtgaatacgaagaagaggaagagttcgaaatcgccctggcagatgcaagtgacaatgcaagaattgggcgggtcgcgacagcaaaggtgttgatatctggcccaaatgacgcctccactgtgagtctaggcaataccgcgtttacagtgtctgaggacgcgggcactgttaagatcccagtgattagacatggcacagacttgagtacttttgcttctgtgtggtgtgcaacgcggccgagcgacccagctagcgctacacccggcgttgactacgtgccctcttcccgaaaagttgaattcggtcctggagttattgagcagtattgtactctgaccattctggatgacacccagtatcctgtgatagaaggactggagacgttcgtggtgtttcttagcagtgctcagggagccgaactgacgaagccatttcaggctgttattgccataaatgatacctttcaagacgtgccgtctatgcagttcgctaaagatctgttgctcgtaaaggaaaaggagggcgtattacacgtgccgattacaagatctggagatctctcctatgaatcctctgtgaggtgctacactcagagccactctgctcaggtgatggaggactttgaagaaagacagaatgcagatagtagtagaattacgtttctgaagggcgataaggtgaagaactgtaccgtgtacatacatgatgactcgatgtttgagccagaagagcaatttcgagtgtacctggggctgccgttaggaaatcactggtctggcgccagaattggtaagaataatatggcaaccataacgatctcgaatgacgaagacgccccgaccattgaattcgaggaggctgcgtaccaagtgagggaacccgccggaccagacgcaatcgcaatattgaacataaaggtgattcgccggggagaccaaaaccggactagtaaggtcagatgttcgacaagggacggaagcgcccaaagcggcgtggactactatccaaaatcccgtgtactcaaattttcaccgggcgttgatcacattttcttcaaggttgagatcttgtctaatgaggaccgagaatggcacgagagcttcagcctggttctgggacctgatgaccccgtggaggcagtgctgggggacgtcaccacagctaccgtcactattctggatcaggaggccgcagggtcactaatcctgcctgcgccaccgatcgtcgtgacactggctgactacgatcatgttgaggaggtgactaaggagggggttaaaaaatcgcccagccctgggtaccccctcgtgtgcgtgactccttgtgatccacactttccacgatacgcagtgatgaaggaaagatgctcagaagccgggattaatcagacctccgtgcaattctcctgggaggttgccgcacccactgatggcaacggcgcaagatctccattcgagactatcacagataatacccctttcacatccgtgaatcacatggttctagacagtatttatttctctcggagatttcacgtacggtgcgtggccaaggccgtggacaaggtcggacacgtgggcacccctctgcggagtaacattgtcaccattggtaccgacagcgccatctgccacactcctgttgtcgccggaacgtctaggggctttcaggcccaatcatttattgccacgctgaagtatctggacgtcaagcataaagagcaccccaacaggattcatatttcggtccaaattcctcaccaggatgggatgctacctttaatctctacaatgcccctccacaaccttcactttctcctcagcgaatctatatacaggcatcagcatgtgtgctccaatctcgtaactacctacgatcttcgagggatttctgaggccggatttctggacgacgtggtgtacgattccacagctctcggccctggctacgacaggccattccaattcgaccccagcgtgagggagccaaaaacaatccaactctataaacacctgaacttgaaatcgtgtgtgtggacctttgacgcctactacgacatgaccgagctcatcgatgtgtgtggcggctcggtcacagccgactttcaggtccgggattccgcccagagctttctcaccgtgcatgttcccttatatgtctcctatatctatgttaccgctccacgcggctgggcaagcctcgagcatcacaccgaaatggagttttctttcttttatgatacagttttgtggcgtacgggtatccagacagatagtgtcctatcagccaggcttcagatcatccgcatctatattcgagaggatggacgcctcgtaatcgaattcaagacacacgctaaattcagagggcagttcgttatggaacatcataccctgccagaagtgaagtcttttgttctaactcctgaccacttaggagggatcgagtttgatctgcagctgctgtggtcagcacagacgttcgatagcccacatcagctgtggagagctacctcctcttataatcggaaggactacagcggggagtataccatataccttatcccttgtacagtacaaccaacacagccctgggtggatccaggcgaaaaaccactcgcctgcacggctcatgcacctgaacgattcctgatcccaatcgcgtttcagcagacaaacaggccagtccctgttgtttattctctaaacacagagtttcagctgtgcaataacgaaaaggtgtttctcatggatccaaatacctccgatatgtcactggcagaaatggattacaagggagcattcagtaaaggacagatcctgtatggtagagtgttatggaatcctgagcagaatctcaacagcgcctacaagctgcagcttgagaaggtttacctctgtactggcaaagacggatatgtgccattcttcgatcctaccgggactatttacaatgaaggaccccagtacggatgtatccaacccaacaagcatctgaaacaccgctttctgctgctagatcggaatcagccggaggtgacagataagtacttccacgatgttcccttcgaggctcactttgccagcgagttgcctgactttcacgtagtttctaatatgcccggcgtggatggctttacacttaaggtggacgccctatacaaggtggaggccggccatcagtggtatctccaggtgatttacataatcggacccgataccatcagcggccctcgtgttcagcgttctttgaccgcaccattgcgaagaaataggcgcgaccttgtggaacccgacggccaactgatcctcgatgattcattgatctatgacaatgagggggatcaggtgaagaatggaacgaacatgaagtcgctaaacctggaaatgcaagagctggcagtggcagcctcccttagccagactggcgctagcataggatcagctctggccgcaatcatgttgcttctgctcgtttttctagtggcctgttttatcaatcggaagtgtcagaaacaaaggaaaaagaagccagccgaggatatcctggaggaataccccttgaataccaaggtcgaggtccctaagaggcacccggacagagtcgaaaagaacgtgaacagacactactgtacagttagaaacgtgaacatactcagcgaacctgaggcagcatacaccttcaaaggcgcgaaggtcaaacgtcttaatcttgaggtcagggtccacaacaatctacaggacggcaccgaagtgtag

SEQ ID NO: 117486 - DNA, 768 bp, synthetic construct
  misc_feature 1..768: note = Description of Artificial Sequence: Synthetic coding sequence
  source 1..768: mol_type = other DNA
gagcggcaaggacagagtcgggcaaggcggcatggtcagtgctgcgaagaatgtgtcagtccagctggatcgtgctcctacgacggagtggtccggtatcaggacgagatgtggaaagggtctgcgtgcgaattttgtatgtgcgatcatggccaggtaacatgtcaaaccggagaatgcgctaaggtagagtgtgcacgtgatgaggagctgatccatctggatggcaagtgctgcccggagtgtattagtcgaaatggctactgtgtgtacgaggagactggcgagtttatgagctccaatgctagcgaagtgaaacgaatccctgagggcgaaaagtgggaggacggaccatgtaaagtctgcgagtgtaggggcgctcaggtgacctgctatgaaccaagctgcccgccctgtcctgtaggcacgttggcccttgaggtgaaagggcagtgctgccctgactgcacttccgttcactgtcatcccgattgtctcacctgtagtcagtctccggaccattgtgatctgtgccaagaccccaccaagcttttgcagaacggctggtgcgtgcactcttgtggactgggattctatcaggctggtagcctctgtttggacgacgggttcagcctgcccgcccccgttctgcatgtgtatcagtgggccggggtccttatcctaccggccagtcccgccgacgccgctcgcgccgtttgcgcctatctgtgggggagactcctcccaagaagtcccttcctttgctag

SEQ ID NO: 117487 - DNA, 840 bp, synthetic construct
  misc_feature 1..840: note = Description of Artificial Sequence: Synthetic coding sequence
  source 1..840: mol_type = other DNA
atggtcctcacaatccacctactgcctagtgaccagcagttgcccgtctttcaggtgaccgcccctaggctggccgtttcacccgggggctctacaagtgttggcctgcaggtcgtggttcgtgacgctgagacagcacccaaagagctgttcttcgagctcagacggcccccacaacatggcgttctgctgaaacatacggctgagttccgtaggcctatggccaccggagataccttcacttacgaagatgtggagaaaaacgctctccagtatatccatgatgggagcagcactcgggaggattccatggaaattagtgtcacagacggtctcacggtgactatgctggaagtgagggtggaagtctctctgagcgaagaccgcgggcctaggctggcagccgggtcatctctgtcaatcacggtcgccagtaagtcaaccgccatcatcaccaggtctcacctggcgtatgtagatgatagctcacccgaccctgagatatggatccagctgaattacttgccgtcatacggcacgttactacggatatccggatccgaagtggaggagctgagcgaggtgtctaactttactatggaggatatcaacaacaagaagattcgttacagcgcagtgttcgaaactgacgggcacctcgtcacggactccttctatttttcagtaagcgacatggatcacaatcatcttgataaccagatttttaccatcatgataacccctgcagaaaacccgccccccgttattgcctttgctgacttaattacggtagatgagggcggcagggccccactgtctttccaccacttttgctactag

SEQ ID NO: 117488 - DNA, 5931 bp, synthetic construct
  misc_feature 1..5931: note = Description of Artificial Sequence: Synthetic coding sequence
  source 1..5931: mol_type = other DNA
atgggcgtcctgaaggtgtggctgggtctggctctcgcgctcgccgagtttgccgtgctgccccatcacagtgagggcgcctgtgtttaccaggattctctcctggcagatgccactatttggaaacccgactcatgccagagctgtcggtgtcatggcgatattgtgatttgcaagccagcagtatgccgcaaccctcagtgcgcgttcgagaaaggcgaagtgttgcaaatagccgcaaatcaatgttgtcctgaatgcgtcctgagaacgccgggttcttgtcatcacgaaaagaaaatccacgaacacggaaccgagtgggcatcaagcccctgttcagtgtgctcatgcaatcacggcgaggtgcgctgcaccccacaaccatgtcctcccctaagctgcggccatcaagaactcgcattcataccagaagggtcgtgttgtccggtttgcgttgggctgggcaaaccttgctcctatgaaggccacgtgtttcaggacggggaagactggaggctttctcggtgcgccaaatgtctttgcagaaatggagttgcccagtgcttcaccgcccagtgtcaacctctgttctgcaaccaagacgagacggtagtgcgtgtgcccgggaagtgctgtccgcagtgttccgctcgtagctgcagcgcagcgggacaggtatacgagcatggcgaacagtggagtgaaaatgcttgtaccacctgtatttgtgataggggtgaagtgcgttgtcacaagcaagcatgtttgccattgcgctgtgggaagggacagtccagggctcgcaggcatgggcagtgctgcgaagagtgcgtgagccctgctggatcttgctcatacgacggggtggttagataccaggatgagatgtggaagggctccgcttgcgaattctgtatgtgcgatcacggacaagtgacatgtcagacaggagaatgtgccaaggtagaatgcgcaagagatgaggagctgattcacctcgacggtaaatgttgccctgaatgtatttcacggaatggttactgtgtctacgaggagacaggagagttcatgagttctaacgccagcgaggtgaagcgcatccctgagggagagaagtgggaagatggaccttgcaaggtgtgcgaatgtcggggggcacaggtaacctgctacgagccttcctgtcctccctgtcctgtggggacattggctttggaagttaaggggcagtgttgtccagactgtacctctgttcactgccaccctgattgccttacttgtagtcaaagtcctgaccactgtgatctgtgccaggaccccactaaactgttgcagaatggatggtgcgtgcatagctgtgggctgggcttttaccaggccggctccctgtgtctggcctgtcagccacagtgctcaacctgcacctcgggactcgaatgttcatcctgtcagccaccattgcttatgcgtcacggccagtgtgtgccaacttgcggcgatggcttttatcaggatcgtcactcatgcgccgtttgccacgaatcctgcgccggctgttggggcccaactgagaaacattgtcttgcatgccgggatcccctacatgtcctgcgagatgggggttgcgagtcctcctgtggaaaggggttctataacagacaggggacctgctcagcatgcgaccaatcatgcgatagttgtgggccatcatctcctaggtgtttgacctgcacggaaaaaaccgtgctgcatgatggcaagtgtatgtctgagtgtcccggtggatactacgctgacgctacaggacggtgcaaggtctgccacaatagctgcgcctcctgttcagggccaaccccttcccactgtaccgcatgttctcctcccaaagcactgagacaaggacactgtctgcctcgctgcggggaagggttctatagcgatcatggggtatgtaaggcttgccactctagctgcctggcttgcatggggcctgcccccagccactgtaccggctgtaagaagcctgaggagggactgcaggtggagcaattatccgatgttggtatcccctctggtgaatgcctggcccagtgtcgcgcgcacttttatctggagtccactggtatctgtgaagcctgccatcaatcctgcttccgatgcgccggcaagtcaccccataactgcacagactgcggtccgtctcatgtgctgcttgatggccagtgcctttcgcagtgtcccgacggctacttccatcaggaggggtcctgcaccgagtgtcacccaacctgcagacaatgccatggtcctttagagagcgactgcatttcatgttatcctcacatctcactgacaaacgggaattgtcgaacctcttgccgagaggaacagttcttgaatctggttgggtattgcgctgattgccaccatctttgccagcactgcgcagccgacctccataatacagggtcgatttgtttgaggtgtcagaatgcccactacttactgttgggtgaccactgtgtgcctgattgcccctcggggtactatgccgagaggggcgcatgtaagaagtgtcattctagttgtcgaacgtgccagggtcggggcccgttctcatgcagtagctgtgacactaacctggtgctttcacatacaggcacatgctccacaacttgcttccccggtcattatttggacgacaaccatgtgtgtcagccatgcaacacacactgcgggagctgcgattctcaggcttcttgtactagctgccgcgaccctaacaaggtgcttctgttcggtgagtgccagtatgaatcttgcgcaccccagtattatctcgacttcagcacaaacacttgcaaagagtgtgattggagctgctctgcctgtagcggcccgcttaaaactgactgtctgcaatgtatggatgggtatgtactacaggatggcgcctgcgtggaacagtgcctgagctccttctatcaggatagtgggctgtgcaaaaactgtgatagctactgtcttcagtgccagggcccacacgaatgtactcgttgtaagggcccattcttgttgctggaggctcaatgcgtccaggagtgcggcaaggggtatttcgccgatcatgcgaagcacaaatgcacagcctgcccccaggggtgcctgcaatgcagccaccgggacaggtgtcacttgtgtgatcacggattcttccttaagagcgggctctgcgtgtataattgcgtgccaggattttctgtccacacaagcaatgaaacctgctctgggaaaattcatactccttctttacatgtgaacggctcacttattttacccataggtagcatcaaaccacttgacttctcgctgctgaacgtgcaggaccaggaagggagggtggaagaccttttattccacgtcgtgtccactcccactaacggacagctcgttctttcccggaatggaaaggaggtacaactggataaggctgggaggttcagctggaaggacgtgaacgagaagaaggtgaggtttgtgcactccaaggagaaactgcgcaaagggtatctgttcctgaaaatttctgaccagcagttcttttctgagccacagctcatcaatattcaggccttctccactcaagctccatacgtgctgcgcaatgaggtattacatatctcgcgaggggaaagagccactataacaacccagatgcttgatattcgggatgatgacaacccccaagatgtggtcatcgaaataatagacccaccccttcacggccaactccttcaaacattgcagagtccagccacacctatttaccagttccagctagatgaactgtcacgtgggctgctgcattatgctcacgacggaagtgacagcacttccgacgtggccgttttgcaggcgaacgacggccactccttccacaacatcctctttcaggttaagaccgttccccagaacgacaggggcttacaattagtcgccaactccatggtttgggtaccggaaggaggaatgttacagattactaatcgaattctgcaagctgaggcacccggagcctctgccgaggagataatatacaagataacacaggattatccccagtttggagaagtcgtcttgttagtgaatatgccagcagatagtcctgcggacgagggtcagcatctccccgacggcaggactgccacgccgaccagtacatttacccagcaggatatcaatgaagggatcgtctggtacaggcactcgggtgcccccgcccagtctgatagctttcggttcgaggtcagctcagcctccaacgctcagaccaggttagaatcccacatgttcaatatagccattctgccgcaaacccccgaagcgccaaaggtcagcctggaggctagcctgcatatgaccgctagggaggacgggctgacggtcatccaaccgcatagtctttcgttcattaactccgaaaaaccctcgggtaaaattgtctacaacatcacgcttccgcttcatcctaatcagggaattatcgagcaccgggaccatcctcacagccctatcagatatttcacgcaggaggacatcaatcagggaaaggtgatgtataggccgccacccgccgcgccccatctgcaggaacttatggccttcagttttgcgggactgcctgagtcagtgaaatttcatttcacggtcagtgacggagagcatactagtccagaaatggtgctcaccattcacctgctgcccagcgaccagcagctcccagtgttccaagtgactgcaccccggttagcagtgagtcctgggggctccactagcgtgggtctgcaggtggtggttcgggatgccgaaacggctcccaaagagctgttcttcgagctacggagacccccacagcacggcgttcttcttaagcataccgccgagtttcgccgccccatggctacgggggatacttttacgtacgaggacgtcgagaagaacgctttgcagtatattcacgacggctccagtacaagggaggatagtatggagatttcggtgacagatggccttacggtgacaatgctcgaggttcgggttgaggtctctctctctgaggatcggggaccccgactggcagcaggaagctccctgtccatcaccgtggccagcaagagcactgcaatcattactcgcagccatctagcctatgtagatgattctagccccgaccctgagatctggattcagctcaattatctgccctcatacggcaccctcctaagaatctcaggcagcgaggtggaggagctgagcgaagtgtctaattttaccatggaggacattaacaacaaaaagatccgatatagcgccgttttcgagactgacggtcacttagttaccgatagcttttattttagcgtgtccgatatggaccacaatcacctggacaaccagattttcactatcatgatcacccccgccgaaaatccacccccggtgatcgcatttgcagatttgatcacagtcgacgagggaggccgagctcctctgagctttcaccatttcttcgcaactgatgatgatgataatctccaacgggacgccataatcaagttgagcgccctgccaaagtacgggtgcatagagaacacgggtacgggagataggttcggtcccgaaacagcgtccgacttggaggccagcttccccatccaggatgtgcttgagaactacatttactactttcaaagtgttcacgagagcatcgaacctactcatgacatctttagcttctacgtgtcagacgggaccagccgttcggagatccactctatcaacatcactatagaggtcaaaacactagaagtagggaaagtcgaacccttgacaactatcttccacacaattcgagagcttagcctgtag

SEQ ID NO: 117489 - DNA, 633 bp, synthetic construct
  misc_feature 1..633: note = Description of Artificial Sequence: Synthetic coding sequence
  source 1..633: mol_type = other DNA
atgtggaccctgggtcgtcgcgctgtcgccgggctcttggcctccccctcccccgcgcaggcccagaccttgactagagtccctcgcccagcggagcttgcacccctgtgtgggcggcgtggcctgcggacggatatagacgccacctgtacacccaggcgtgccagttctaatcagaggggccttaaccagatttggaacgtgaagaagcagtcagtgtacttgatgaaccttagaaagagtggtacactcggacaccccggatcgttagacgagacaacatacgagaggttggctgaagaaactcttgactctcttgcagaattctttgaagacctggcagacaagccatacactttcgaagactatgatgtgtcttttggaagcggagtgctaactgtcaagctggggggcgacctgggaacctatgtaattaataaacagaccccgaacaaacaaatctggctgagcagtccgtcatccggacccaagcgatacgactggactgggaagaactgggtctacagccacgacggcgtgtccctgcatgagcttcttgccgccgagcttacgaaggcactaaagactaagcttgacctgtcatcgttagcatattctggtaaagacgcctag

SEQ ID NO: 117490 - DNA, 516 bp, synthetic construct
  misc_feature 1..516: note = Description of Artificial Sequence: Synthetic coding sequence
  source 1..516: mol_type = other DNA
atgtggacactgggtagacgggctgtggcaggactgctggccagtcctagccccgcgcaggcccagacactcacacgcgtgccgagacctgcagaactcgcccctctgtgtggaagacggggtctgaggactgacatcgacgcgacctgtactccaaggagagcttccagcaatcagaggggtctcaatcagatctggaacgtgaagaagcagtccgtgtacttgatgaatctgaggaagagtggcacactgggacatcctggatctcttgacgagacaacctacgagcgacttgccgaggagacattagactcgcttgccgaatttttcgaggacctggcagataaaccctatacctttgaagactatgatgtctccttcgggagcggtgttctaacagttaagctcggcggtgatctcggaacatatgtgatcaataaacagacccctaacaagcaaatctggctttcttccccctctcgcctgacatggcttttgtggctgttccacccctag

SEQ ID NO: 117491 - DNA, 591 bp, synthetic construct
  misc_feature 1..591: note = Description of Artificial Sequence: Synthetic coding sequence
  source 1..591: mol_type = other DNA
atgtggacccttgggagacgagcagttgctggcttgttagctagtccaagccctgcccaggcgcagacactgacacgtgttccgcgcccagcagaattagctcccctctgcggccgcagagggttgagaaccgatattgatgccacttgcaccccacgccgagcaagttctaatcagaggggactgaatcagatctggaatgtcaagaagcagtcggtttatctaatgaacctgagaaagagcggtacattaggccatcccggaagtctcgacgaaaccacctacgaaaggctcgcagaggaaacactcgacagtctggcggagtttttcgaggaccttgctgataaaccttatacctttgaggactacgatgtaagttttggctctggagtcctgaccgtcaagctcgggggggacctgggaacatacgttattaacaagcagacaccaaataagcagatttggctgagtagcccaagccggtacgtggttgatctttctgtaatgacaggtcttggcaaaactggatgtacgcccaccactgcttgcccatccatgtcctgttggccccaaagttctctgaagccctag

SEQ ID NO: 117492 - DNA, 702 bp, synthetic construct
  misc_feature 1..702: note = Description of Artificial Sequence: Synthetic coding sequence
  source 1..702: mol_type = other DNA
atgccttgccggcgggaggaagaagaagaggctggtgaggaggctgagggcgaagaggaagaagacgactcttttcttctgctgcaacagtctgtcaccctagggagctcaggcgaagttgatcggctggtggctcaaataggcgaaactctccagcttgatgccgcacaggattcaccagcctccccctgtgccccacctggagttcccctcagggccccaggtccactggccgccgctgttccggcagacaaagcgcgacccccagcggtgcccttactgttgcccccggcctccgcggagacagtaggcccagccccaagcggcgcacttcgatgcgctctcggggatcgcggccgcgtgcggggccgggcagccccctactgtgttgcagaggtggctgccggccccagtgcgttgcccgggccttgtcggagaggctggctcagagacgcagtcacgagccgccggctccagcaaagaagatggactcaggccggagcgagggcgggcgacgacgacccacaccggttgctacagcagctggtcctttccggaaatctcatcaaggaggctgtgaggaggctgcagagagccgtggccgccgtggccgccacaggtcctgcttccgcgcccggacccggaggcggcaggtccgggcccgatcgcatagccctgcagccttcgggcagcctgctgtag

SEQ ID NO: 117493 - DNA, 1161 bp, synthetic construct
  misc_feature 1..1161: note = Description of Artificial Sequence: Synthetic coding sequence
  source 1..1161: mol_type = other DNA
atggagggcggactggccggcgagagggcccgcgagtctcccgtggactgcagcgtgagtaagtgttctaaacttgttggagggggggagtctaaccccatgaattacaattcttatatggatgaaaaaaacggccctcctccgccaaatatgactaccaatgagcgcagagtgatagttcccgccgacccgacactgtggactcaggagcatgtcaggcagtggctggagtgggccataaaagaatactctcttatggaaatagacacatcatttttccaaaatatggacggaaaagaactgtgtaaaatgaacaaggaagattttttacgggcaaccactctttacaataccgaggttttactttcacacttgagctacctgcgcgaatcatctttgctggcttacaatactacctcccacacggaccagtcttctcgtctttcggtgaaagaggacccaagttacgactccgtgagacgaggagcctgggggaataacatgaatagcggcttgaataagtcacccccactggggggagctcagactattagtaagaataccgaacaacggccacagccagacccgtaccagatcctgggcccaacatcgtcccgactcgccaacccaggcagcggacagatccaactgtggcagttccttctagagctgcttagcgatagcgccaacgcaagctgtatcacctgggaagggacgaacggcgaatttaagatgacggacccagatgaggtggcgcgaaggtggggagagaggaagtcgaagcctaatatgaactacgataaactgagtcgagcactccggtattattacgataagaatattatgacaaaggtccacggaaaaagatacgcatacaagttcgattttcatggcattgcacaggcccttcagccacaccctacggagtcttccatgtacaagtaccctagtgacatctcctatatgccgtcataccacgctcaccagcagaaggtgaattttgtgcccccccatccgagctccatgcctgtgacttcatcctccttttttggtgctgccagtcagtactggacctcacctaccggcggaatctacccaaatcctaatgtccccaggcacccaaacacccacgttccttcacacctcggttcatattactag

SEQ ID NO: 117494 - DNA, 1260 bp, synthetic construct
  misc_feature 1..1260: note = Description of Artificial Sequence: Synthetic coding sequence
  source 1..1260: mol_type = other DNA
atgacagcctccgggagtccagactacggacagcctcacaagataaatccgctgccgcctcaacaggagtggatcaaccagcccgtccgtgtgaacgtaaagcgcgagtatgaccatatgaatgggtcccgggagtcaccagtggattgcagcgtgtccaagtgcagtaaactcgtgggaggcggcgaaagcaaccccatgaattataacagctacatggacgagaagaacggtccacctcccccgaacatgaccacaaacgaacggcgcgtcattgttcctgcagacccaaccctgtggacacaagagcacgtgagacagtggttggagtgggccatcaaagagtactccctgatggaaatcgacacatccttcttccagaacatggacggcaaagaactgtgcaagatgaacaaagaggattttctgagggccacaacactgtacaatactgaagtgctgctgtcacatctaagttacctcagagaatccagccttttggcttacaatacaacttctcatacggaccagtccagccgtttaagtgtaaaggaagatccctcttacgacagcgttaggcgaggtgcctggggcaacaatatgaattcaggtttaaacaaatccccccccctgggaggggctcagacaatctcaaagaacaccgagcagcgaccccagcctgacccctatcaaattctagggcccacttcatcgcggctggcaaatccagggtctgggcaaatccaattatggcagttcctactggagctcctgtcggattctgcaaacgcttcttgcattacttgggagggaactaatggggaatttaagatgaccgaccccgatgaagtggccagacggtggggtgaaagaaagagcaaacccaatatgaactatgataaactgtcacgcgctctgcggtactactatgacaaaaatataatgacaaaagtgcatggtaaacgatacgcttataagtttgactttcacggtatcgcccaagccttgcagccccacccaactgaatctagtatgtacaagtacccctctgacatctcatacatgccatcctatcacgcacaccagcaaaaggttaactttgtaccgcctcacccctcaagcatgccagtgacctcttcctccttctttggcgcagccagccagtactggacctctccaaccgggggtatataccccaaccccaacgtccctcgtcatccaaacacacatgttccttcacacttaggatcctactactag

SEQ ID NO: 117495 - DNA, 1359 bp, synthetic construct
  misc_feature 1..1359: note = Description of Artificial Sequence: Synthetic coding sequence
  source 1..1359: mol_type = other DNA
atggacgggacaatcaaagaggccctgtctgttgtgtctgatgatcaatcgctattcgacagtgcctatggcgcggccgcccacctgccaaaggccgacatgaccgctagcggttcacctgactatggccaaccccataaaatcaacccactccctccgcagcaagagtggataaatcagccagtccgcgtcaacgtaaaacgggaatacgatcacatgaatgggagcagggagagtcccgtcgattgctcagtgtccaaatgcagcaagcttgtcggggggggggagtctaacccgatgaactacaactcttatatggacgaaaaaaatggacctcctcctcctaatatgaccaccaacgagcggcgtgtgattgtgcccgcagatccaacactttggactcaggagcacgtccgtcagtggctagaatgggctattaaggagtactcactcatggagattgacacatcctttttccagaacatggacgggaaagagctgtgcaagatgaataaggaggacttcctccgcgctaccaccttgtacaacacggaggtgctcctgagccatctgtcctacctccgggagtccagtctgctggcctacaataccacctcccatacagaccaaagtagccgtctgtccgttaaagaagacccaagctacgatagcgttagaaggggggcgtggggcaacaacatgaatagcgggttaaacaaatcacccccgctcggtggcgcccagaccatttcaaaaaatactgagcagaggccgcagcccgacccctatcagatcctcggacccacatctagcaggttggccaatcccggttcaggtcagatccagctgtggcagttcctgctggaacttttgagtgattcggctaacgccagttgcattacatgggaagggactaatggggaattcaaaatgactgaccccgatgaagtggcacgccgatggggcgaacggaagtcaaaacctaatatgaattatgataagctgagccgagcactgaggtactactatgacaagaatatcatgactaaggtccacggcaaacggtacgcatacaaatttgatttccacgggatagcgcaagcattacagccacacccaacagaatctagcatgtacaagtatccaagcgatattagctatatgcccagttaccacgcccaccagcagaaggtcaattttgtgcccccccacccctcgtctatgcctgtgacaagctcctcctttttcggggctgccagccagtactggacctcacccaccggagggatctaccctaatccaaacgtgccacggcaccctaacacccatgtaccatcccatcttggtagctattactag

SEQ ID NO: 117496 - DNA, 780 bp, synthetic construct
  misc_feature 1..780: note = Description of Artificial Sequence: Synthetic coding sequence
  source 1..780: mol_type = other DNA
atggatcctgggtctctcctggcgtacaacactacatcacataccgaccaaagctctaggctcagcgttaaggaggatccttcatatgactccgtgaggcgtggtgcgtggggcaataacatgaattccggattgaacaagtctccaccgctgggcggcgcccagacaataagcaagaacactgaacaacgtccacagcccgatccctaccaaattctgggcccaaccagcagtcgactcgcgaatcctggcagcggccagattcagctgtggcaattcctgctcgaattgttgtcagacagcgctaacgcaagttgtattacctgggaaggcaccaatggggagttcaagatgacagaccccgatgaggtggcacgtcggtggggtgagcggaagtctaagccaaatatgaactacgacaagcttagcagagccctgcgctattactacgataagaatatcatgactaaagtgcacggtaaacgatatgcctacaaattcgattttcatggcatcgcgcaggcacttcagccccatccaactgagtccagcatgtacaaatacccctcagatattagctatatgccaagctaccatgctcaccagcagaaggtaaattttgtccccccacatcctagctcaatgcccgtaacttccagctccttctttggcgccgctagtcagtattggacctcccccaccgggggcatctaccctaatcctaatgtgcctcgtcacccaaacacccacgtcccaagccatctcggctcctactactag

SEQ ID NO: 117497 - DNA, 1944 bp, synthetic construct
  misc_feature 1..1944: note = Description of Artificial Sequence: Synthetic coding sequence
  source 1..1944: mol_type = other DNA
atggccgaggaagaggctccgaagaaaagccgtgccgcaggaggaggcgccagttgggagctctgtgcaggcgcactgagcgcccgactggcagaagaagggtccggagatgctgggggcaggagaagacccccagtggatcctcggcgtctcgcgcggcagctactactattgctttggctgctggaggctccactgctcttaggcgtgcgggctcaggcggcgggccaaggacccggccaaggcccaggccccggacagcagccaccaccacctcctcagcagcagcagtctggtcaacaatacaacggagagcggggcataagtgtgccagatcacggttattgtcaaccaatctccatacctctgtgcacagatattgcttataaccagactatcatgccaaacctcttaggccatacaaatcaggaagatgcaggcttggaggtgcaccagttttaccccctggttaaggtgcagtgttcagcggaactgaaattctttttgtgctctatgtacgcccccgtgtgcaccgtgctggaacaagctctgccgccgtgcagatctctatgtgagagggcaagacagggctgcgaagcgctcatgaacaaatttggctttcagtggcccgatactctgaaatgcgagaagttcccagtccatggagccggagagctttgcgtgggccagaatactagcgataaggggaccccgactcccagcctgttaccagagttttggaccagtaaccctcagcacggcggggggggacaccgggggggatttcccggaggcgccggcgcatcagaaagaggcaagttctcttgtcctagggcgcttaaggtgccttcttacctgaactatcacttcctaggcgagaaagactgcggcgctccttgcgaacccactaaagtttacggacttatgtatttcgggcctgaggagctgaggttcagccggacgtggatcgggatttggtctgtgctgtgctgcgcctctacactctttactgttctgacataccttgtggatatgcggcggttttcctaccccgagcgccccatcatcttcctctccggctgttacaccgcagtcgcagtcgcatatattgcaggattccttttggaggacagagtggtgtgcaacgacaagttcgcagaagatggcgctaggactgtcgcccaggggacgaagaaagagggctgcactattctgtttatgatgttgtacttcttcagtatggctagctctatttggtgggtcatcctgagtctgacgtggttcttggccgcagggatgaaatggggccatgaggctattgaagctaacagccagtacttccacctggccgcctgggctgtgcctgctattaagacaatcactattttggcccttggacaggtggacggtgatgtgctgtccggtgtctgtttcgtaggccttaataatgttgatgcactgaggggatttgtcctcgctcctttgttcgtctacctcttcattggaacctctttcttgctggccggattcgtgagtctgttccggatccggacaataatgaagcacgacggtaccaagaccgagaaactagaaaagctgatggtgaggatcggggtgttctccgtcctctacactgtccctgccaccattgtgatcgcgtgctacttctacgagcaggcatttcgggatcaatgggagcggtcctgggttgctcagtcatgcaagtcttacgctattccttgccctcacctgcaggctggcgggggtgcacccccccatcccccaatgtctccagactttacggtgtttatgatcaaatatctgatgaccttaattgtcggaatcacaagtggattctggatttggtccggaaagaccctcaacagttggcgtaagttctatactcggcttactaactccaagcaaggagaaacaacagtgtag

SEQ ID NO: 117498 - DNA, 1284 bp, synthetic construct
  misc_feature 1..1284: note = Description of Artificial Sequence: Synthetic coding sequence
  source 1..1284: mol_type = other DNA
atggaggcgatggctgcctctacatctttacccgatcctggtgatttcgataggaatgtcccacggatctgcggagtgtgcggagacagagccacaggattccactttaatgctatgacatgcgagggctgtaagggatttttccgccggtctatgaagcgcaaggctctgttcacatgcccttttaacggagactgcaggataacgaaagataatcgcagacattgtcaggcttgcagactgaagagatgtgtcgacattggcatgatgaaggaatttatcctgaccgatgaagaagtgcagcgcaagagagagatgatcttaaaacgaaaagaggaggaagccctcaaggatagccttagacctaagctgagcgaagaacaacagcgcatcatagctattcttctggacgcccatcataaaacttacgaccccacatattccgacttctgccagtttagacctccagtacgggttaacgacggcggcggtagtcatccctcccgccccaatagccgccacaccccgagcttctcaggagactccagctcctcatgttcagaccattgcatcacctcaagcgatatgatggattcgagctcattctctaacctagacctaagcgaggaggattccgacgatccctccgtaacgttggaactctctcagctctccatgctcccgcatctcgccgaccttgtttcctactcgatccagaaagttatcggtttcgcaaaaatgatccctgggttcagagaccttacctcagaggaccagattgttctgctcaagtccagtgcgattgaggttatcatgctccgatccaacgagagtttcacgatggatgacatgagttggacgtgcggaaaccaggactacaagtaccgggtgtcggacgtgactaaggcggggcattcacttgagttaatcgagccattaatcaagttccaggtgggcctgaaaaagttgaacctgcacgaggaagagcacgtcttgctgatggccatttgcatcgtgtccccggataggcctggggtccaggacgccgctttgatcgaggcaatacaagatcgactgtccaacacgttgcagacatacattcgatgtaggcatcctcccccaggctcacatcttctatatgccaaaatgattcaaaaactcgcggatttgagatctctgaacgaggaacattccaagcaatataggtgtctctcattccagcccgagtgtagtatgaagctcactccgctcgtgcttgaggtcttcggaaatgagatttcctag

SEQ ID NO: 117499 - DNA, 1365 bp, synthetic construct
  misc_feature 1..1365: note = Description of Artificial Sequence: Synthetic coding sequence
  source 1..1365: mol_type = other DNA
atgcctgctcaccgggaccccgacgtgcaggggcatagactacagcacgacagttacgcccagcccgacggaccaagggagccagctagaggcagccacccagtcgcgagggtacgtgctgccggaggagtgagactccctcgcccgccccccctgctgcccgtacttgcagttcgagcagatgtgcatagggctggcctgtaccctcatcccagattgcctggccacgttcgagccggacccgcgcaggttctgcccgactacggcgccgtgcagctgcaggtcgcccggctccctgggctgccggagaccccccaacaggaaaggcctcagttgcccgtacacggaggggcacagcagcgcctcgggcgagcacatcctggcctgggccctgtccccgccgctgtgccagcagctgctgctccccagcgagctggcgcgccagcagaggggcggggacctcgtgcgcgccgattacggcagcccggccaggtaccacccagaggggaagagagagtggtgcgcgctgccctgcacgcccgccgaggtagagttctggaaccgcgtggccaggctctgcgatcaggactcgctggccacttaggcggcgcagtgcttctgctgcagcggcttcacagggcccacctcccacacagacccgggcctcttcctctgccgcgcgccccccaccatctgcccctgcacgtgcttctccgactccttagaggcctcccgcatcctccactccggagaaggcgcgaacacagactccgcccaggtcaaaggcccgccctctgccaccccggaggaacaggcgaacatagactgcacgcaggtctgcccgggccactgcttctgaggcatggacaactagcagtggtgggtgggccacacgcccatttagtccctgggaggcgccaggaggtcggtcccagaggccacaggagccagcagcagctgctccctcccggctccctgggtcaccccgggggagaagaccaccccgaccccggacacgcccagggtggcggcggcagggctcaccgcgggttactccgcggacagcacggtcgtcagagagctcatcgcttgcgagcccacagtcccgggttactgcccggtcaccggcatgtgctccatccactgggtttgcgaggccctgttcctcacccggagggcgacgaggatggaaggcgggagcacggacaggccggggaagcgcacggggcatacagggcacttctgtgcgccgtgcacagggccgggcatctttgcgacaggctactcctccttcggaccccccaacatggacttctcgaggatcccggaggagcggcacaggtccaaaacgagcagccagattag

SEQ ID NO: 117500 - DNA, 1698 bp, synthetic construct
  misc_feature 1..1698: note = Description of Artificial Sequence: Synthetic coding sequence
  source 1..1698: mol_type = other DNA
atgcggcccaggtcggcacttccgcgtctccttctgccattgctgctgctgcctgcagccgggcctgcacagttccacggagaaaagggtatcagtatacctgatcatgggttctgtcaacccatcagcatccccctgtgtaccgacattgcttataatcagacgattatgccaaatctgctgggtcatacgaatcaagaggacgccgggctagaagtacatcagttctaccccttggtgaaagttcaatgtagtccggagctgcgcttcttcctgtgttctatgtatgcgccagtctgcacagtgctggagcaagccattccaccgtgtcgcagtatttgcgaacgagcgcggcaaggatgtgaggccctcatgaataaatttgggtttcagtggcccgagcgcctaagatgcgagcactttccgaggcacggcgcagagcagatttgtgttggacagaatcactccgaggacggagcccctgccctgttaacgaccgcaccaccccccggattgcagcccggagccggaggcacacccggaggacccggcggtggcggcgcgccaccgcggtacgctacactggagcaccctttccactgcccacgcgttcttaaagtaccgtcctacttgtcctataagttcctcggcgaaagagactgcgccgccccatgcgagccagccaggcctgacgggagtatgtttttcagccaagaggaaactaggtttgcccggctgtggattcttacatggtccgtgttatgttgtgctagcacattttttactgtgacgacttatctcgttgatatgcagaggttccggtaccccgagcgccccatcatattcctctcaggctgttacaccatggtgtctgtcgcctatatagcgggcttcgtccttcaagagcgtgttgtttgcaacgagcgtttttccgaagacggatataggaccgtcgttcaggggacaaagaaggagggatgtaccatcctatttatgatgctttacttttttagtatggcatcttctatttggtgggttatcctgtcactgacatggtttctagcagccggcatgaagtgggggcacgaggccatcgaggcaaattcacaatattttcacctagccgcctgggccgtgcccgcagtgaaaactatcaccattctggctatgggacagattgatggcgatcttcttagcggcgtgtgttttgttggcctaaacagcctcgatcctttaagaggtttcgtcctggctcccctgtttgtctatctctttattggcacgtcattcctgttggctgggttcgtgtccttgttcagaatccgcaccatcatgaaacacgatggtaccaaaactgagaaattagaacgactgatggtccggattggtgtattttcagtactttacacagttcccgccacgattgtgatagcatgttatttctacgagcaggccttcagagaacactgggagagatcctgggtgagccagcattgcaaatccttggcaattccctgccccgctcattatacccccagaatgtctcctgatttcaccgtgtatatgattaagtacctcatgacactgattgtgggaataacctccgggttttggatctggtcaggtaagacactgcattcctggagaaaattttacacacgacttacgaatagcaggcatggcgaaaccacagtgtag

SEQ ID NO: 117501 - DNA, 1926 bp, synthetic construct
  misc_feature 1..1926: note = Description of Artificial Sequence: Synthetic coding sequence
  source 1..1926: mol_type = other DNA
gcacggggggtctcgggctgtagtgtaaggccccgccaggcgagtggccaggcccacaggcctctgccacggcccgcaagtcccaccctaaggcctagggtaaaattcgcaaaaagaagaggacgaagacagcctcagaggggtggcggcggagaggaagcccagtccccaggctgggggagaggacgcggcggacggcaaggcgctggctggggggcagcggccagcatgcgccccaggtcagctctcccccgattgctccttccccttcttctcctgccggcagcaggccctgcccagttccacggggagaagggaatcagtatccccgaccatgggttttgccagccgatatccatacctctgtgtaccgatatagcctacaatcagactattatgcccaatctcctggggcacacaaaccaggaagatgctggcctggaagtacatcaattttacccactggtcaaagttcagtgctcccccgagctgagatttttcctctgctccatgtatgcgccggtgtgtactgtcctggagcaggctatcccaccctgtaggagtatctgcgagcgcgcacgtcaggggtgcgaagcacttatgaacaaattcggatttcagtggccagaacgtctccggtgcgagcatttccccaggcatggggccgagcagatatgtgtcgggcagaatcactccgaagatggcgctcccgccctgcttacgacagcccctcctccaggactgcaaccaggagcgggcggaacacctgggggcccaggcggtggaggtgctccgcctcgctacgctaccctggagcacccttttcactgccctagggtgctaaaggtgccctcttatctgtcctataagtttctgggcgagcgtgactgtgctgctccgtgcgagcctgcaaggcctgatgggtcaatgtttttctctcaagaggaaacccgtttcgctcgcctttggattctcacatggtcagtcctgtgttgcgcatcaacattctttactgtaaccacatacctcgtcgatatgcaacgctttaggtaccctgagcgacctatcatattcttatctggatgctatacaatggtgtccgtcgcctacattgctgggttcgtgctgcaagaaagagtggtctgcaatgaacgcttcagcgaggacggataccgaacagtcgtgcagggtacaaagaaagagggctgcaccattctgttcatgatgttgtattttttcagcatggctagttccatttggtgggtgattctgtctcttacctggtttctggctgctggtatgaaatgggggcacgaggcaatcgaagcaaattctcagtacttccacctggcggcatgggcagttcccgcagtcaaaacaattactatcctggcaatgggacagatcgatggggacctcctaagcggggtctgtttcgtcgggttgaattcccttgatcctctacgcggttttgtcctcgcccctctgtttgtgtatttgttcatcgggacctcttttcttcttgccgggttcgtcagcctgtttcgaatccggactattatgaagcatgacggcactaagactgaaaaattggagagactaatggtgagaatcggtgtgttttccgtgctctacacggtgccagctactattgtgatcgcctgttatttttacgaacaagcattcagggaacattgggaaagatcctgggtatcccagcattgcaaatcgctggccattccctgtcctgcccactatacacccagaatgagccccgatttcaccgtctacatgattaagtatctgatgaccctcatcgtaggaatcaccagcgggttttggatctggagtgggaagacacttcacagttggaggaagttttacacacgtttaacaaacagtcgccatggagagaccaccgtttag

SEQ ID NO: 117502 - DNA, 2001 bp, synthetic construct
  misc_feature 1..2001: note = Description of Artificial Sequence: Synthetic coding sequence
  source 1..2001: mol_type = other DNA
atggccatgacctggattgtgttctctttgtggccattgactgtgtttatgggccacataggcgggcatagccttttttcatgtgagcctatcaccttgaggatgtgccaagaccttccttacaacaccactttcatgcctaatctgctgaaccattatgatcagcaaaccgcggccctggctatggagccattccatcccatggttaatctcgactgtagcagggacttccggccatttctttgtgctttgtacgcgcccatctgtatggagtacggcagggtgaccctgccttgtcggagactctgccagagggcatactctgagtgcagcaaactcatggagatgtttggagtaccttggcccgaagatatggagtgctcacggttccccgattgcgatgagccttaccctcgattggttgacttaaacctggctggagagccgactgagggagcccctgttgctgtgcaacgcgactacgggttctggtgtcctcgagagctcaagatcgaccccgacctaggctactcctttttgcacgtaagggattgcagcccaccgtgccctaatatgtatttccgacgcgaagagctcagttttgcacgctactttattggcttaataagcatcatttgcctgtctgccactttgttcaccttcctgacctttttgatagatgtcactcgatttagatatcccgagcggcccataatattctacgccgtatgttatatgatggtgtctctgatcttttttattgggttcctccttgaggatcgagtggcttgtaacgcaagcattcccgctcagtacaaagcgagtactgtaacacagggttcccacaacaaagcgtgcaccatgttattcatgattctttacttctttaccatggctggttctgtgtggtgggtgattcttacaattacttggttcctggccgcggtgcccaagtgggggtctgaggcaatagagaaaaaagctctgctgttccatgcctcagcctggggaatcccaggaacgctgacaattattctgcttgccatgaataaaattgagggcgacaatatctcaggtgtctgcttcgtgggtctgtacgatgtggacgcccttcggtatttcgtgctggccccgctctgcctttatgtggtcgttggtgtttcattgttactggcaggcatcatctctcttaatagagtgaggatcgagataccactagagaaggagaaccaagacaagctggtgaaattcatgattcgaatcggagtgttctcaatcctgtatttagtacccctcctggttgtcattgggtgttacttctacgaacaggcttatcgcggcatttgggaaaccacttggatacaggagaggtgtcgcgaataccacatcccttgtccttatcaggtgactcagatgtcaaggccagacctgattctcttcctgatgaagtacctgatggcattgatcgttggcattcctagcgtattctgggtcggttctaagaagacatgcttcgaatgggcaagcttcttccacggaaggcggaaaaaggaaattgtgaatgagtcacgccaagtgctgcaggagccggattttgcccaatccttactccgcgacccaaacacccccatcattaggaaatctcgagggacaagcacccaaggcacatctacacacgcttcttctacccaattagccatggtggacgatcaaagatctaaagctgggtcaatacattccaaggtgtcgagctatcatggcagtcttcacaggtcacgggatggccggtacaccccctgttcttacagagggatggaagaaaggctgccgcatgggagcatgagtcgccttaccgaccacagtcgccatagttctagtcaccgcctgaatgagcaatctaggcattcctccatcagagacttatcaaacaatcctatgacccacatcacacacggcacgagcatgaacagagtaattgaggaggatggcacgtcagcttag

SEQ ID NO: 117503 - DNA, 108 bp, synthetic construct
  misc_feature 1..108: note = Description of Artificial Sequence: Synthetic coding sequence
  source 1..108: mol_type = other DNA
atggctatgacatggattgtttttagtctgtggccactgaccgtttttatggggcacatagggggacatagtctgttttcctgcgagccaattaccctccggatgtag

SEQ ID NO: 117504 - DNA, 2001 bp, synthetic construct
  misc_feature 1..2001: note = Description of Artificial Sequence: Synthetic coding sequence
  source 1..2001: mol_type = other DNA
atggcaatgacatggatagtgttctccctatggcctctgacagtgttcatgggtcatattggtggccactctttattcagctgtgagcccatcacactgcgtatgtgtcaggacttaccctataataccactttcatgcctaatctgttgaaccactatgaccagcagaccgccgccctggctatggagccatttcaccctatggtaaatctcgactgctccagagacttccgcccatttttgtgcgccctgtacgctccaatttgtatggaatacggacgcgtaacactgccctgccgcagactctgccaaagagcttattccgagtgctctaagctcatggaaatgttcggcgttccttggccggaggatatggaatgtagccgcttccccgactgtgatgaaccctacccaagactggtcgacctcaacctggccggggagcccaccgagggggccccggtggccgttcaacgcgactacgggttttggtgtccccgggaattaaaaatcgatcccgacctaggatactcctttctccacgttcgcgattgcagccccccttgcccgaacatgtacttcaggcgggaggaattatcctttgcccggtacttcatcgggttaatttctatcatatgcttgagtgcaactcttttcacatttcttaccttcttaatcgatgtcacacgtttcaggtatcctgaaagaccaataatcttttatgccgtgtgttacatgatggtgagcctgatcttctttattgggtttctactggaagaccgagttgcgtgcaacgcttctataccagcacagtacaaagccagcacagtgacacaaggcagtcacaacaaagcgtgcaccatgttgttcatgatactgtacttcttcaccatggccgggtctgtctggtgggtgatccttaccatcacatggttcctggctgctgtgcccaaatgggggtctgaggctattgaaaagaaggccctgctgttccatgcctccgcgtggggaattccagggacacttactattattcttcttgcgatgaacaaaatcgagggggataacatttcaggcgtgtgcttcgtggggctctatgatgtagacgctctgagatactttgtccttgccccgttgtgcttgtacgtggtggtgggcgtgagcttacttctggctgggattatcagcctgaatcgcgtccggatcgaaattccattagaaaaggaaaaccaagataagctcgtcaagtttatgatcagaatcggtgtatttagtatactatacttggtccccttgctcgtggttattgggtgttatttttacgagcaggcctaccgggggatctgggagacaacgtggatccaggaacgttgtcgcgaataccacattccatgcccatatcaggtgactcaaatgagccgccccgatttaatcttgttcctgatgaaatatctcatggccctgatcgtgggaatcccttcagtgttctgggtaggaagcaagaaaacctgcttcgaatgggcctcgttctttcatggcaggcggaagaaggaaattgtgaacgaaagtaggcaagtgctgcaggagcccgacttcgcccagtctctcctgagggaccccaacacccctattattcggaagtctagagggacctcaactcaaggcacaagtactcacgccagctctacccagcttgcgatggtcgacgaccagcgcagtaaagcgggctctatacatagcaaggtgagtagctatcacgggtctttgcatcgcagccgggatggaagatacacaccgtgctcttataggggaatggaagagaggcttcctcacggaagtatgagccgacttactgatcattcaagacattcctcatctcaccggctcaatgagcagtcgcggcactcctcaattagggatctttccaacaaccctatgactcacatcacacatgggacatctatgaacagagtaatcgaggaggacggtacctccgcttag

SEQ ID NO: 117505 - DNA, 1614 bp, synthetic construct
  misc_feature 1..1614: note = Description of Artificial Sequence: Synthetic coding sequence
  source 1..1614: mol_type = other DNA
atggcttggaggggcgctggcccctcggtgcctggggctccaggaggcgtcgggctcagtcttggtctactgctgcagctgctacttctgcttggtcccgcaagggggtttggcgacgaggaagagagaaggtgcgaccctatcagaatttctatgtgccagaatttaggatataacgttactaaaatgcctaacctggtgggacacgaactacaaacagatgccgaactgcagctaacaacttttactcccctgatccagtacggatgttcgagtcagttacagttcttcttgtgtagtgtgtacgtgccaatgtgtacggaaaagatcaatatccctatcggcccctgtgggggaatgtgcctgtctgtgaagcggagatgcgagccagtcctaaaggaatttggtttcgcctggcctgaatccctaaattgttcaaaatttccccctcagaatgaccataaccacatgtgtatggagggtccaggcgacgaggaagttcccctccctcataaaaccccaatccagccaggagaggaatgtcactctgtcggcactaattctgatcaatacatttgggtgaagcgttcattaaactgcgtcttgaagtgcggatacgatgctgggctgtacagcaggtctgcgaaggaattcactgacatctggatggctgtttgggctagcttgtgctttatctccaccgcctttactgtgcttaccttcctgatagatagctctaggttttcttatcctgagagaccaatcatcttcctctctatgtgttacaacatttattctattgcatatatcgtgagacttactgtaggacgcgagcgtatttcttgtgatttcgaggaagcggctgaaccagtgctcattcaggagggcctcaagaataccggctgtgccatcatttttctcctgatgtactttttcgggatggcgtcgtctatttggtgggtcattctgacccttacttggtttctcgccgccggactgaagtggggacatgaagccatcgagatgcactctagttactttcatattgctgcatgggccatccctgccgtgaagacgatcgtcattctgatcatgagattggttgacgccgacgagcttactggactgtgctatgtgggaaaccaaaatctcgacgctcttacaggcttcgtcgttgctcctttgtttacctatctggtcatcgggactctcttcatcgctgccggtcttgtggctttattcaagattcgatcgaatctacagaaagacgggaccaagactgacaaattagagaggttaatggtgaaaattggggtcttttccgtgctgtacaccgtgcccgctacatgcgtgatcgcctgttatttctacgaaatctccaattgggctctgtttcgctactcagccgatgattcgaacatggctgttgagatgctgaagatttttatgagtctccttgtggggattactagcggaatgtggatttggtctgctaagaccctgcacacatggcagaagtgcagcaataggctcgtgaacagcggcaaggtcaagcgcgagaaaagaggcaatggctgggtaaaacctggcaaaggttccgaaacagtggtatag

SEQ ID NO: 117506 - DNA, 2121 bp, synthetic construct
  misc_feature 1..2121: note = Description of Artificial Sequence: Synthetic coding sequence
  source 1..2121: mol_type = other DNA
atggagatgtttacctttctgctgacgtgcatatttctacctctgctgagaggacactccctgtttacatgcgaaccgatcaccgtaccaagatgcatgaagatggcgtacaacatgacattttttcctaaccttatgggccactacgaccagtccatagccgctgtcgaaatggaacattttctcccattagctaacctggagtgcagtccgaatattgaaacattcctgtgtaaggcctttgtccctacctgcattgagcagatacatgtggtacctccatgtcggaaactatgtgagaaggtgtattctgactgcaaaaagctcatcgatacattcggcataaggtggccagaggagctggagtgcgaccgacttcagtactgcgatgagaccgtgcctgttaccttcgatcctcacacagaatttctcgggccgcagaagaagacagaacaagttcagcgagatatcggattctggtgtccccgccatctcaagacttccggcggtcaggggtataaatttctaggcatagaccagtgtgcacctccttgccctaatatgtattttaagagcgacgaactcgagttcgcgaagtcatttataggcactgtgtccatcttctgtttgtgtgcaactcttttcaccttcttgacattcctgatagacgtccgtcgcttccgctaccctgagcggcctataatctactacagtgtgtgttacagtatcgtttcactgatgtactttatagggtttttactcggcgatagcaccgcctgcaacaaggccgacgagaagttggagctcggagatacagtcgtattagggtcccaaaataaagcttgcaccgtcctattcatgctcttatattttttcacaatggccggcacagtgtggtgggttatattgaccatcacttggttcctggccgccggccggaagtggtcatgtgaggccattgaacagaaggccgtgtggttccatgctgttgcgtgggggactccgggcttcttgaccgtcatgctattagcaatgaacaaagttgaaggcgataacataagtggtgtgtgctttgtgggcctctacgaccttgatgctagtaggtacttcgtgcttctacccctgtgtctctgcgtgttcgtcggtctgagtcttcttctggccggaattatctctcttaatcatgtgcggcaggtaatccagcatgacggacggaaccaggagaaactcaagaagttcatgatcagaatcggagtgttcagcggcctgtaccttgtccctctggtaactttgttagggtgttacgtatatgaacaggtgaataggattacctgggagatcacttgggtgtccgaccattgtcgtcagtaccacatcccatgcccgtaccaggccaaggccaaggcacgccctgagctggccttgtttatgataaagtatttgatgacactgatcgtcggtatctcagcagtcttttgggttggctcgaagaaaacttgtacggagtgggctgggttctttaagcggaacagaaagcgcgaccctatatccgaaagcaggcgagtgctccaggagtcatgcgaattcttcctgaaacacaattccaaagtcaaacacaagaaaaaacactacaagccttcatcccacaaactgaaagtgatctcaaagtcaatgggcacatcaaccggcgcgactgctaatcacggaacgtctgctgtggcaattacttctcatgactacctgggccaggaaaccctgacggagattcagaccagccccgagactagtatgagagaagtcaaggctgatggcgctagtactccccgcttacgggaacaagattgtggtgagcctgcctctccagcggcaagcattagtagattgagcggggaacaggtagacgggaaagggcaggctggcagcgtcagcgagtctgctagatcagaaggacggatatctccaaagtcagatatcacagacaccggtctagcgcaatctaacaatctacaggtccccagcagcagcgagccaagtagtcttaagggctccacaagcctcctggtgcacccagtgtctggggtgaggaaagagcaaggtggcggttgtcatagtgatacatag

SEQ ID NO: 117507 - DNA, 2121 bp, synthetic construct
  misc_feature 1..2121: note = Description of Artificial Sequence: Synthetic coding sequence
  source 1..2121: mol_type = other DNA
atggaaatgttcacattcttactcacctgtatcttcctcccacttctgcgtgggcactcgctgtttacctgcgagcccattacagtaccacgctgcatgaagatggcctacaacatgaccttcttccccaatctgatgggtcattatgaccagtcaattgctgccgtggagatggagcattttcttccccttgctaacctcgagtgttctcccaatatcgagaccttcttgtgcaaggcctttgtcccaacttgcatagaacagatccacgtcgtacccccatgccgaaaactgtgcgagaaggtctactcagactgcaagaagctgatcgatacctttggaattcgatggcccgaggaactggaatgtgatcgattgcaatattgcgacgaaacggttcccgtgacgttcgaccctcatactgagttcttagggccccagaagaagaccgaacaggtgcagcgggatatcggtttttggtgtccccgacatttaaaaaccagtggcgggcagggatacaagtttctcggcatagatcaatgtgcccctccctgtcctaacatgtacttcaaatcagatgagcttgagtttgccaagtcattcattggcacagtgagtatattctgtctttgcgcaacccttttcactttccttactttcctcatcgacgtccgcagatttcgctatcctgagcggcctattatctactatagcgtgtgctacagcattgtctcactcatgtacttcatagggtttctgctcggcgacagtacagcctgtaataaagctgatgagaaactcgagctcggagatacagttgtcctgggttcacagaataaggcttgcactgtcttgtttatgctcttatatttctttaccatggctggcaccgtgtggtgggtgatcctaacaattacttggtttctcgctgctggaagaaagtggtcatgtgaagccatcgagcagaaggcagtgtggttccacgcagtcgcatggggaacacccggttttctgacggtcatgctgctggctatgaataaggtcgagggcgacaacatctccggagtctgctttgtgggtctatatgatctcgatgcctctcggtacttcgttcttctgccgctctgcttgtgcgtgttcgtgggcctctctcttctgttagctgggatcatttccttaaaccatgtacgacaggtgatccagcacgacggtagaaaccaggagaaactcaagaagttcatgatccgcataggagtgttctccgggctgtaccttgtgcccttggtaaccttattggggtgttatgtctacgagcaggtaaatagaatcacttgggagatcacttgggtcagtgatcactgcagacagtatcatattccatgtccatatcaggccaaggccaaagctagacccgagttagccctttttatgattaaatatctgatgacccttatcgtgggaatatctgcagtgttctgggtggggtccaagaagacgtgtaccgagtgggccgggttcttcaaaaggaatcgaaagcgcgatcctatttcagagagtaggcgagtgctgcaggagtcgtgtgagttcttcctgaaacacaacagcaaggtgaagcataaaaagaaacactacaaaccttcttcccacaagttgaaagtcattagcaagtcgatgggcacctcaaccggcgccacagccaaccatgggacaagtgctgttgcaattacttcccatgattacctcggacaggagacgctgacggagattcaaaccagcccagagacctctatgagagaagtgaaggcagatggagctagtacaccccggcttagagagcaggactgtggggaaccagcatctcccgcggcatccatttcgagactcagcggcgaacaagttgatggaaagggacaagcgggttcagtgtcggagtctgctcgaagcgaggggcgcatttcccctaagagcgacatcactgacactggcctcgcacagtcaaacaatcttcaagtaccttcctcgtccgaaccttcctcactcaagggttcaacatcactgcttgtccaccccgtgtccggagtccgaaaagagcagggtgggggttgtcattctgatacatag

SEQ ID NO: 117508 - DNA, 2025 bp, synthetic construct
  misc_feature 1..2025: note = Description of Artificial Sequence: Synthetic coding sequence
  source 1..2025: mol_type = other DNA
atgaaaatggcatacaacatgacatttttccccaatttaatgggccactacgatcaaagcatcgccgcagtagagatggaacattttctccctttggcaaacttggagtgttctcccaacattgagactttcctttgcaaggcctttgtgcctacatgcatagaacagattcatgtggtcccgccttgcaggaagctctgtgaaaaagtgtacagtgactgcaagaaactcattgacactttcggcatccggtggccggaggaactggagtgtgacaggcttcagtactgcgatgaaacagtgcctgtgaccttcgacccccatacggagtttctggggcctcagaagaagaccgagcaggtgcaacgcgacattggattctggtgccctagacacctgaaaacaagtggcggccagggctacaaatttcttggcatagatcaatgcgcccccccctgtcctaacatgtatttcaagagtgacgagctcgagtttgccaaatcttttattggcaccgtcagcattttctgcctgtgtgccactctattcaccttcctgacctttctgatagatgttaggaggtttcgataccctgagcggcccatcatatattacagcgtgtgctactccattgtttcactcatgtattttattgggttcttgctgggcgacagtactgcttgtaacaaagccgacgagaagttggagctcggggatactgtcgtattgggaagtcaaaataaggcgtgtacagtattgtttatgttgctgtactttttcacaatggcaggcaccgtctggtgggtgattctgactattacttggtttctggcagctgggaggaaatggtcctgcgaggccattgagcaaaaagccgtttggtttcacgcagtagcatggggcactccagggtttttgaccgtgatgcttctagccatgaacaaggtggaaggcgataacatctctggcgtgtgtttcgtgggtctttacgatctggatgcctcgaggtactttgtgcttctcccgctgtgcctctgcgtctttgtgggcttgagtctcctccttgcagggatcataagtctgaaccatgttaggcaagtcatccagcatgacggccgcaatcaggaaaaacttaaaaaattcatgatacggatcggcgtatttagtggtctgtacctcgtccctctggttaccctgttggggtgctatgtctacgagcaggtgaataggataacatgggaaataacatgggtctctgatcattgtcggcagtaccacataccttgcccctatcaagcaaaagccaaagccaggccagaacttgccctttttatgatcaagtacctgatgacactgatcgtgggtatctccgccgttttttgggttggaagcaagaagacttgtacagagtgggccggattcttcaaaagaaatcggaaacgcgatcctatctcggagtccagacgggtactccaagaatcctgtgaattttttttgaagcataattctaaagtcaagcacaagaagaagcactataagcctagttcccataagctgaaggttataagcaagtccatgggtacatctacaggtgccacggccaaccacgggacttccgccgtagctattaccagtcacgattatttgggacaggaaacactcacagagatccagacctcccctgagacatctatgagggaggtgaaggccgacggtgctagcacccctcgcctgcgcgaacaggactgcggagagcccgcttcacccgcagcctcaatctcccgactgtccggagaacaggtcgatggtaagggacaggccggatctgtctcagaatcagccagatcagagggccgcatctcccccaagagtgatataacagacactggcctggctcagtcaaacaacctgcaggttccttcctctagcgagccgtcctccctgaagggctccacttccttgctggtccaccccgttagtggcgtaaggaaggagcaaggcggaggatgccattctgatacatag

SEQ ID NO: 117509 - DNA, 1956 bp, synthetic construct
  misc_feature 1..1956: note = Description of Artificial Sequence: Synthetic coding sequence
  source 1..1956: mol_type = other DNA
atgctggcccagcatttcctgcctctggccaaccttgaatgttcccccaatatagagacattcctatgtaaggcttttgtccccacatgtattgagcaaatacacgttgtgcccccgtgcagaaagctttgcgaaaaagtctatagtgactgcaaaaaactcatcgataccttcggcatccggtggcccgaggaattggagtgcgacagactgcagtactgcgatgaaaccgtgccagtgacattcgacccacatacggagttccttggaccacaaaaaaaaaccgaacaggtgcaacgggatatcggtttttggtgccctcgtcacctgaagacgtctggtggacagggatataagtttttgggcattgaccagtgtgcacccccgtgtccaaacatgtacttcaagagcgacgagcttgaattcgccaagagctttatcggtaccgtctcaattttttgcctgtgtgcaaccctgtttacttttttgacgtttctgatcgacgtccggcgatttaggtatccagaacgtcctataatatactacagcgtgtgctatagcattgtgtcacttatgtactttatcggattcctgttaggggattccaccgcttgcaacaaagccgacgagaaactggagctaggagacactgtggtcctcggctcgcaaaataaagcctgcaccgtcctgtttatgctcctctacttttttaccatggcaggaaccgtttggtgggtgatcctaactattacctggttcttggcagccgggcgaaagtggtcttgcgaagcaatcgaacaaaaagccgtctggttccacgctgttgcatggggaacccctggcttcctgacagtcatgttattagccatgaacaaagtggaaggcgacaacatctctggtgtctgcttcgtcggtctgtacgatcttgatgcctcccggtattttgtgctgctccctttatgcctgtgtgtcttcgtagggttgtcgcttctcctcgccggtatcatcagcctgaaccatgttcgccaggtgatccaacacgacggacggaaccaagaaaagctcaagaagttcatgattaggatcggcgtgttcagcggcctgtatttagtgcctctagtcaccctcttaggctgttacgtctacgagcaggtgaacaggatcacttgggaaattacttgggtctctgaccactgtagacaataccacatcccttgtccgtatcaggccaaggcaaaggccaggcccgagttagcactctttatgataaaatacctgatgaccctgatcgttggaatatccgcagtgttctgggtgggaagcaagaagacgtgcaccgaatgggccggttttttcaagcgaaaccgcaagagagacccaatctctgagtcacgtagagtgctgcaggagtcttgtgagtttttcctcaaacataatagtaaagtgaagcacaagaagaagcattacaaacctagttctcataaactcaaagtaatctccaagtcaatgggtactagtaccggtgcaactgctaatcacgggacaagcgctgttgcaatcacctcccatgactatctcggccaggagacacttaccgagatccagacgtcaccagagacgtccatgagggaggttaaggccgatggcgctagcactccaaggctcagggaacaggattgtggagaaccagcctctccagctgccagcatctcacggctaagtggcgaacaggtggacggcaaaggccaagccgggtctgtaagtgagtctgcccgctctgagggaagaatctcacccaagagcgacatcacagatactggactggcccagagcaacaatctacaggtgcctagctcatcagagccctccagcttaaaaggtagcacttccctgctggtccatcccgtctctggtgtgcggaaagaacagggaggggggtgtcatagcgacacttag

SEQ ID NO: 117510 - DNA, 1206 bp, synthetic construct
  misc_feature 1..1206: note = Description of Artificial Sequence: Synthetic coding sequence
  source 1..1206: mol_type = other DNA
atgacaagagtattacccagatggaagtggtcgtgcgaagcaatcgagcagaaggccgtttggttccacgcagtcgcatgggggacccccggcttcctgacagtgatgctcctcgccatgaataaagtcgagggcgacaatatctctggggtctgctttgtaggtctgtatgatctggatgcttcaagatactttgtgcttcttcctctctgtctgtgcgtttttgtgggcctgtcactcctgctggccggaatcatctccctgaaccacgtccgccaagtgatccagcatgacggcaggaatcaagaaaagctgaagaaattcatgatccggattggggtgttttccgggctgtacctggtgccactcgtgacactcctcgggtgctacgtgtacgagcaggttaatcggatcacctgggaaatcacttgggttagcgaccactgccggcagtaccatataccttgtccctatcaggccaaagccaaggcccgccccgagttagcgttgttcatgattaaatatctgatgactttaattgtaggcatcagcgccgtcttctgggtgggaagtaagaagacatgtacagaatgggccggtttttttaagcgcaaccgtaagagggacccaatttccgagtcacgccgggtcttgcaggaatcctgtgagtttttcctcaaacataacagtaaagtgaagcataaaaaaaagcattacaagccatcctcccacaaactcaaggtaatctccaagagcatgggcacctctaccggcgcgacagccaaccatggaacatctgccgtagccatcacctcacacgactatctggggcaggaaactctcacggagatccagaccagccctgagacctctatgagggaggtcaaggcagatggtgcaagcactccaaggctccgcgaacaggactgcggagaaccagccagtccggcagctagtatctcacggctgtcaggcgaacaagtggacgggaagggccaggctggatccgtttcagagtccgctcgatccgagggacgcatctcacctaagtcggacataacagatactggtcttgcacagagcaacaacttgcaggtgcccagtagtagcgagccatcctctcttaaagggagcacgagcttactggtgcacccagtgtctggcgtccgtaaggagcagggcggaggctgccacagcgacacgtag

SEQ ID NO: 117511 - DNA, 2085 bp, synthetic construct
  misc_feature 1..2085: note = Description of Artificial Sequence: Synthetic coding sequence
  source 1..2085: mol_type = other DNA
atggaatggggctaccttctggaagttaccagcctcttggccgcactggccttgctgcagaggtctagcggagcagccgccgctagcgccaaggaactcgcatgtcaagaaattactgtgccactgtgcaagggaattggatataattatacatacatgcccaaccagttcaaccacgatacacaggacgaggctggcctagaggttcaccaattctggcctttagtggaaattcagtgtagccccgaccttaagttcttcctgtgcagtatgtacacccctatctgtctggaagactataagaaaccactccctccatgccgctcagtttgcgagcgcgcgaaagccggatgtgcgcccttgatgcgccagtatgggtttgcctggcctgatcggatgcgttgtgatcgcctgcctgagcagggaaacccagacaccctgtgcatggattacaatcgtaccgatctgaccaccgcagctccctcccccccgcgacgtctgccccctcctccaccaggagagcagccgccttccgggtctggacatggccgcccccctggtgccagacctccccacaggggaggtggaaggggcggcggaggaggcgacgcagccgccccgcctgcgcgaggaggcggaggcggggggaaagctcgtcctccgggtggcggcgccgctccatgtgagcctgggtgtcagtgtcgagccccgatggtcagcgtgagctcagagcggcaccctctgtataatcgtgtgaaaactggtcagattgctaactgtgcgctgccatgtcataacccgttttttagccaggatgaacgagcttttacagtcttttggatcggcctctggagcgtgctctgttttgtttccacttttgccaccgtgtccacattcttaattgacatggaacggttcaagtacccagagcgccccatcattttccttagcgcttgttacctctttgtgagcgtgggctaccttgttcgtctggtagctggacacgagaaggttgcgtgcagcggcggtgcacccggggcaggcggtgccggtggcgctggcggggccgcggcgggtgcaggagcagcgggggcaggtgcagggggtcctggtgggcggggagaatacgaggagctgggggccgtagagcagcacgttcgctacgagacaaccggaccagccctctgtaccgttgtgttcctgttggtatacttcttcggtatggcttcatccatctggtgggtaatcctgagcttgacctggttccttgctgccggcatgaaatggggaaacgaagccatagcaggctattcacagtactttcatctagcggcatggttggtcccttcggtcaagtcgattgctgtgttggcactgagtagtgtagacggggatcctgttgccggaatctgttatgtgggaaatcagtccctcgataatctgcgcgggtttgtactggcccctttggttatttatctcttcattggcacgatgtttctcctagccggctttgtatcattgtttcgaatccgttccgtcatcaaacaacaggatggcccaactaagacacacaaattagagaagttaatgattcgattgggcctcttcacagtcctgtatactgtccccgccgccgtggttgttgcctgcttattttatgagcaacataatcggcccagatgggaggccacacacaactgcccttgcttgcgcgacctgcagcctgaccaggccaggcgcccggactatgctgtctttatgcttaaatactttatgtgcctggtggttggaattacaagcggggtgtgggtgtggtcaggcaagacgctagagtcatggcgctcactgtgtacccgctgctgttgggctagcaagggcgccgccgtgggcggaggagccggcgccaccgccgcgggtggggggggagggcccggcggcggaggcggaggcggtcccggaggaggaggcgggccaggaggaggaggcgggtcattatactccgacgtgtcgacagggctcacatggagaagcggaacagctagtagtgtcagctaccctaaacagatgccactatcacaggtgtag

SEQ ID NO: 117512 - DNA, 1776 bp, synthetic construct
  misc_feature 1..1776: note = Description of Artificial Sequence: Synthetic coding sequence
  source 1..1776: mol_type = other DNA
atggccgtggcccccctgcgcggagcactgctcctgtggcagctgttggctgctggaggagcagccttggagatcggaaggtttgacccggagaggggaaggggcgctgccccttgccaggctgttgagattcctatgtgcagaggcatcggatataaccttacaaggatgcccaaccttctgggccatacctcccagggcgaggccgctgctgaattagccgaattcgcaccactggtgcaatatggctgccactcacatcttcgtttcttcttatgttccctgtatgccccaatgtgcacggaccaggttagtactcctatacctgcatgtaggcccatgtgtgagcaagcacgccttaggtgtgcccccatcatggagcaatttaactttggatggcctgacagcttagattgtgcaagactgcccacgcgcaacgatccgcacgccctttgtatggaagctccagaaaacgcaaccgccggcccggcagagcctcataaagggctgggtatgcttcccgtggcgccacggcctgctagacctcccggcgatcttggacccggcgccggaggctccgggacatgtgaaaatccagagaagtttcagtatgtggagaaatctcgatcgtgtgcacctagatgtggccctggcgtcgaggtattttggtctaggcgcgacaaagacttcgccttggtctggatggccgtctggagcgctctttgcttcttttccaccgcattcactgtgctgacatttctactggagccccatcgctttcaatatccggagcgtcccatcattttcctctcgatgtgctacaacgtttacagcctggcattcctgatccgggccgtggccggtgcacagagtgtcgcttgcgatcaggaggcaggagccctgtatgtgatccaggagggtttggagaacacagggtgtacactcgtcttcctgctgctgtattatttcggaatggcgtccagcctctggtgggttgttctgactttaacctggttcctggccgctgggaaaaagtgggggcacgaagcaatagaggcccacggctcttacttccacatggctgcctggggcctgcctgctctcaaaactattgtgatattaacgctgcgtaaggtggcaggagacgagctcacaggcctgtgttacgtggcttctactgacgctgccgccctgacagggttcgttcttgtgcccctgtccggttatcttgttctgggtagcagtttcctgcttaccggcttcgtagctttatttcacattcggaagatcatgaagaccggaggcacgaacaccgagaagcttgagaagctcatggtgaaaataggggtgtttagtatactctacactgtgcccgccacctgtgttatcgtgtgttatgtttacgaacgcctaaatatggacttctggagattacgagccacggaacagccttgtgccgccgctgctggacccggagggcgcagagattgttccctgccaggcggaagcgtgccaactgtagcagtgttcatgctgaagatatttatgagtctggtcgttggtatcacctccggtgtgtgggtgtggtcctccaagaccttccaaacttggcagagcctctgctaccggaagattgccgctggtcgcgccagggctaaagcatgtcgcgcgcctggtagttatggcaggggcacccattgccactacaaggcacctactgtggtcttgcacatgaccaaaactgacccctcactagagaacccaactcatctctag

SEQ ID NO: 117513 - DNA, 978 bp, synthetic construct
  misc_feature 1..978: note = Description of Artificial Sequence: Synthetic coding sequence
  source 1..978: mol_type = other DNA
atggtttgtggcagtcccggcggtatgctgctactacgagccggcctgctggccttggccgcactgtgcttactcagggtcccgggggctcgggcggccgcctgtgagcccgtgcgcatcccgttatgtaagagcttaccatggaacatgacgaagatgccgaatcaccttcaccattccacgcaggccaatgccattttagcgattgagcagttcgaggggctccttgggacccactgctcacctgaccttctgttttttctttgcgcaatgtatgccccaatctgcacaatcgactttcaacacgagcccatcaaaccatgtaaatccgtgtgtgagagagccaggcagggatgcgaacccatattaatcaagtatcgacactcttggccggagaaccttgcctgcgaagaactgcccgtgtacgataggggagtgtgtattagcccagaggctatcgtgactgctgacggggccgattttccgatggacagctctaacggtaattgccggggcgccagctccgagagatgtaaatgcaagcccatcagggcgactcagaagacctatttccgaaacaactacaattatgtgatacgtgccaaagtcaaggagatcaagacaaagtgtcatgacgtgacagcagtggtcgaggtgaaggagatactaaagagctcccttgtaaatattccgcgggatacggttaacttgtacaccagttccgggtgtttgtgtcccccacttaacgttaacgaagaatacattatcatggggtatgaggatgaggaaagaagcaggctgttgctggtggaggggagcatcgcagaaaagtggaaggatagactaggtaaaaaggtaaaacgttgggatatgaaattacgtcatcttggtctttctaagtctgacagttcaaatagtgacagcacacagtcgcaaaaatccggcaggaatagcaacccacgtcaagcgcggaactag

SEQ ID NO: 117514 - DNA, 930 bp, synthetic construct
  misc_feature 1..930: note = Description of Artificial Sequence: Synthetic coding sequence
  source 1..930: mol_type = other DNA
atggaggagctgctccggagagaattgggatgcagctctgtaagagcgaccggacatagcggcggagggtgcatctcgcaagggaggtcgtacgacaccgaccagggcagggtctttgtgaaagtgaaccccaaggcagaggcacggcggatgttcgagggcgagatggcaagcttaaccgcgatactgaaaacgaataccgttaaggtgcctaaacccatcaaggtgctggacgcgccagggggcggtagtgttctcgttatggagcacatggacatgagacacctgtcttcacatgcagccaagctgggagctcagttggccgacctgcacctggataacaaaaaactgggcgaaatgcggctaaaggaggccggaacagtgggtcgtggcggaggccaggaggaaagaccgtttgtggccaggttcggattcgatgtggtgacatgctgcggctacctgcctcaggtgaacgattggcaggaagattgggtggtgttctatgctagacagcgaatccagccccagatggatatggttgagaaggaatcgggggatcgagaggccttacagctgtggagcgctttgcagcttaagatccctgatttattcagagacctcgaaattattccggctctgttgcacggcgacctgtggggagggaacgtggccgaagattcctccggcccggtgatctttgaccctgccagtttctacggccattccgagtatgaacttgccatcgctggtatgtttggtggatttagcagcagcttctatagtgcgtaccacgggaaaattccaaaggcgccaggcttcgagaagaggttgcagctttaccagctatttcactatctgaatcactggaatcacttcggaagcggatacaggggttcgtctcttaacataatgagaaacctggtgaaatag

SEQ ID NO: 117515 - DNA, 780 bp, synthetic construct
  misc_feature 1..780: note = Description of Artificial Sequence: Synthetic coding sequence
  source 1..780: mol_type = other DNA
atgtttgaaggggagatggcaagcctcaccgcaattctcaagaccaatacagtgaaagtgcccaagcctataaaggtcctcgatgccccaggaggggggtcagtactcgtcatggagcatatggatatgcgccacctgtccagccatgcagcaaagctcggcgcccagctggcagaccttcacttggataacaagaaactgggcgagatgcgcctgaaggaggccggcacagtgggtcgcggtggcggacaagaggaacgaccgtttgtggccaggtttggattcgatgttgtcacctgctgcggttatcttccacaggtgaacgattggcaggaggactgggtggtgttctacgcccgacagagaatccagccccagatggatatggtagaaaaggagtcaggggaccgggaggccctgcagctgtggagtgccctccagttaaaaatcccagaccttttcagagatctggaaatcattccggccttgctgcatggggatctgtgggggggcaatgtggccgaggattctagcggccccgtgattttcgaccccgcctctttttatggtcactcagaatatgaattggccatcgcagggatgttcggcgggttctctagttctttctatagcgcatatcacgggaaaatccccaaagcccctggcttcgagaaaagattacagctttatcagttgtttcactacctcaaccattggaatcattttggctccggatatagggggtctagcttgaacattatgcggaatctggtgaaatag

SEQ ID NO: 117516 - DNA, 1017 bp, synthetic construct
  misc_feature 1..1017: note = Description of Artificial Sequence: Synthetic coding sequence
  source 1..1017: mol_type = other DNA
atggccgatcaagctcccttcgacaccgacgtcaatacactgaccagattcgtaatggaagagggaagaaaagcacgtggtacaggagagcttactcagctgctgaactccctgtgtaccgcggtgaaggccatttcctcagctgtaaggaaagctggcattgcccatctgtacggtatagctggctccacaaacgtaaccggtgatcaggtcaagaaactggacgtgttgtctaatgacttagttatgaacatgctgaaatcaagctttgccacatgtgttcttgtgtccgaagaggacaagcacgctatcattgtggaaccagagaagaggggcaagtatgttgtgtgtttcgacccactggacgggagctcaaacatcgactgcctcgtttctgtggggacaatatttgggatatacagaaagaaatcgaccgatgaaccatctgaaaaagatgcactccaacctggcagaaatctcgtcgccgcaggttacgccctgtatggctccgccacaatgttagtgctcgccatggactgtggtgtgaactgttttatgctggaccctgcaatcggcgaatttatccttgtggacaaagacgtgaagatcaaaaaaaaaggtaagatttacagcctgaatgagggttatgcaagagatttcgacccagctgtcaccgagtacatccagagaaagaagttccctcccgataattcagccccctacggtgccaggtacgtgggatcgatggtggccgatgttcatcggacactggtgtacggtggcatctttctttatcctgccaacaagaaatcccccaatggaaaactgcggctcctctacgagtgcaaccctatggcctacgtaatggaaaaggcgggggggatggcaacgacaggcaaggaggccgttttggacgtgattcccaccgacatccaccagagagcccccgtcattctgggctccccagacgatgttctcgagtttctgaaggtctacgagaaacattctgcgcaatag

SEQ ID NO: 117517 - DNA, 456 bp, synthetic construct
  misc_feature 1..456: note = Description of Artificial Sequence: Synthetic coding sequence
  source 1..456: mol_type = other DNA
atgttaaagagcagtttcgccacttgtgtgctggtgtccgaagaggataaacacgccatcatagtggaacccgagaaaaggggcaaatacgtggtgtgcttcgaccccctcgacgggtcgagcaatatcgactgcctggtgagtgtggggacaatcttcgggatctaccgcaaaaaatccaccgatgagccatcagaaaaagacgctctgcagccaggacgtaacctggttgctgccggatacgctttgtatggctccgctaccatgctagtgttggcaatggactgcggcgtcaactgtttcatgctagacccagctatcggagagtttatccttgttgacaaggatgtgaaaatcaagaaaaagggaaaaatatactccctaaatgagggatacgcaagggactttgatcctgcggtcactgaatacatccagcggaagaaattcccaccttag

SEQ ID NO: 117518 - DNA, 1017 bp, synthetic construct
  misc_feature 1..1017: note = Description of Artificial Sequence: Synthetic coding sequence
  source 1..1017: mol_type = other DNA
atggccgatcaggcaccatttgacactgacgtgaatacgctgacccgatttgtaatggaagagggccggaaggctcgcggtaccggtgaacttacacagctcctgaactctctgtgtaccgccgtgaaggcgatcagctccgctgtgagaaaagctggaatcgcacacctttacggaatcgctggaagcacaaacgtgactggagatcaggtcaaaaagctagatgtgctgtccaatgatttggttatgaatatgctgaagtcgtccttcgcaacctgcgttctggtttcagaggaagataaacacgccatcatcgttgagcccgagaaaagaggcaaatatgtggtctgttttgacccactggatggcagttcaaacatagactgtctggtctccgtgggtactatatttggaatttaccgtaaaaagtcaacagacgaacccagtgaaaaggatgccctgcagccgggcaggaatctagtggcagccggttatgcactgtacgggagtgccaccatgttggtcttggccatggactgcggcgttaactgtttcatgttggatcctgcaatcggcgaattcatccttgtggacaaggatgtgaaaattaaaaagaaaggtaagatttactcactgaatgagggctatgcccgggatttcgaccccgcagtaaccgaatacatccagcgtaagaaatttccgccagataacagtgccccatacggcgctcggtacgtcgggtcaatggtcgctgacgtccatcgaaccctggtgtatggcggcattttcctttatcccgcgaacaaaaaatccccaaacggaaaacttcggctactttatgaatgcaatcccatggcctatgttatggaaaaagctggcggaatggcaaccacgggcaaggaggcagtgcttgacgtcatacccaccgacatacatcaaagagccccagtaatcctcgggtcaccagatgacgtgctggaattcctaaaggtctatgaaaaacactctgcacagtag

SEQ ID NO: 117519 - DNA, 1020 bp, synthetic construct
  misc_feature 1..1020: note = Description of Artificial Sequence: Synthetic coding sequence
  source 1..1020: mol_type = other DNA
atgacagaccgcagccccttcgaaactgatatgcttaccctgacccggtacgtgatggagaagggcaggcaggccaaaggcactggggaacttacacagctcctcaatagtatgttaacagccattaaggccatttctagtgccgttagaaaagccggcctcgctcatctgtatggcatcgccggctctgtgaatgtaacaggagatgaagttaagaagttagacgtcctgtctaattctctagtgatcaatatggtgcagtcctcatatagcacctgtgtgctggttagtgaagaaaacaaggatgctatcatcaccgctaaggagaagcgcggcaaatacgttgtttgcttcgatccgctcgacgggtcttctaatatcgattgtctggcatctattggtaccatcttcgccatctataggaagacaagtgaagatgagccatctgagaaagatgccttgcagtgtggtcgcaacatcgtagctgctgggtacgctctatatggatctgcaaccctggttgcactgtccaccggacagggcgtcgatctgttcatgcttgaccctgcactgggagagttcgtgttagtcgagaaggatgtgaagataaaaaagaagggtaagatctattcccttaatgagggctatgcaaagtatttcgacgccgcgaccactgagtacgttcaaaagaaaaagttccctgaagacggtagcgccccctacggcgcaaggtacgtggggtctatggtggctgatgttcaccgaacattagtgtacggcggcatatttttataccctgcaaatcaaaaaagccccaagggcaaactcaggctgctgtatgagtgcaatcctgtggcctatattatcgagcaggccggcggactcgctaccacagggacccaacctgtgttggatgtgaaacccgaggcgatacatcagagagtgccccttattctgggctccccagaggacgttcaggaatacctgacatgcgtgcagaagaaccaggctgggtcgtag

SEQ ID NO: 117520 - DNA, 837 bp, synthetic construct
  misc_feature 1..837: note = Description of Artificial Sequence: Synthetic coding sequence
  source 1..837: mol_type = other DNA
atggggaaaggcaacgaggactctgacctccactgctctagtattcaatgcagcaccgaccagccaccctttcaacagattagctttaccgaaaaaggatctgatgagaagaaaccctttaaggagaagggtaagactgcctttagccactctagcgagaagcatattcagcgccagggctctgagcccaaccccaacaaagaaaactctgaagagacgaaactcaaagcaggcaactccactgcagggagtgaacccgagagctccagctatagagaaaactgtagaaagagaaaaatgtcttctaaggattcatgtcaggacacggcagggaactgtccggaaaaggaatgctccctgtctctaaacaagaagagccgctctagcacggccgttcataactcagaaatccaggaaacttgcgatgctcatcaccgtggccattctagggcctgcacaggccactccaagaggcaccgaagcagggctttaggcgtccagacaccatcaatccgcaaatctctggtaactagcgtgcgcgcaatgtctgaggccgtctatcaggacctagcacaggtctgggctcagcagatccattcccctctgacctgcgagcaactgaccctgcttacaagactgaggggacccctttgcgcccaggtccaaactttgtactctatggccactcaggctgcttatgtatttcccgctgagtcttggttggtccctgcaactctgcccggtcccggagaaagcgccctcgaccgcgaagcgcacccattccctggtcaagaaatcaccgaaaccgtgtccggcagcgatgaggctaaactgtag

SEQ ID NO: 117521 - DNA, 984 bp, synthetic construct
  misc_feature 1..984: note = Description of Artificial Sequence: Synthetic coding sequence
  source 1..984: mol_type = other DNA
atgggcagaacaagtaaagacaagcgcgacgtgtattacaggctggccaaggaaaacggctggcgcgcgcgctccgcctttaaattactccagctcgacaaggaattccaactgtttcagggggtcacacgggctgtggatctgtgcgctgcccctggttcttggtcacaggtccttagtcagaagataggaggacaaggatccgggcacgtagtggccgtggacctccaggcaatggcgcccctcccgggggtggtgcagatccagggtgatataacgcaattgagtactgccaaggaaattatccaacactttaaaggatgtccagcggacttggtggtttgtgatggagcacctgatgttaccggtctgcacgatgtggatgagtacatgcaggcccagctcttacttgctgcgctgaacattgccactcacgtcctgaaaccaggcggatgctttgtggcaaagatatttcgcggacgagacgtgaccttgttatattcacaacttcaggtttttttcagcagcgtactgtgtgccaaacccagatctagcaggaactccagcatcgaagcctttgctgtatgtcaagggtatgacccccccgagggtttcatcccagacctttctaagcctctgttggatcactcctacgattttaatcagctagacggacccactaggatcatcgttccatttgtgacttgcggtgatcttagcagctacgactccgatcgctcttatccactcgacctggaaggaggaagcgagtataaatacacacctccaacgcagccccctattagccccccataccaggaagcttgcactctgaaacgcaagggacaactggcgaaggagatacggccacaagactgtcccatctcacgagtcgatacttttcctcaacctctggccgcccctcaatgccatacactcttggcccctgagatggaggacaatgagatgagctgttctccttag

SEQ ID NO: 117522 - DNA, 990 bp, synthetic construct
  misc_feature 1..990: note = Description of Artificial Sequence: Synthetic coding sequence
  source 1..990: mol_type = other DNA
atgggcaggacgtcaaaggataagcgggatgtttactatcggttagccaaggagaacggctggcgtgcaagaagtgcgtttaagttgttgcagttggataaagagtttcagctgtttcagggcgtaacccgcgctgtcgatctgtgtgccgcgcctggcagctggtctcaagtcctctcacagaagatcggaggccaagggtcggggcatgtagtcgctgtggacctgcaggcaatggcacccctccccggagtggttcagattcagggagacattacccagctcagtaccgccaaggaaattatccaacacttcaagggctgcccagcggatcttgtcgtgtgtgacggcgcacccgatgtgactggcctgcacgacgttgatgagtatatgcaagcacagctgcttctggctgccctgaacatcgcgacgcacgtcttgaagccaggcggctgctttgtcgccaaaatttttcgtggaagggacgtgacgctcttgtattcccagctgcaagtattcttttccagcgtgctgtgcgcaaagcctcgtagtagcaggaattcgagtatcgaggcattcgcagtttgccagggctatgatcctcccgaaggttttatccccgatctctccaagcccctgctggaccattcctatgatcctgattttaatcaacttgacggcccgacacgcatcattgtgccattcgtcacatgtggtgacctgtcgtcttacgacagtgatagatcataccccctggatttagaagggggctctgaatacaaatatacccctcctacccagccaccgatttcccccccttaccaggaggcctgtactcttaagcgcaagggccagctggcaaaggagattcgcccgcaggattgccccataagcagggtggacaccttcccccagcctttagcggccccccaatgtcataccctgctggctcccgagatggaggacaacgagatgtcatgctcaccatag

SEQ ID NO: 117523 - DNA, 579 bp, synthetic construct
  misc_feature 1..579: note = Description of Artificial Sequence: Synthetic coding sequence
  source 1..579: mol_type = other DNA
atggccttgaacatagcaacccacgtattgaaacccggcggctgtttcgtggccaagatatttaggggcagggacgtgacattgctgtactcacagctccaggtgttcttttctagcgtgctgtgtgctaagccgaggagtagcagaaacagtagtatcgaggcatttgcggtgtgtcagggttacgatcctccagaggggttcattcccgacttaagcaaaccgttactggaccactcctatgatcccgactttaatcaactggatggtccaaccagaatcattgtgccatttgtgacttgtggggacttatcttcttatgactccgacagatcctaccctctggacctcgaaggaggctccgaatataaatacaccccccccacgcagccacccatatcacctccctaccaagaggcttgcaccctgaagcggaaaggtcagttagccaaagagatccggccacaagattgtccgattagccgtgtggatacctttccacagcccctcgctgctccgcaatgtcacacactcctagcccctgagatggaagacaacgagatgtcctgttccccctag

SEQ ID NO: 117524 - DNA, 984 bp, synthetic construct
  misc_feature 1..984: note = Description of Artificial Sequence: Synthetic coding sequence
  source 1..984: mol_type = other DNA
atggggagaacgtccaaagacaagcgtgacgtatactaccgccttgctaaagagaacgggtggagagccaggagtgcattcaaattactccagttggacaaggaatttcagctcttccaaggggtcacccgagctgtagatttatgtgccgctccgggctcatggagtcaggtccttagtcagaagatcggcggacagggctccggacacgttgtggccgtagatttgcaggctatggctcctcttcccggagtggtgcagatacaaggggatatcacgcagcttagcactgcaaaggagattattcaacactttaaaggctgcccagctgatctggtagtgtgtgacggcgcaccagatgtaacaggacttcacgacgtcgatgagtacatgcaggctcagttgctgttggccgctttaaatattgctacccacgtgcttaagcccggcggatgttttgtagctaagatttttcgggggcgtgacgtgacactcttgtattcacagttacaggtcttcttttcaagtgttctctgcgctaagccgcgttccagccggaattcatccattgaggcctttgctgtctgccaaggctacgatcctcccgagggcttcattccagacttgagcaaaccactgcttgaccattcatatgactttaaccagctcgatggccccactcgcatcatcgtgccctttgtgacttgtggggatctctcgagctatgacagcgatcgcagctaccccctggatcttgaagggggctctgagtacaaatacacccccccaacacagccccctatcagccccccataccaggaagcatgcacgctgaagcgtaagggacagctggccaaagaaatcaggccccaggactgtccaatctctagggtggataccttcccccaacccctggcggccccgcagtgccataccctacttgcccctgaaatggaagataatgaaatgtcctgcagtccatag

SEQ ID NO: 117525 - DNA, 741 bp, synthetic construct
  misc_feature 1..741: note = Description of Artificial Sequence: Synthetic coding sequence
  source 1..741: mol_type = other DNA
atggcgggttacttgaaacttgtatgcgtgtccttccagaggcagggttttcacaccgtgggctcacgctgcaaaaaccgtactggcgcagagcacctgtggctcacacgccacctccgtgatccatttgttaaggcggctaaagtggaaagttataggtgcagatccgcttttaagctgctggaggtcaacgaacgacatcagattctgcgtcctggcctgcgagtgctggattgcggcgccgcacctggggcctggtcacaggtggccgttcaaaaggttaacgccgctggcacagaccctagctccccagtcggcttcgtgctgggagttgacctgctacacatttttccgttagagggggctacttttctgtgccctgctgacgtgaccgacccacgcaccagccaacgaatcttagaggtgctgcctggacgtcgagcagacgtgattttatccgatatggccccaaatgccaccggttttagggaccttgatcacgataggctgatttcactgtgtttgacgcttctctctgtcactcccgacatcctccagcctggagggacgtttttgtgtaagacatgggcagggagccagagcagaaggcttcagcgccgattaaccgaggaattccagaacgtacgcatcattaaaccggaagcctctcgaaaggaatcatccgaggtgtacttcttagccacacaataccatgggagaaagggtaccgtgaagcagtag

SEQ ID NO: 117526 - DNA, 438 bp, synthetic construct
  misc_feature 1..438: note = Description of Artificial Sequence: Synthetic coding sequence
  source 1..438: mol_type = other DNA
atggccgggtatttaaagctggtttgtgttagctttcaaaggcaaggatttcacacagtaggttcaagatgcaaaaaccggacgggtgctgagcatctgtggctgacacgacatctgcgcgatccttttgttaaagccgccaaggttgaaagctaccgatgtcgaagtgcctttaaattgcttgaggttaatgagcgccatcagattttgcggccggggctacgagttcttgactgcggtgctgcccccggagcctggtcccaagtagccgtacagaaagtaaatgccgcaggcaccgatggcgtgagcctcctcccacggctgcagtgcaacggggtaatctccgcacactgtaacttgtgtctccctggctcctcagactcgcccgcgagcgcatcacagatcccagctctgctgctcgcatcttgtttggggtag

SEQ ID NO: 117527 - DNA, 768 bp, synthetic construct
  misc_feature 1..768: note = Description of Artificial Sequence: Synthetic coding sequence
  source 1..768: mol_type = other DNA
atgccagagctatatgacctcgttaattcatacaagccggatctcatctggtctgatggtgaatgggagtgtcccgatacgtattggaattccaccaattttttgtcgtggttgtacaacgattcacccgttaaggatgaggtggtcgtgaatgatcgctggggccagaactgtagttgtcaccacggcggctattataattgtgaagataagtttaaaccccagtctctccccgatcacaagtgggaaatgtgtactagcattgacaagtttagctggggctacagaagagatatggccttgtcagatgttactgaggagtcagagatcattagcgagctggtgcaaactgtgtcattgggggggaattacctgttaaacatcggacctacgaaagatggactgatcgttcctatttttcaggaacgcctgctcgcagtggggaaatggctgagtatcaatggcgaagcaatatacgccagtaagccttggcgcgtgcagtgggaaaagaatacaacttcagtttggtacactagcaagggatctgcagtttatgctatctttctgcactggcctgagaatggcgtgctcaatctggagagcccaatcaccacgagcacaactaagatcaccatgctgggcatccagggcgacctgaagtggtccaccgaccccgacaaagggctcttcatatctttgccacagctcccccctagcgcggtgcccgccgagttcgcctggaccattaagctgaccggggtgaagtag

SEQ ID NO: 117528 - DNA, 1401 bp, synthetic construct
  misc_feature 1..1401: note = Description of Artificial Sequence: Synthetic coding sequence
  source 1..1401: mol_type = other DNA
atgcgcgctcccggcatgcgttcccgacctgctggacccgccctccttctgttgctgttattcctcggtgcagccgagtctgttcgccgtgcacagcctccccgtcgctacactccagattggccgagcctggattctcgaccactcccagcatggttcgacgaggcaaagttcggggtttttatacactggggggtgttttctgtgcctgcctggggctccgaatggttctggtggcactggcagggagagggccgcccacagtaccagcgcttcatgcgggacaattatcctcctgggtttagctacgccgatttcggcccccagtttaccgcaagattctttcatccagaggaatgggccgatctattccaggcagctggggccaagtatgtggtgctgaccactaaacatcatgagggatttacaaactggccctctccggtcagctggaattggaactcaaaggatgtcgggccccaccgcgatcttgtgggagaattgggaactgcactccgaaagcggaatatccgctatggactgtaccactcattactggagtggttccaccccctttatttgttggataagaaaaatggatttaagacccagcattttgtgagtgctaaaaccatgcctgagctgtacgacctcgtgaacagttataagccagatcttatctggagtgacggtgagtgggaatgccctgacacttattggaactcaaccaattttctgtcctggctgtacaacgacagcccagttaaggatgaagttgttgttaatgatcggtggggccagaattgtagctgtcatcacggcggttactataactgcgaggacaagttcaaaccgcaatcactccccgaccacaagtgggaaatgtgcacatctattgataaatttagctggggctacaggcgagatatggccctatcagatgtgactgaggagtcggaaattattagtgagctagtgcaaaccgtaagtttgggtgggaactatctgttaaatattggtcctacaaaggatggtctgatcgttccgatttttcaggaacgtttattagcagttgggaaatggttatctatcaatggcgaggccatttacgcatcaaaaccttggcgggtacagtgggaaaagaacacaacttcagtgtggtatacctcaaagggctctgcagtgtatgcaatcttcttacattggcctgagaacggagttttgaatttagaaagccccatcaccacgtctaccacaaaaatcacaatgcttggaatacagggcgatctgaagtggtcgacagatccagacaaggggctctttatttcacttcctcaacttccaccctctgctgtccccgctgaattcgcttggaccattaaactcactggagtaaaatag

SEQ ID NO: 117529 - DNA, 1404 bp, synthetic construct
  misc_feature 1..1404: note = Description of Artificial Sequence: Synthetic coding sequence
  source 1..1404: mol_type = other DNA
atgaggccccaggagctgcctaggttggccttccccctgttgctacttttgcttctgctactgccacctcccccatgcccagcccactcagctactcgctttgatcctacttgggaatctttggacgcacggcagttaccggcctggttcgatcaggctaaattcggaatcttcatccactggggcgttttttctgtaccgtctttcggaagcgagtggttttggtggtattggcagaaagagaaaatccctaagtatgtcgagttcatgaaagataattatccacccagcttcaagtacgaagacttcggacccttgttcaccgctaaatttttcaatgccaaccagtgggcagacatcttccaagctagtggggctaaatacatagttctaactagtaagcaccatgaaggttttacgttatgggggagcgagtacagctggaactggaacgccatcgatgaaggccccaagcgggacattgtgaaagaactggaagttgcaattagaaaccgcaccgatctccggttcgggctgtattattctctcttcgagtggttccacccgctgttccttgaagatgaatcaagttcgttccataagaggcagtttcccgtttcaaaaacacttcccgagctgtatgagctcgtgaataactaccagcccgaggtcttgtggtccgacggagatggaggcgccccggatcagtactggaactcgactgggtttctggcatggctgtacaacgaaagtccagtgcggggaaccgtcgtgaccaatgatagatggggcgcaggcagcatctgtaagcatggaggcttctacacttgctcagatcggtacaatccaggacaccttctacctcataaatgggagaattgcatgacgattgataagctttcttggggatatcggagggaagccggaatcagtgactatttaacaatcgaagagttggtgaaacagctggtagagaccgtgtcttgtggagggaatctcctaatgaacatcgggcccactctcgatggcacgatctctgtagttttcgaagagcgcctgaggcaaatggggagttggctgaaggtcaatggagaggccatttacgagacccacacctggaggtctcagaatgataccgtgactcccgatgtgtggtatacttctaagcctaaggagaaactggtgtacgccattttcctgaaatggcctacctctggacagctattcctgggccaccccaaagccatccttggggcgactgaggtcaagctgctgggtcatggccaacccctaaactggatcagtctcgagcagaacggcataatggtggaactgccacagctcaccattcaccagatgccatgtaagtggggctgggccctcgcgctgacaaatgtaatttag

SEQ ID NO: 117530 - DNA, 498 bp, synthetic construct
  misc_feature 1..498: note = Description of Artificial Sequence: Synthetic coding sequence
  source 1..498: mol_type = other DNA
atgaggccacaagagctccctcgtctggcgttccccctgctcttgctattgttactcctgttacccccacccccatgtccagcccacagcgccacaagatttgaccctacatgggaaagccttgacgcaagacagctgccggcatggtttgatcaggctaaatttggcatcttcatccactggggagtgttcagtgtccctagttttggcagcgagtggttttggtggtactggcaaaaagaaaagatccccaaatacgtggaattcatgaaggacaactatccaccctcattcaaatacgaggactttggcccattgttcaccgcaaagtttttcaacgcaaatcaatgggccgacattttccaggccagtggcgctaaatacatagtgctgacctccaaacaccatgaggcaacatgcagagacagcttcatgtggagaaaatcattcgatgagtattgggcacataccagatggcatcacttctgctctttttag

SEQ ID NO: 117531 - DNA, 498 bp, synthetic construct
  misc_feature 1..498: note = Description of Artificial Sequence: Synthetic coding sequence
  source 1..498: mol_type = other DNA
atgcgcccgcaagaactccctcggcttgctttccctttactgttgcttctgctcttattgctccccccccctccttgtcctgctcacagcgcaacacgcttcgatccgacctgggagtccctcgatgcccggcagctgcctgcttggttcgatcaggctaagtttggcatttttatccactggggcgtctttagcgtcccaagttttggtagcgaatggttctggtggtactggcaaaaagagaagatcccaaagtatgtggagttcatgaaggacaactacccgcctagtttcaagtacgaagattttgggcccctcttcaccgcaaaattcttcaacgccaaccagtgggctgacatattccaggcgtccggtgctaaatatatagtgctgacttcaaaacaccacgaggccacttgccgggattcttttatgtggcgcaaatcctttgatgaatactgggcacacacacgctggcatcacttttgcagtttctag

SEQ ID NO: 117532 - DNA, 330 bp, synthetic construct
  misc_feature 1..330: note = Description of Artificial Sequence: Synthetic coding sequence
  source 1..330: mol_type = other DNA
cagttggtggagactgtctcctgtggtggaaatctattgatgaacatcggccccactcttgacggtactatttctgtagtgttcgaagagagactgcgccagatgggctcctggctgaaggtgaatggtgaagcgatttacgagacccatacatggaggtcacagaatgacacagtgacccccgacgtttggtacacctctaagcccaaggagaaacttgtgtacgctatctttctcaagtggcctacttcgggccagttattccttggccacccaaaagccatactcggggccactgaggtgagaggaaacttcaccctctttctgtag

SEQ ID NO: 117533 - DNA, 1098 bp, synthetic construct
  misc_feature 1..1098: note = Description of Artificial Sequence: Synthetic coding sequence
  source 1..1098: mol_type = other DNA
atgtggcttcggagccaccgccagctttgccttgcatttctgctggtgtgcgtgctttcggtgatcttctttctgcatattcaccaggacagctttccacacgggctgggcctgtctatcctgtgtcctgacagacgcctggttactccaccggtggctatcttctgcttgccgggcacagcgatgggccctaacgcgagtagttcttgtcctcagcaccctgcttcactcagtggaacctggaccgtgtaccccaacggtcggtttgggaatcagatgggacaatatgccaccttgctggcactggcccagcttaatggaagaagagccttcatcttacccgccatgcatgctgccctggcccccgtctttagaattacactcccagttctagcccccgaggttgattccagaaccccctggcgggaacttcagttacacgactggatgagcgaggaatacgcagatctcagagatcctttcctcaagctcagtggttttccctgctcttggacctttttccatcatctgagggagcagatccgtagggaatttactctgcacgatcacctgcgtgaagaggcccagtctgtcctgggtcaacttaggcttggacggaccggagatcgcccaaggaccttcgtgggggtgcacgtgcggcggggggattatctgcaggtcatgccccagcgctggaagggagtggtgggagactcggcctacctcaggcaggcgatggactggttccgcgcacggcacgaagccccagtcttcgttgtcacatccaacggaatggagtggtgcaaggaaaatattgatacctcccagggagacgtgaccttcgccggcgacggccaagaggcaactccctggaaagattttgcacttcttactcagtgtaaccacacgatcatgacaataggcaccttcggtttttgggctgcatacctggccggaggcgacacagtctacctcgcaaattttactctgcccgactccgagttcctgaaaattttcaagcctgaggccgctttccttccggaatgggtgggaatcaatgccgaccttagcccgctgtggaccttggctaaaccctag

SEQ ID NO: 117534 - DNA, 1068 bp, synthetic construct
  misc_feature 1..1068: note = Description of Artificial Sequence: Synthetic coding sequence
  source 1..1068: mol_type = other DNA
atgtggctgcggtcacaccgacagctctgcctggcctttctgctggtgtgcgtgctgtctgtgatcttcttccttcatatccaccaggactcattccctcacgggctgggtttgtcaatattgtgtcccgatcggaggctagttacacccccagttgctattttctgcttgcccgggactgcaatgggaccaaacgcttccagctcgtgccctcaacaccctgcgtcactcagcggaacctggaccgtctaccccaatggacggtttggcaatcagatgggacaatacgctacattactggctctggcccagctgaatggaagaagggcgttcatcctgcctgccatgcatgcagcactggctcctccagaggtggattcacgtaccccgtggagggagctccaactgcatgattggatgtccgaggaatacgctgacctgagggatccattcttgaaattgagtggttttccatgctcttggactttttttcatcacctgcgcgagcagatccgccgcgagtttactctgcacgatcatctccgtgaagaggcccaatcagtgctaggccagctgagactgggaaggaccggagaccggccgcgcaccttcgtgggcgtccacgtgaggaggggcgattatctgcaggtgatgccacagagatggaagggtgtggttggggatagtgcgtacctgagacaggcgatggactggtttcgagcccggcacgaagccccggtgttcgtcgttacctcaaatggtatggagtggtgcaaggaaaatattgataccagtcagggcgatgtgactttcgccggtgatggccaggaagctaccccttggaaagactttgccttacttacacagtgcaatcacaccattatgactataggaacattcggcttttgggcggcctacctagccggcggagacacagtgtatctggccaattttacactgccagactctgagtttctgaaaatcttcaagccggaagctgctttcctcccggagtgggtcggaataaatgccgacctctctcccctctggacgctagctaaaccgtag

SEQ ID NO: 117535 - DNA, 1032 bp, synthetic construct
  misc_feature 1..1032: note = Description of Artificial Sequence: Synthetic coding sequence
  source 1..1032: mol_type = other DNA
atgttggtcgttcaaatgcccttctcttttccaatggcccacttcatcctgttcgtcttcaccgtgtccacaattttccatgtccagcagagattagccaaaatccaggcaatgtgggaactgccagttcagattcctgttctcgcttcaacttcgaaggcactgggcccgagtcagttaagggggatgtggacgataaatgcaattgggagactcggaaaccaaatgggggagtacgcaacactctacgcgctcgccaaaatgaacggaagaccagcgttcattccagctcagatgcatagcacattagcccctatttttcgcatcacgttaccagtgttgcactcagctaccgcatcaagaataccgtggcaaaactaccatctcaacgactggatggaagaggagtacaggcacattcctggcgagtatgtgagattcacagggtacccctgtagctggacattctatcaccaccttaggcaggagattttacaggagttcacactgcacgaccacgttcgagaagaggcgcaaaagtttctccggggactccaggtgaacggtagtaggcctggaaccttcgtgggtgtacacgtcagaaggggagactacgttcacgtgatgcccaaggtgtggaagggagtggtggccgatagaaggtatctgcaacaggccctggattggtttcgcgctaggtattcttccttaatattcgtggtgacttccaacggcatggcctggtgccgcgaaaatatcgacactagccatggcgacgtcgtgttcgccggtgatggcatcgaggggtcaccggccaaggattttgccctgctgacccagtgcaaccatacgataatgaccattgggacgttcggcatctgggcggcctatctcactgggggggacacgatctacctggccaattatacacttccagattcaccattcttaaaaatctttaaacctgaagccgcctttctgccggagtggaccggcattgccgccgatctttctccgctgcttaaacactag

SEQ ID NO: 117536 - DNA, 1032 bp, synthetic construct
  misc_feature 1..1032: note = Description of Artificial Sequence: Synthetic coding sequence
  source 1..1032: mol_type = other DNA
atgctggttgtccagatgccattcagcttccccatggcccactttatcctgttcgtcttcaccgtcagtacaatattccatgtccagcagcggctggctaagatacaggccatgtgggagctgcccgtacagatccctgtgttagcatctacctccaaggccttgggcccatctcagcttcgcggcatgtggacaattaatgcaattggccgcctggggaatcagatgggagaatatgcaactctgtacgccctggccaaaatgaatgggagaccagccttcattcccgcccaaatgcactccactctcgccccaatcttccggattacattaccggtcctccattccgccacagcaagtcgaatcccatggcagaattaccacctgaacgactggatggaggaagagtataggcatatcccaggagagtacgtccgttttactggctatccgtgcagttggacattctaccatcacttgaggcaggagatcctgcaagagtttaccctgcacgaccacgtccgcgaggaagcacagaagttcctccggggattgcaggttaacggttctcggcccggcaccttcgtcggagttcatgtgaggaggggagactacgtgcacgtgatgcctaaagtgtggaaaggcgttgtcgctgaccggcggtatttacaacaggccctcgactggttcagggctcgatatagctcccttatttttgtggtcacatctaatggcatggcttggtgtcgagaaaacattgatacttcccacggtgatgtcgtgttcgctggggatggtattgaaggatcaccagccaaggatttcgccctcctaacccagtgtaatcataccattatgactatcggcacatttggtatctgggctgcctatctgactgggggcgacacgatctacctggccaattataccctgcctgattccccgttcctgaaaatttttaaacctgaggccgcttttttgcctgaatggacgggcattgcggctgacctgtcacctctccttaaacattag

SEQ ID NO: 117537 - DNA, 663 bp, synthetic construct
  misc_feature 1..663: note = Description of Artificial Sequence: Synthetic coding sequence
  source 1..663: mol_type = other DNA
atgttggtggtgcagatgcccttctccttcccaatggctcacttcattctgttcgtgttcaccgtgtccaccatttttcacgtacaacagcgcctcgccaaaatccaggccatgtgggaactgcccgtgcagataccagtgttggcctcaacgagcaaggccttaggaccatcccagctgagagggatgtggactattaatgcaataggccggctggggaaccagatgggcgagtatgctacattgtatgccctcgctaagatgaacggtcgacccgcctttatacccgctcaaatgcactccacactggcgcccatattccggatcaccctgccggtgttgcactcagccacagcttcacgtataccatggcaaaactaccatctcaacgactggatggaggaggagtacagacacataccaggggaatacgtacgtttcacgggatatccatgttcctggaccttttaccatcacctaaggcaggaaatcctccaggagttcacgctgcatgatcacgtcagggaagaggcacagaagtttctgagagggctccaggtgaatgggtcaaggcccggaacattcgttggtgttcacgtcaggcgtggagattatgtccacgttatgcccaaagtgtggaagggggtagtggccgatcggtag

SEQ ID NO: 117538 - DNA, 1086 bp, synthetic construct
  misc_feature 1..1086: note = Description of Artificial Sequence: Synthetic coding sequence
  source 1..1086: mol_type = other DNA
atggacccgctgggggccgcaaagcctcagtggccctggcggcgctgcctggccgcactactttttcaactcttggtcgcagtgtgcttttttagttacctgagagtttccagagatgatgccacgggatcgccacgggcaccatccggctcgtcccggcaggatacaactcccactagacccacattgctgattttgcttagaacctggccatttcacatccccgttgccctcagcagatgctcggagatggtcccaggcactgccgactgtcacattactgcagatcgaaaagtatatccccaggctgacatggttatcgtacatcactgggacatcatgagcaacccaaagagtagattgcccccaagtccccgtccacaggggcagcggtggatatggttcaacctggaacccccccctaactgccaacacctggaagccctcgatcgctatttcaacctgaccatgagttaccgctctgatagtgatatctttaccccttacggatggctggagccatggtccgggcagccagcgcaccctccactgaatctcagcgcgaaaactgagctcgtcgcctgggccgtgtccaattggaagcccgactcagctagagtgcgctattaccagtcactccaggcacatttgaaagtcgatgtgtacggtagatcgcacaaacccttgccgaagggcacaatgatggagaccctgagtagatataaattttatctggccttcgagaactcacttcaccctgattacatcactgaaaagttatggcgaaacgccctggaagcttgggccgtgccagtagtccttggacccagtcgatctaattatgagcgattcctgccccccgatgcctttatccacgttgacgattttcagagccctaaagatcttgctagatatcttcaagagttagacaaggatcatgctcgatatttgagctattttcgatggcgcgaaactcttaggcctcgctcattcagttgggctttggatttttgtaaagcttgctggaagctgcagcaggagtcaaggtaccagacagtgcgatctatagccgcatggttcacttag

SEQ ID NO: 117539 - DNA, 1086 bp, synthetic construct
  misc_feature 1..1086: note = Description of Artificial Sequence: Synthetic coding sequence
  source 1..1086: mol_type = other DNA
atggatcccctcggcgcagccaagccacagtggccatggaggaggtgcctagcagccctgctcttccagcttctcgtggcggtgtgctttttttcctacctgagggtgtctcgggacgacgcgaccggctcccccagagccccttccggtagctcacgccaggatactacgccgaccaggccaaccctgctcatcctgctcagaacatggccttttcacatcccagtggccctgagccgatgctcggaaatggtccctggaaccgctgattgtcacatcactgcagataggaaagtgtacccacaggcagatatggttatcgtgcaccactgggatattatgagcaaccccaagtcccggttgcctccatccccaaggccccagggccagcgatggatctggtttaacctggagcctcccccaaactgtcagcatttggaagctctcgacaggtactttaacctgacgatgagctaccgctcagattccgacatcttcaccccatatggatggctggaaccctggagtgggcagcccgcgcacccacccctgaacctgagtgccaagactgaactcgtcgcctgggcggtgagcaactggaaaccagactctgcacgtgtgcggtattaccagagtctacaagcacatctgaaggttgatgtctacggaagatcacataagccactcccgaagggaaccatgatggagactctctctaggtacaaattctacctagcttttgagaattcgctgcaccccgactatatcacagagaagttatggaggaacgcactggaggcctgggcagtccctgtggtgctgggcccctctcgcagtaactacgagagattccttccacccgacgcttttatccatgtcgatgacttccaaagtccgaaggaccttgccagatatctgcaggaactagacaaagaccatgcaagatatctctcctacttcagatggagggaaaccctaagacctcggtccttttcatgggcattagatttttgtaaagcgtgttggaaactgcagcaggagtcccggtaccaaacagttcggtccatcgccgcctggtttacatag

SEQ ID NO: 117540 - DNA, 1086 bp, synthetic construct
  misc_feature 1..1086: note = Description of Artificial Sequence: Synthetic coding sequence
  source 1..1086: mol_type = other DNA
atggatccattgggggctgccaaacctcagtggccttggcgtagatgcctcgctgccctgctgtttcaactacttgtcgcagtgtgcttttttagctacctaagagtgtctagagatgatgccaccggttctcccagagctccgtcagggtcgagtaggcaagacacaactcccacacgccctacgcttctaattctgcttcgaacctggccttttcatattccggttgctttgtctcgctgctctgaaatggttcccggcactgcggactgccatatcaccgccgaccgtaaggtatatccacaagcggacatggtcatcgtgcaccactgggatattatgagtaatcccaagagccgcctgccaccgagcccacgccctcaaggccagcggtggatctggtttaacctcgaaccacctccgaactgccagcacttggaagccctggaccggtattttaaccttacgatgtcttaccgcagcgacagtgacatcttcactccttacggttggctagagccctggtctgggcagccagcccacccaccactgaacctgagcgcaaaaaccgagctggtcgcgtgggctgtaagcaattggaaacccgatagtgcaagagtgcggtactatcagagcttgcaggcccatctcaaagttgacgtctatggcaggtcccacaaaccacttccaaaaggtaccatgatggagactctgtccaggtacaagttttatctggcctttgagaattccttacacccggactatattaccgagaaactgtggcggaacgcactcgaggcctgggcagtaccagttgtactgggcccttccagaagcaactatgaaaggtttctcccccccgatgcatttatccatgtggacgacttccagtcgcccaaagacctggctcgctatctgcaggagctcgataaagatcacgcgcgctacctgtcatactttcggtggagggagacacttcgcccgcgctcgttctcctgggcactagatttttgtaaggcctgttggaaattgcagcaggaatcccggtatcagacggtacggagtatcgcagcctggtttacgtag

SEQ ID NO: 117541 - DNA, 1086 bp, synthetic construct
  misc_feature 1..1086: note = Description of Artificial Sequence: Synthetic coding sequence
  source 1..1086: mol_type = other DNA
atggaccctttgggcgccgccaagcctcagtggccctggcgacggtgtttggccgccctgctgtttcagctacttgttgccgtgtgcttcttttcttacttacgggtttcaagggatgatgctacgggttccccccgcgcgccatctggtagctcgcggcaagatacaactcccaccagacctacactgctaattctgcttcggacttggccatttcacattcctgtggccctttctaggtgctctgaaatggttcccggcacagcagattgccacatcacagcagacagaaaagtctacccccaggcggacatggtgattgtacaccattgggacatcatgtccaaccccaaatctcgattgccccctagtcctcgcccacaaggccagagatggatctggtttaatttggagccacctccaaattgtcaacacttagaggctcttgacagatacttcaacctgactatgtcatacagatcagactctgacattttcaccccttacgggtggttggagccttggtcaggccagcctgcccatcccccactgaatctcagcgcaaagacagaactcgtggcgtgggctgtcagcaactggaagcccgacagcgccagagttcgatattatcaatctctccaggcgcacctgaaggttgacgtctacggccgctcgcacaaaccgctcccaaagggcaccatgatggagacactgtcaagatacaagttttatcttgcctttgagaactccttacatcccgactacatcactgagaaactgtggcgcaacgcccttgaagcctgggcagttccggtggtcctgggtccatcccgcagcaactatgaaaggttcctccccccagacgcattcattcatgttgacgattttcagtcccccaaggatctggccagatacctccaagagctggataaggatcatgcgcgttacctgagctacttccggtggagggagaccctgcggccccggagtttcagctgggccctggatttttgcaaggcatgctggaagttgcaacaggagtccagataccagactgttaggagtattgcagcttggttcacctag

SEQ ID NO: 117542 - DNA, 1593 bp, synthetic construct
  misc_feature 1..1593: note = Description of Artificial Sequence: Synthetic coding sequence
  source 1..1593: mol_type = other DNA
atgcggaggctgtggggggctgcgcggaaacccagcggggcaggctgggaaaaagagtgggccgaggccccgcaagaggctcccggggcctggagtggacggctcggcccaggacggtccggccgcaaagggcgggctgtccccggatgggcaagctggcctgctcatctggctctggctgccaggcctgcccgacatctgggcggagccggccagggtccaagacctcttcactccggcacggcaccatttcacagtcgcgcatctggtgaaagacagagacgcctcgaaccccagctgcagcatgaaagcagatgtcgctcatcaactcctgctgatgcctggcgcgcagaagcggccctccccgtccgagccatgggcgccccttgggggtcacctactgccgccgcaggagggagaagggggtggcgccggggtagaggtctgccttggacagtatgcgttctggccgccgctggcctgacctgcacggctctcatcacatatgcctgctggggacagctccctcctttgccctgggcctcaccaactccaagtagacccgtcggggttctcctgtggtgggaacctttcgggggcagggacagtgcaccccgccccccaccagactgtcgcctgaggttcaacatatccggctgtaggttgctgactgacagagcttcctacggagaggcacaggctgtcctgttccaccacagggacctggtgaagggccctccggattggcccccaccctgggggattcaagcccatacggccgaagaagtcgacctaagagtactggactacgaggaagccgcagccgcagccgaggccctggctacctcgagtccacgaccccccggacagcgttgggtttggatgaatttcgaatccccgtcccacagtccaggcctaagaagcttggccagtaacttgtttaattggaccttgagctatcgggccgactctgacgtgtttgttccctacggctacctgtatccccgctctcaccccggggaccctccttctgggctggcccccccattatcacgcaaacaagggcttgttgcttgggtggtcagtcactgggatgaaagacaggctagggtcagatactaccaccaacttagtcaacacgtgaccgtcgatgtcttcggcaggggcggtcctgggcagcctgtccccgaaatcggcctgctgcatacagtggcccgctacaagttttacttagcgttcgaaaactcgcagcacctggattatatcaccgaaaagctctggaggaatgcccttctcgcgggcgctgtccctgtagtgcttgggcccgatcgcgcaaattacgagcgtttcgtgccccggggagccttcatacacgtggatgactttccaagcgcaagtagtctggcttcctacctgctgtttttggataggaatccagccgtgtatagaaggtatttccactggaggcgctcatatgcagtgcacattacctcattctgggacgagccctggtgcagggtttgccaggccgtgcagagagcgggcgaccgccccaaaagcataaggaatttagcatcctggtttgagcggtag

SEQ ID NO: 117543 - DNA, 1125 bp, synthetic construct
  misc_feature 1..1125: note = Description of Artificial Sequence: Synthetic coding sequence
  source 1..1125: mol_type = other DNA
atggaccccttgggacccgcaaagccacagtggctctggagacgttgcctggctggcctcttattccagctccttgtggccgtttgtttcttttcatacctgcgcgttagccgagatgatgctaccggctcaccccgacctggattgatggccgtggaacccgtgactggggcccctaacggcagccgctgtcaggattctatggctacacctgcgcacccaacactcctcatactgctctggacttggccttttaatacacccgtggcccttccccggtgctctgagatggtcccaggggctgcagattgtaatattaccgccgattcaagcgtgtacccacaggctgatgcggtgatcgtgcatcactgggacattatgtataacccaagcgcaaatctccccccacctacacggccgcagggacaacggtggatctggttctcaatggagtcacctagcaattgcagacatttagaggccttggacggatatttcaacctcactatgagctaccgatccgactcagatatatttaccccgtacggatggcttgagccatggtctggccagcccgcacatccaccgctcaacctttcagccaagacagagctcgtggcctgggctgtgagtaactggaagcctgacagtgccagagtgcggtattaccagagtcttcaggcccatttgaaagtcgatgtctatggccggagtcacaagcccttacccaaagggacaatgatggagacgctgtctcggtacaagttctacttggcgttcgaaaactcgttgcatccagactatatcaccgaaaagctatggcgaaatgccctggaggcgtgggccgtccccgttgtcctgggaccctctcgcagcaactatgaaaggtttttgcctcccgatgccttcattcacgtcgatgattttcagagtcccaaggatctggctcgctacctccaggaattagataaggaccatgcgaggtacctttcttacttccactggagggaaaccctgcgacctaggagcttcagctgggctctggctttttgtaaagcctgctggaaactgcagcaggagtctcgctaccagaccgtgcggagcatcgccgcctggttcacatag

SEQ ID NO: 117544 - DNA, 1125 bp, synthetic construct
  misc_feature 1..1125: note = Description of Artificial Sequence: Synthetic coding sequence
  source 1..1125: mol_type = other DNA
atggacccactgggcccggccaaaccacagtggctttggcgacggtgcctcgcagggctcctgttccagctcctcgtagcggtttgtttcttctcatacttgcgagtgtcccgcgatgacgctacaggaagccctcgaccgggactgatggccgtagagcctgtcaccggcgcacccaatgggtctcgatgccaagatagcatggccactcctgcccatcccaccttactgattctcctttggacatggccgttcaatactccagtcgccctgccccgctgtagcgaaatggtccccggtgccgctgattgcaatattacggctgacagctctgtctaccctcaagcagacgcagttatcgtgcaccactgggacatcatgtataacccttcagctaacttaccaccacctacacggcctcagggccagagatggatctggttctccatggaatctccaagtaattgccggcatctcgaggccttggacggctattttaatctcaccatgtcctataggtccgattctgatatcttcacaccatatggatggttagagccgtggtctggccagcccgcccatcctccccttaatctctctgcaaagaccgagctggtggcctgggcagtatctaactggaaacccgactcggcccgagtgagatattaccagagtctccaagcccaccttaaggtggatgtatacggcagaagccacaagcccttgccgaaaggtactatgatggagacactctcacggtacaaattctacttggcgtttgaaaacagccttcatcctgattatattacagaaaaactgtggcggaatgctttggaggcttgggccgtgcccgtggtgctcggaccctctagatctaactacgagaggtttctcccgcccgatgccttcatccatgtggatgatttccagtcccctaaagatttagctagatacctccaagaactagacaaagaccacgccaggtatctgagttacttccactggcgggaaacgctgaggccccgtagcttctcttgggcactcgcattttgcaaggcatgctggaagctccagcaggagagcagataccagaccgtgcggagcatagccgcatggttcacctag

SEQ ID NO: 117545 - DNA, 1080 bp, synthetic construct
  misc_feature 1..1080: note = Description of Artificial Sequence: Synthetic coding sequence
  source 1..1080: mol_type = other DNA
atggaccctctgggacctgcaaaacctcaatggagctggagatgctgcctgaccacgttgctctttcaactgctcatggccgtttgtttctttagctaccttcgtgtatcacaggacgatccgacagtctaccctaatggaagcagatttcccgacagcaccgggactccagcgcactctataccgctcatcttgctttggacatggccttttaacaaacccattgcactgccaagatgcagtgaaatggtgcccggcacagccgactgcaatataacagctgataggaaggtgtacccccaggcagatgcggttattgtgcatcacagggaggtcatgtacaacccatcagcgcaactgcccagaagcccccgccggcagggacagaggtggatctggttcagcatggaaagtcctagccattgttggcagttgaaagcaatggatggctattttaacctgacaatgagctatagaagtgacagcgacatttttacgccgtacggatggctagaaccatggtctgggcaacctgcccaccctccactgaatctgagcgcaaagacagagctggtggcttgggccgtatcaaattggggaccgaactccgcccgggtacgctattatcagagcctacaggctcacttaaaggtggacgtgtacggtagatcccacaaaccactgcctcaaggaacgatgatggaaacactttcaaggtataaattctatctcgccttcgagaatagcttgcaccctgactacatcaccgagaagctctggaggaatgccctggaggcctgggctgttcccgttgtccttggcccctctcggagtaactacgaacgctttctgccacccgatgccttcatacacgtggacgattttcagtccccaaaggacctggcgaggtacctacaggaactggataaggaccatgcacggtacttgtcctatttcaggtggcgcgagacactgcggccccggtcctttagctgggctctcgccttttgcaaagcttgctggaagcttcaggaggagtctcgctaccagaccagagggatagccgcatggttcacttag

SEQ ID NO: 117546 - DNA, 1080 bp, synthetic construct
  misc_feature 1..1080: note = Description of Artificial Sequence: Synthetic coding sequence
  source 1..1080: mol_type = other DNA
atggatccattgggtccggctaagccccagtggagttggcgatgctgcctgaccaccctcctatttcagctgttgatggcggtgtgtttcttttcttatttgcgcgtgtcacaggacgatcccacggtgtatcccaacggtagccggttcccagactcaactgggacacccgctcattcaatccccctgattttgctttggacctggccattcaataagcctatcgccctccctcgctgtagcgagatggtccccggcacggccgattgtaacattactgctgacaggaaagtttaccctcaggctgacgcagtgattgtgcaccaccgcgaggtcatgtacaacccttccgctcagctcccacggagtccgaggaggcagggtcagcggtggatctggtttagcatggaaagtcccagccactgttggcagctgaaagccatggatggatacttcaacctgacaatgagctatagatccgatagcgatatcttcactccatatggctggctggagccctggagtgggcaaccagcccaccctccactgaatttgtccgctaagacggagctagtggcgtgggcggtttccaattggggtcccaacagtgcccgcgtgagatactaccagagcctgcaagcccacctgaaggtggatgtttacgggcgaagccacaaaccactgccccaggggacaatgatggagactctgagtagatacaagttctatctggcgttcgaaaatagcttacatccggattatataacagaaaaactgtggagaaacgccttggaggcctgggcggtacccgtggtgctgggaccaagccggtctaattatgagcggttccttccccctgatgcatttatccacgtggacgatttccagtcccctaaagacctcgccaggtatctgcaggagctcgataaagaccacgcccgctatctgtcgtactttagatggagagaaacactcaggccacggtccttttcttgggcactggctttctgtaaggcttgttggaagctgcaagaagagtcccgttaccagactcgaggcattgctgcttggttcacttag

SEQ ID NO: 117547 - DNA, 1098 bp, synthetic construct
  misc_feature 1..1098: note = Description of Artificial Sequence: Synthetic coding sequence
  source 1..1098: mol_type = other DNA
atggacccactcggacccgcaaagcctcaatggagttggcgctgctgtctgaccaccctgctgtttcaactcctaatggctgtgtgcttcttctcctatctcagggtgagccaggatgaccccacagtgtatcccaacggttctaggtttcctgattcaacagggaccccagctcatagtatcccattaatactgttgtggacctggccttttaacaagccaatagcgctgcctcgctgtagcgagatggtaccaggcaccgcagattgtaatatcaccgctgatcgaaaggtgtaccctcaagcggacgccgtcatcgtgcaccatcgtgaagttatgtacaacccctcggcccaactgccaaggtcccctcgccggcagggacagcgctggatttggttcagtatggaaagccctagccactgctggcagctgaaggcaatggatggatacttcaatttaacgatgtcttaccgctccgattctgacatttttaccccctacggttggctcgaaccatggtccgggcagcctgcccacccaccacttaacctctccgctaagactgagctcgtcgcctgggcagtctctaattggggaccaaactccgcccgggtaaggtactatcagagcctgcaggctcacctcaaggtggacgtctacggtcgcagccataagccactcccccagggcacaatgatggagaccttgtcgaggtataaattctacctggctttcgagaactctctgcatccggattacataacagagaagctgtggcgcaacgccttggaggcttgggccgttccagtggtgttgggaccctccaggtccaattacgagaggtttcttccacctgatgccttcatccacgtcgatgactttcagagtcccaaggacctggctaggtacctccaggagctggacaaggatcatgctcgctatctaagctactttaggtggcgggagaccctacgaccccggagtttcagttgggctttggccttctgcaaagcttgctggaagctacaggaagaatccagatctggcggccttatctatttacgtacaagattaccagaggctagtcccgcatag

SEQ ID NO: 117548 - DNA, 1080 bp, synthetic construct
  misc_feature 1..1080: note = Description of Artificial Sequence: Synthetic coding sequence
  source 1..1080: mol_type = other DNA
atggacccgctcggaccggcaaagccacaatggagctggagatgctgtctgacgactctattgttccagctactcatggccgtttgcttctttagctatctccgagtgtcccaggacgatcccacagtttatcctaacggcagtaggttccccgactccacgggtactcctgctcatagcatcccactgattctcctgtggacttggcctttcaacaaacctatcgctctccctaggtgcagtgagatggtgcccggcaccgccgactgtaacattactgccgatcgcaaagtttaccctcaggccgacgcggttattgtgcatcacagagaggtcatgtataatccatccgcacagctgcctcggtctccacgcagacaaggacaacggtggatctggttcagtatggaatccccgtctcactgctggcaattaaaggccatggatggctattttaatcttaccatgtcatatagatctgattccgatatattcacaccgtatggctggttggagccctggagcggacagccagcgcacccccctctgaacctgtcagctaagactgagcttgtggcatgggccgtctccaactggggccctaattcagctagagtgcggtactatcagtccctacaggcacacctgaaagtggatgtatacggaagatcccacaaaccattgccacagggcaccatgatggagaccctgagcagatacaagttctacctggcttttgagaactccttgcatcccgattatattaccgagaaactttggcgcaatgcgctggaagcatgggcagttccagtcgtgctggggccgtccagatcgaattacgaacggttcttgcctcccgacgccttcatccatgtagacgacttccaatccccgaaagatctggccagatacctgcaggaattggacaaagatcacgcccgatacctgtcttacttccgttggagggagacactccggccgagaagcttcagttgggcccttgccttctgcaaggcctgttggaagctgcaggaggagagtagataccagactcggggtattgcggcctggttcacttag

SEQ ID NO: 117549 - DNA, 1080 bp, synthetic construct
  misc_feature 1..1080: note = Description of Artificial Sequence: Synthetic coding sequence
  source 1..1080: mol_type = other DNA
atggatccactcggccccgccaagcctcaatggtcgtggcgctgctgtctgaccaccttgttgtttcagctactcatggcggtgtgctttttctcttacctcagagtctcacaggatgatcccactgtgtacccaaacggttcaagattccctgactccacgggtacacctgcccattctataccgcttatccttctttggacctggccctttaataagccgattgcgctgcctcggtgcagcgagatggtgcctggcaccgcagactgcaacatcaccgccgataggaaggtatacccccaggcggatgctgtgatcgtacaccatcgcgaagtaatgtataatccctcggcccaactgccacgaagtcccaggcggcaaggacaacgttggatctggttctccatggaatctcctagccattgctggcaactcaaggcgatggatggttatttcaacctcacaatgtcataccggtcagattccgacatctttaccccttacggctggctcgagccgtggtcgggccaacctgcccacccacctttgaacctgtcggcaaaaacagagctagtcgcctgggcggtgtccaattggggacctaattcagccagggtaagatactaccagagcctgcaagcccacctgaaggtggacgtgtacgggcgcagtcacaagccgcttcctcaggggacaatgatggagacactgtctagatataagttctatttagcatttgagaactccctccaccctgactacattacagagaaactctggagaaatgctctggaagcatgggcagtgcctgttgtgttgggaccctctagaagcaactacgaacgctttctgccaccagacgcattcattcatgttgacgatttccagagccctaaagacttggcgcgttacctgcaagagcttgataaagaccatgctcggtatctgtcatatttcagatggagagaaaccctgcgcccacgatcattctcttgggcactggcgttctgtaaggcttgctggaagttacaggaggaaagccgttatcagacacgcgggatcgccgcgtggttcacatag

SEQ ID NO: 117550 - DNA, 93 bp, synthetic construct
  misc_feature 1..93: note = Description of Artificial Sequence: Synthetic coding sequence
  source 1..93: mol_type = other DNA
atggacccactgggtccggcaaaacctcaatggtcttggaggtgctgtctgactaccttgctgttccaactgctaatggcagtgtgcttctag

SEQ ID NO: 117551 - DNA, 414 bp, synthetic construct
  misc_feature 1..414: note = Description of Artificial Sequence: Synthetic coding sequence
  source 1..414: mol_type = other DNA
atggatcctctaggaccagcaaagccccagtggagttggcggtgctgtttgacaaccttgttattccagctgctgatggccgtgtgctttttctcatacttgagggtgtcgcaggatgacccgaccgtctaccctaatggctcccggttccctgactctaccggaactcctgcacattccattccacttatccttctgtggacttggccgtttaataagccaattgcgctgccacggtgttcagagatggttccaggtacggcagattgcaacataaccgcagaccggaaagtctatccccaggccgacgccgtgatcgtccatcacagggaagtcatgtacaatccttccgcccaactcccgcggagcccacgcagacagggacagaggtggatctggttttccatggagtag

SEQ ID NO: 117552 - DNA, 210 bp, synthetic construct
  misc_feature 1..210: note = Description of Artificial Sequence: Synthetic coding sequence
  source 1..210: mol_type = other DNA
atggatccactgggccctgccaaaccgcagtggagctggagatgttgcctgactacgctactgttccagcttctcatggctgtctgtttttttagctacctccgcgtgagtcaggacgaccccaccgtataccccaacggtagtaggtttcctgattcgacaggaaccccagcccacagtatccctctgatcctgctctggacctggtag

SEQ ID NO: 117553 - DNA, 201 bp, synthetic construct
  misc_feature 1..201: note = Description of Artificial Sequence: Synthetic coding sequence
  source 1..201: mol_type = other DNA
atggaccctctgggtcccgccaagcctcagtggagttggcgctgctgtttaactacgctccttttccagctcctcatggccgtgtgttttttctcttacttgcgggtctctcaagatgatcctacagtctacccaaacggttctagattccctgatagcaccggaaccccagcccactcgataccattgatcctcctctag

SEQ ID NO: 117554 - DNA, 138 bp, synthetic construct
  misc_feature 1..138: note = Description of Artificial Sequence: Synthetic coding sequence
  source 1..138: mol_type = other DNA
atggatccactcggccctgcaaagccccagtggtcttggcggtgctgcctgacaaccttattgtttcagttactgatggcagtgtgcttcttctcctatttgagggtgtcccaggatgacccgaccgtgtacccatag

SEQ ID NO: 117555 - DNA, 1029 bp, synthetic construct
  misc_feature 1..1029: note = Description of Artificial Sequence: Synthetic coding sequence
  source 1..1029: mol_type = other DNA
atgaataacgcaggacatgggccaacaagacgtttgcgagggctgggggttcttgccggcgtcgccctgttggccgctctctggctgctgtggctgctcgggtctgccccccggggaacacccgccccccagcctaccatcaccattctggtttggcactggccttttaccgatcaacccccagaattgccttctgatacctgcacccgctacggcattgccaggtgccatctgagcgctaatcggtcactgcttgcctccgccgacgctgttgtttttcaccaccgggagcttcagacaagacgtagccacctgcctcttgcgcagaggccacgaggccagccatgggtgtgggcctctatggagagcccatcccacacgcacggcttgagtcacctgcggggcatttttaactgggtcttatcttatcgccgcgattcagatatcttcgtgccatacggcagattagagcctcattgggggccatccccaccgctccctgccaagtccagagtggctgcctgggttgtgtccaacttccaggagagacagttacgcgcaagactataccgtcagctggcacctcacctgcgagtcgacgttttcggacgcgcgaacggccgacctctatgcgcaagctgcctcgtgcctactgtggcgcagtaccggttctatttaagttttgaaaatagtcaacacagggattacatcacagaaaagttctggaggaatgccttagtcgccggcacagttccagtggtcctcggacccccccgagcaacctatgaggcgtttgtgcccgcggatgcattcgttcacgtggacgactttggatccgctcgggaactggcagcattcctgacaggtatgaatgagagccggtatcagcgtttttttgcctggagagatagactgcgggtgcgactcttcactgattggagggagagattttgtgcaatttgtgaccggtacccgcatttgccccggtcacaggtgtacgaggatctcgaggggtggtttcaggcttag

SEQ ID NO: 117556 - DNA, 1728 bp, synthetic construct
  misc_feature 1..1728: note = Description of Artificial Sequence: Synthetic coding sequence
  source 1..1728: mol_type = other DNA
atgcgaccctggactggatcctggcggtggataatgctgatcctctttgcctggggcacattgctgttctacattgggggccacctggtccgggacaacgatcaccccgatcattcttcaagagaactttctaaaatcttagccaagctggagagattgaaacagcagaatgaagatctgaggcgcatggcggaatctctgcgcattccagaagggcccatcgaccagggccccgccattgggagagttcgcgtgctggaagaacagttggtaaaggccaaagaacagatcgaaaactataagaaacaaaccaggaatgggcttggaaaggatcacgagattctgcggagaaggatagagaatggcgccaaagagctatggttcttcctccagagcgagctcaagaagctgaagaatctggagggcaatgagctgcagaggcacgctgatgagtttctgttggatctgggacaccatgaaagaagcatcatgactgacctgtattatctctcccagacagatggcgccggagactggagggagaaagaggccaaagacctaaccgagctagtgcaacggaggattacttacttgcagaatccaaaagattgttcaaaggcaaagaaactggtttgcaacattaacaaagggtgcggctatgggtgtcagctgcaccacgtggtgtactgtttcatgatcgcttacggcactcagagaacacttatcctggaatcacaaaactggaggtatgccaccggtggatgggagaccgtattccggcccgtatctgagacctgtacagatcgcagtggcatttcaaccggtcattggtccggcgaggtcaaggacaaaaacgttcaggtggtggaactccctatcgtggactcattgcatccccgccccccttacctcccattggccgtccctgaagacttggccgatagactggtccgagtgcacggagaccccgccgtgtggtgggtgtcgcagttcgttaagtatctcatacggcctcagccctggttagagaaggagattgaggaggcgaccaagaaactgggtttcaagcaccccgtgattggcgtgcatgttagacgaactgataaggtgggaacggaggcggcatttcatcctatcgaagagtatatggtgcacgtcgaagaacatttccagctgctggctagacgcatgcaggttgacaagaagagggtttacctggcaacagatgatccttctttactaaaagaggcaaagaccaagtatcccaactatgaattcatctctgacaactctattagttggtctgccggccttcacaatcgctacacagaaaatagcctcagaggagtcattctcgacatccacttcctctcacaggctgacttcttagtttgtacattcagcagccaggtgtgccgtgtggcatatgagatcatgcagactctgcacccagatgcctcagctaactttcactcactggacgacatctactattttggcgggcaaaacgcacataaccaaatcgctatctacgcacaccagccccgaaccgccgatgagattccaatggaaccgggtgacataattggggtggcaggaaaccactgggatggctactccaagggggtcaacagaaagcttgggcggacagggctgtacccatcatacaaggttagggagaagatcgagactgtcaaatatcctacttatcctgaggccgagaagtag

SEQ ID NO: 117557 - DNA, 1728 bp, synthetic construct
  misc_feature 1..1728: note = Description of Artificial Sequence: Synthetic coding sequence
  source 1..1728: mol_type = other DNA
atgcggccctggacaggatcctggagatggatcatgctgattctttttgcctggggaaccctgctattttacataggaggccacttagtgagggacaatgatcaccctgatcattcgtcaagagaactgagcaagatcctcgcaaaactggagcggctgaagcagcagaacgaagatttgcgaagaatggctgaatccttaagaattcctgaaggcccaatagaccaaggccctgcaatagggcgagtgagagtcttggaggagcaactcgttaaagctaaggagcagattgaaaactacaagaagcaaactcgcaatgggctgggaaaagatcacgagatcctaaggcggagaatagagaatggtgcaaaggagttgtggtttttcctccagagcgagctcaaaaaactgaagaatttggaaggtaatgaactacagaggcacgccgacgagttcctcctggacctgggtcatcatgagcggtctatcatgactgatttatactatttaagtcagactgacggagcgggtgattggcgagaaaaagaggcaaaggatctgaccgagttagtgcagcggagaatcacctacctccagaacccaaaagactgttctaaagccaaaaagctggtttgtaacattaataaaggttgcggttatgggtgccagttgcaccacgtcgtctattgctttatgattgcttatggaacgcagcgcacacttattctcgagagtcagaattggaggtacgctactggagggtgggagaccgtctttaggcccgtatcggagacctgtacggaccgttcggggatttccaccggacactggtccggcgaagtgaaggacaagaacgtgcaggtggtcgagcttcctatcgttgattccctgcacccgcggcctccttaccttcccctggcggtccccgaagatctggccgacagattggtgcgggttcacggggaccctgccgtatggtgggtttctcagttcgtgaagtatctaattcgcccacagccctggcttgaaaaggaaatcgaagaggccaccaaaaaactggggttcaaacaccctgtgattggtgttcatgtgaggagaaccgataaagtgggtaccgaggcagccttccatccgatcgaagaatatatggtgcatgtcgaggagcatttccagctcttggcccgccggatgcaagtggacaagaaaagagtgtatctggccacggatgacccatccctcttaaaggaggccaagactaagtaccccaattatgaatttattagcgacaattctatttcctggtccgccggtctgcataatcgatatacagaaaactctctgcgcggggtcattctcgacattcatttcctctcccaggctgacttcctggtgtgtacttttagttctcaagtgtgtagagtcgcatacgaaataatgcaaaccttgcaccccgatgcttccgcaaattttcacagcctggatgatatctattattttgggggtcagaatgcgcacaatcagatcgcaatttacgctcaccagcctcgtaccgcggacgagatcccaatggaaccaggggacataatcggtgtagccggaaaccattgggacggctacagtaaaggcgtcaataggaagttggggcggacaggattataccccagctacaaggtccgggaaaaaattgagaccgtgaagtacccgacctacccagaggctgagaagtag

SEQ ID NO: 117558 - DNA, 1728 bp, synthetic construct
  misc_feature 1..1728: note = Description of Artificial Sequence: Synthetic coding sequence
  source 1..1728: mol_type = other DNA
atgcgcccctggacaggcagctggcgctggatcatgctgattctgttcgcgtgggggactctgcttttctatatcgggggccacctagtcagggacaacgatcaccccgatcattcgtcacgcgagctcagcaaaatcctagccaagctcgaacggctgaagcagcaaaacgaggaccttagacgcatggccgagtctttgcgcatccctgagggaccaatcgatcaaggaccggctatcgggcgcgtaagagtgcttgaggagcaactggttaaggccaaggagcagatcgaaaattataagaagcagacgagaaacgggctaggtaaagatcatgaaatccttaggcgccgcattgagaacggtgctaaagagctttggttcttcctccagtccgagctaaaaaaactcaaaaacctcgaggggaatgaactccagcggcacgcagacgagttcctcttggacctaggacatcatgagcggtcgattatgacggacttgtactatcttagtcagactgatggagccggagattggcgggagaaagaggctaaagacctaaccgagcttgtgcaaaggaggattacctatctccaaaatcccaaggactgctccaaagctaagaaacttgtctgtaacataaataagggttgtggatacggctgtcagttgcaccacgtggtttattgttttatgatcgcatatggaacgcagagaactttgatattagagagccagaactggcggtatgctacaggtggatgggagacggtcttcaggcctgtgagcgagacctgtactgaccggagtggcatctcaacagggcactggtctggcgaggtgaaggataagaatgtgcaggtcgtggagctccccatcgtggactccttacatcctcgcccaccatatcttccgctcgccgtgcccgaggacttagctgatcgtttggttcgcgtgcacggcgacccagccgtttggtgggtgtcacagtttgtgaaatatttgattcgcccccaaccgtggcttgagaaggagatcgaagaagccacgaagaaactgggcttcaaacacccagttatcggggtccacgtccggcggacagacaaggtggggaccgaagcggcttttcacccgatcgaggagtatatggtgcacgtcgaagagcactttcagctgctggcccgtcgcatgcaggtggacaagaagcgcgtgtatttggccactgacgatccctccctgctcaaggaagctaaaacaaagtatccaaattacgagtttatttctgacaacagcatctcttggtccgcaggactgcacaatcggtacacggagaactccttgcgcggcgtcatccttgacatccacttcctttctcaggcagactttctagtgtgcactttcagctcccaggtgtgtagagttgcatacgagatcatgcagaccttacacccagatgcgagcgctaactttcactccctcgacgacatatattacttcggaggacagaatgctcacaaccaaattgccatatatgcacaccagccccgaactgcggatgaaataccaatggagcctggtgacataatcggggttgcagggaaccactgggatgggtattctaaaggggtgaacaggaagctgggccgcactggtctgtacccatcctacaaagtccgtgagaagattgagaccgtgaagtatcccacttaccctgaggcagagaaatag

SEQ ID NO: 117559 - DNA, 510 bp, synthetic construct
  misc_feature 1..510: note = Description of Artificial Sequence: Synthetic coding sequence
  source 1..510: mol_type = other DNA
atgcatcggcagatttggcatctgcattggacactcgtgcgctacccgaactacgaatttatcagtgataactcaattagctggagcgctgggcttcataaccgatataccgagaacagtctgcggggagtgatactagatatacatttcctgtcccaggccgattttctcgtgtgcaccttttccagtcaggtatgcagagttgcttacgaaataatgcagacactacatcctgacgcaagtgccaattttcacagtctggacgatatatactactttggaggccaaaacgcccacaatcagatagctatatacgcccatcagcctagaacagccgatgaaatccctatggagcccggcgacataataggtgttgcagggaatcattgggatggctactccaagggggtgaaccggaaactgggcagaaccggactgtacccatcttacaaggtccgagagaaaattgagacagttaagtacccgacctaccctgaagccgagaaatag

SEQ ID NO: 117560 - DNA, 48 bp, synthetic construct
  misc_feature 1..48: note = Description of Artificial Sequence: Synthetic coding sequence
  source 1..48: mol_type = other DNA
atgagaccttggactggctcttggcgatggatcatgctcatcctgtag

SEQ ID NO: 117561 - DNA, 135 bp, synthetic construct
  misc_feature 1..135: note = Description of Artificial Sequence: Synthetic coding sequence
  source 1..135: mol_type = other DNA
atgagaccctggacagggtcatggagatggattatgctgatcctctttgcgtgggggaccctgctattttacataggcggccacctggtacgagacaatgaccatccagatcactcttctcgtgagcttagctag

SEQ ID NO: 117562 - DNA, 141 bp, synthetic construct
  misc_feature 1..141: note = Description of Artificial Sequence: Synthetic coding sequence
  source 1..141: mol_type = other DNA
atgaggccctggacaggctcatggagatggattatgctgatcttatttgcctggggtactcttcttttctacattggcggccatctcgtgagggacaacgaccatcctgatcactcaagtcgcgagctgtctaagatttag

SEQ ID NO: 117563 - DNA, 126 bp, synthetic construct
  misc_feature 1..126: note = Description of Artificial Sequence: Synthetic coding sequence
  source 1..126: mol_type = other DNA
atgagaccttggacggggagctggaggtggatcatgctaatcctgttcgcatgggggacgctactgttctatatcggtggccacctggttagagataacgaccaccccgatcactcctcaaggtag

SEQ ID NO: 117564 - DNA, 93 bp, synthetic construct
  misc_feature 1..93: note = Description of Artificial Sequence: Synthetic coding sequence
  source 1..93: mol_type = other DNA
atgcggccctggaccggcagttggaggtggataatgctaatactgtttgcctggggcactctgctgttttacatcggtggccatctggtttag

SEQ ID NO: 117565 - DNA, 1239 bp, synthetic construct
  misc_feature 1..1239: note = Description of Artificial Sequence: Synthetic coding sequence
  source 1..1239: mol_type = other DNA
atgacagacttatactaccttagccagactgatggtgccggtgactggagagagaaagaggctaaggatctaacagagctggtgcagcggcggatcacttatctacaaaatccaaaggattgttcgaaagctaaaaagcttgtgtgtaacatcaacaagggatgtggctacgggtgccaactgcaccatgtcgtgtactgtttcatgattgcttacggtacccagcggaccctgatcctcgagtcacagaactggagatacgccacaggaggctgggaaaccgtgtttcgaccagtgtctgagacatgcacagaccgctcaggtatatcaaccggacactggtcgggggaggtgaaggataagaatgttcaagtggtggagctcccaattgttgacagcctccatcctaggcccccgtatctgccgctcgctgtgcccgaagacctagcagataggctggttcgcgtgcatggcgaccctgcagtttggtgggtcagtcagtttgtgaagtacctgatccggccccagccctggttggaaaaggaaatagaagaggcgactaaaaagctggggttcaaacatccagtcattggggtgcacgtcaggaggacggacaaggttggcacggaagccgcttttcaccccatcgaagaatacatggtccatgtggaagaacatttccagcttcttgcgaggaggatgcaagtagacaagaagcgggtgtacctggccactgacgacccatctctgctcaaggaggctaaaacgaaataccctaactacgagtttatttccgataacagcatctcttggtcagcaggcttacataatcgctacactgagaattccctgcggggcgtcattcttgacatccatttccttagtcaggcagattttttggtgtgcacctttagcagccaggtctgtcgagtcgcttacgagatcatgcagaccttacatcctgacgcatcagccaattttcacagcctagacgatatctactacttcgggggccaaaatgcccacaatcagattgccatttacgcccaccagccgcggaccgccgacgaaattcccatggaacctggcgacattatcggagttgcagggaaccactgggatggatattcaaaaggggtcaatcgtaaactcggtaggacaggcctgtacccctcttacaaagtgagagaaaaaattgaaactgtgaagtatccgacctatccagaggccgagaagtag

SEQ ID NO: 117566 - DNA, 153 bp, synthetic construct
  misc_feature 1..153: note = Description of Artificial Sequence: Synthetic coding sequence
  source 1..153: mol_type = other DNA
atgcgaccctggacaggctcgtggcggtggatcatgcttatcctgttcgcatggggtacccttcttttctacattggcggccatctggtgcgggataacgaccatcctgaccacagtagccgcgagctgtccaagatcctcgccaagctctag

SEQ ID NO: 117567 - DNA, 1080 bp, synthetic construct
  misc_feature 1..1080: note = Description of Artificial Sequence: Synthetic coding sequence
  source 1..1080: mol_type = other DNA
atgacctctacttcaaagggcatcctgcgcccattcctgatcgtttgcatcatactgggatgtttcatggcttgtctgctgatttacataaaacctacaaactcatggatcttcagtccaatggaatccgcaagctcggtcctgaagatgaagaattttttttctaccaagacagattactttaatgagacgaccatcctggtatgggtgtggccatttggccaaactttcgatctgacgtcctgccaagccatgttcaatattcaagggtgtcacctgactacagatcggagcctctataataagtcccatgcagtcctgattcatcaccgggatatatcatgggacctgaccaatcttccacaacaagcaagacccccctttcagaaatggatatggatgaatcttgagtctcccactcatactccacagaagagcggaatcgaacacctctttaatctaaccctgacgtaccggcgcgacagtgacatccaggtcccttatggattcttaaccgtaagtaccaatcccttcgtctttgaggtgcctagtaaggagaagttggtctgctgggtggtgagcaattggaacccagagcacgctagggttaaatattacaacgagctgtcgaagagtattgaaattcatacatatggacaggcttttggagagtacgtgaatgacaagaacctgatccccaccatctctacatgtaaattttatctgtcctttgaaaattctattcataaggattacattaccgagaagttatataacgccttcttggccggctctgtgccagtagtgctcgggccttcgcgcgaaaactacgagaactacataccagccgatagtttcatccacgtggaggactataattctcccagcgagctggccaagtaccttaaggaagttgataagaataataagctctacttgtcatactttaactggagaaaggatttcacggtgaatctcccaaggttttgggagtcacacgcgtgtctcgcatgtgatcacgtgaagagacaccaggagtacaagtccgttgggaatctcgaaaagtggttttggaattag

SEQ ID NO: 117568 - DNA, 660 bp, synthetic construct
  misc_feature 1..660: note = Description of Artificial Sequence: Synthetic coding sequence
  source 1..660: mol_type = other DNA
atgaaccgtctcttcggaaaagccaaacccaaagcccctcctccctcactgacagactgtattggaacagtggattcacgtgccgaaagtatagacaaaaaaatatctaggcttgatgcagaattggtcaaatataaagaccagattaagaaaatgcgggaaggcccagcaaaaaacatggtgaagcagaaggccctgagagtgctgaaacagaaaagaatgtatgaacaacaacgggacaaccttgctcaacaatctttcaacatggaacaagccaattataccatccaatcacttaaagataccaaaacaaccgtggatgccatgaaattaggcgtcaaagaaatgaaaaaagcatacaaacaggtgaaaatcgaccagattgaagatttgcaagatcaactggaggacatgatggaggacgcgaacgaaattcaggaagcactgtcccggagctacggaacacctgaactcgacgaagatgatctggaagccgagttggatgcattgggagacgaactgctggcggatgaagatagtagctacttggatgaagccgccagtgctcccgctatccctgaaggggtgcctactgacacaaagaacaaagatggtgtgctagtagatgagttcggattaccacagatacctgcctcttag

SEQ ID NO: 117569 - DNA, 1293 bp, synthetic construct
  misc_feature 1..1293: note = Description of Artificial Sequence: Synthetic coding sequence
  source 1..1293: mol_type = other DNA
atgagtcgtatcaacaagaacgtggtcttagccttattaacccttacgagtagtgctttcctcttgtttcaactgtactactataaacactatttaagcactaaaaatggtgcgggattgagtaagtcaaagggctctcggattgggtttgacagtacccagtggcgcgccgtgaaaaaatttatcatgttaacctctaatcaaaacgtcccagtgtttctcatcgaccctctcatcttggaactgattaacaagaacttcgagcaagtcaagaatacatcacatggatcgacatcacagtgtaagttcttttgcgtgcctcgggatttcacagccttcgctctgcagtatcacctgtggaaaaacgaagagggttggttccggattgctgaaaacatggggttccagtgtctcaaaatcgagtcaaaggacccacgcctcgacggcatcgatagcctgtcagggaccgaaatacctttgcattacatctgcaagttagccacacacgccatacatctagtggttttccatgagcggagtggtaactacctttggcatgggcatcttcgcttaaaggagcacatagatcgtaaatttgtccccttcaggaaacttcaatttggtcgctatcctggcgcgtttgatcggccagagctgcagcaggtgacagtggatggtcttgaggtgctgattcccaaggaccccatgcatttcgttgaggaagtgccccactcacgtttcatcgaatgtcggtataaagaagccagagctttcttccagcagtacctggacgacaacactgtggaagccgtggcattccgcaagagcgccaaagaactcctgcagttggccgctaagaccctgaacaaactgggggtcccattttggttatcgtcaggcacttgcctcggatggtacagacagtgcaatattatcccttattctaaggacgtcgatctgggcattttcatccaggactataagtcggacataattttagcgttccaggacgctggcctccctcttaaacataaattcggtaaggttgaggacagcctcgagttgtcctttcaggggaaagacgatgttaagctggatgtttttttcttttacgaggagactgaccacatgtggaatggtgggacccaggcaaaaaccgggaagaaatttaagtacctgtttcctaagtttacactctgttggacagagttcgtggatatgaaggtgcacgtgccctgcgagacactcgagtatatagaagctaattacgggaagaaccagcagggggcatag

SEQ ID NO: 117570 - DNA, 708 bp, synthetic construct
  misc_feature 1..708: note = Description of Artificial Sequence: Synthetic coding sequence
  source 1..708: mol_type = other DNA
atgatcctcgaggtgggcgagaataacgggttctttagcaagtccctgctgccaagatacgcgagcaaaaagctaaagtcttcactcccacatagcagggcagtgaagaagttcataatgttgaccagcaatcaaaatgtacctgtgtttcttatcgatccgttgattctggagcttattaataagaactttgagcaggtgaagaacacctcacatgggtccacaagccagtgcaagtttttttgcgtgcccagagactttacagcgtttgcactccaataccacttatggaagaacgaggaggggtggttccggatcgccgaaaatatgggcttccagtgccttaagatagagagcaaagatccacggctggacggaatcgatagcctgagtggaacagaaattcccctgcactacatctgcaagctggctacccacgctattcacctcgtagtctttcacgaacggagcggcaattacctctggcacggccacttgagattaaaagaacatatcgataggaaatttgtgcccttcagaaaattgcagttcggcagatatccaggcgcgtttgacaggcctgaactgcagcaagttaccgtcgacgggctggaggtcttaatccccaaggatcccatgcatttcgtcgaggaagtcccccactcgagatttatcgaatgccggtataaagaggcccgggctttctag

SEQ ID NO: 117571 - DNA, 552 bp, synthetic construct
  misc_feature 1..552: note = Description of Artificial Sequence: Synthetic coding sequence
  source 1..552: mol_type = other DNA
atgagcagaataaataagaatgtcgtgttggctctgctaacgcttacctccagcgccttcctcttgttccaactttattattataagcactatctgtccacaaagaacggcgctggactgtcaaagagcaagggaagtcgaattgggttcgactcaacgcagtggcgagcggtgaaaaagtttatcatgcttacttccaatcaaaacgtgccggtgttcctgatcgatcctctgattttagagctgattaataagaactttgagcaggtgaagaacacatctcatggcagtacatcccaatgtaagttcttttgcgtgcctagagactttactgcctttgcactacagtatcatctgtggaaaaacgaagaaggctggttccgtattgccgagaacatgggcttccagtgcctaaaaatcgagtccaaggacccaaggcttgacgggatcgatagcctcagtggcactgaaattcctctacactatatttgcaaacttgctactcatgcgatacatttggtggtgtttcatgagaggtcaggcaattattag

SEQ ID NO: 117572 - DNA, 483 bp, synthetic construct
  misc_feature 1..483: note = Description of Artificial Sequence: Synthetic coding sequence
  source 1..483: mol_type = other DNA
tagtggtaccggcaatgtaatattataccatactccaaggacgtggacctgggcatttttatccaggactacaagtctgatatcatcttggctttccaggatgccggccttccacttaagcataaattcggcaaagtcgaggactctctggaactctctttccagggtaaggatgacgtgaagctagacgtgttctttttctacgaggagacagaccacatgtggaatggcggcactcaggccaagactgggaaaaaattcaagtacctgtttcctaaatttactctgtgttggacagagtttgtcgatatgaaggtgcacgtgccatgcgagacactcgaatacattgaagccaactatggaaaggaagccgaaagttacatattgtctatgctctttcgcactactttctggagcctcgcagactttcccctgacgcctgaaaacaacagcagcctgaaaaatgggaacctcaatgtttag

SEQ ID NO: 117573 - DNA, 816 bp, synthetic construct
  misc_feature 1..816: note = Description of Artificial Sequence: Synthetic coding sequence
  source 1..816: mol_type = other DNA
atgtcccggatcaataaaaacgtcgtattggcgctgctcacactcacaagtagtgcattcttactcttccagctctactactataaacattacttatccactaagaacggggccggcctctcaaaatccaagggctcccggattggttttgacagcacacagtggagagcggtaaaaaagttcattatgctgacaagtaaccagaacgtgccagtctttctaattgatcccctcatcctggaactgattaacaaaaattttgaacaggtgaagaacacaagtcacggctctacaagccagtgcaagtttttttgcgtccctagggacttcacggcctttgctctgcagtatcatttgtggaagaatgaggagggctggttccgcatcgccgagaatatgggatttcagtgtcttaagatcgaaagcaaggatccaagattggacggaattgattccctgtctggaaccgagattcctctccattatatctgcaagctggctacccacgctattcacctcgtggtgtttcatgagagaagtggaaactacctctggcacggtcatcttaggctgaaggagcacatcgatcggaaattcgtgccgtttaggaagcttcagttcggtcgctatccaggcgcatttgatagacccgaactacagcaggttacagttgatgggttggaggtgttgatcccaaaagaccccatgcatttcgttgaggaggttccacattccaggtttattgagtgccgctacaaagaggctcgagccttttttcagatccccgtgagcgaggtctacaccgtgttggactag

SEQ ID NO: 117574 - DNA, 1488 bp, synthetic construct
  misc_feature 1..1488: note = Description of Artificial Sequence: Synthetic coding sequence
  source 1..1488: mol_type = other DNA
atgcgactgactaggtgtcaagccgcactagccgcagctattactctgaacttactcgttttgttctacgtgtcgtggctccagcaccaaccgcggaactctcgggctcgggggcctagacgcgctagcgccgcaggaccacgcgtgacggtgctggtgagggagttcgaggcttttgacaacgccgtgcccgagctggtagatagctttcttcagcaggatcctgctcagcctgtcgtagtcgccgccgacacactaccttatccgcccctggcactgccccgaattcctaatgtccgccttgctctcctccagcccgctttggataggcccgctgctgccagccgacccgagacttacgtagccaccgaatttgtcgcgctggtaccagacggggctcgagccgaggcacccgggctcctggagcgcatggtagaagctttgcgagccggttccgccaggctggttgcggcgccagttgccacagccaatcccgccagatgtctcgctttgaacgtgtctctgcgagagtggactgctaggtatggagctgcccctgcggcaccccgctgtgatgccctcgatggcgatgcagtcgtccttctccgggcacgggacctgttcaatctaagcgctccactggcacgccctgtcggaacttcactttttctgcaaactgctctgcgcggatgggcagtgcaactgttagaccttacatttgccgctgcacggcagcccccattagcgaccgctcacgcaaggtggaaagccgagcgcgagggaagggcaagaagggctgccctcctgagagctctgggaatccgcctcgtgtcatgggagggcgggcgcttggagtggtttggctgcaacaaggagacgacacggtgctttggtaccgtagtcggggatacccccgcctacctgtatgaagagagatggacacctccctgctgcctgcgagccttgcgggagacagcccgttatgttgtgggcgtcttagaagctgccggggtgcggtactggctggaagggggctccctcctgggagctgcacggcatggcgatattattccctgggattacgacgtggacctgggaatctacctggaggatgtcggcaactgtgaacagttgaggggggccgaggcgggatccgtggttgacgaacggggatttgtctgggagaaagcagtggaaggagacttcttccgcgtacaatattcagaatccaaccatctccacgtcgacctgtggcccttttacccccgcaatggcgtcatgaccaaggatacctggctggatcaccgccaagatgtggaatttcccgagcatttcttacagcccctggtgcctctgcccttcgcgggattcgtggctcaggctcctaataattaccgtaggttcctcgaactgaagtttggacccggcgttatagagaaccctcagtaccctaaccccgcactgctcagcctcacagggtccgggtag

SEQ ID NO: 117575 - DNA, 1488 bp, synthetic construct
  misc_feature 1..1488: note = Description of Artificial Sequence: Synthetic coding sequence
  source 1..1488: mol_type = other DNA
atgagactgacacgctgccaggcagctctcgcagcagcaataactctcaacctgttggtcctcttttatgtgagctggttgcagcatcagcctagaaacagtagagccagggggcccaggcgtgcctctgccgccggaccccgtgtcaccgtcctggtgcgcgaattcgaggccttcgataatgccgttcccgagctagtggatagctttctccagcaggacccagcgcagcccgtggtggtggctgccgataccttaccgtatccccctctggccttgccgcgcatacccaacgttaggctcgcactgctgcagcctgccctggaccggcctgccgccgcctctaggcccgagacatacgtggccactgagtttgttgccctagtacctgatggtgcccgagctgaggcacccgggctccttgaaagaatggtcgaggcattacgcgccggcagcgctcggctggtcgcggcaccagtcgcaacagctaacccagctaggtgcctggctctgaacgtctcattacgcgagtggactgcacggtatggggcggctcccgcagcacctcggtgcgacgccttagatggagacgctgtcgtgctactccgagcacgggacttgtttaacctgagcgcccccttggccagaccggtaggcacaagtctcttcctccagactgccctgcgggggtgggccgttcagcttctggacctcactttcgccgccgcaagacaaccccctctagccactgcgcacgcgcgctggaaggccgaaagagagggacgggcgcgccgggccgctctcctccgggctctgggcattaggctggtctcctgggagggcggtcggctcgagtggtttgggtgcaacaaggaaaccaccagatgttttgggaccgtcgtgggtgatactccagcgtacctttatgaggagcgctggaccccgccctgctgccttcgggctctccgggagaccgcccggtacgtggtcggcgtgctggaagctgccggggtgaggtactggctggagggtggatctctgcttggcgctgcccgacacggcgacatcatcccttgggattatgacgtggacctggggatctatcttgaagacgtgggcaactgtgaacaactgcgaggcgccgaagcagggagcgtggtggatgaacgaggctttgtgtgggagaaggctgtagaaggggacttctttcgcgtccagtacagcgagtccaatcatcttcatgttgatctgtggcccttctatcccagaaacggtgtcatgaccaaagacacgtggctcgatcaccgtcaggacgttgagtttccagagcattttctacagcccttagttccattaccattcgcagggtttgtggcgcaggccccaaacaattaccggaggttcctagagctaaaatttggtccaggggttatagagaacccgcagtatcccaaccctgccctgctatctctgacaggcagcggctag

SEQ ID NO: 117576 - DNA, 2385 bp, synthetic construct
  misc_feature 1..2385: note = Description of Artificial Sequence: Synthetic coding sequence
  source 1..2385: mol_type = other DNA
atggaattacggccttggttgttgtgggtggtggccgccactgggactctcgtcctcctcgccgctgacgcccagggccagaaggtgtttacaaacacctgggcggtgaggatccctgggggcccggcagtagctaactctgtcgcccgcaaacacggattcttaaatttgggacaaatcttcggagattattatcacttttggcatagaggtgtcacaaagcgcagcctgagtcctcaccgccctagacactcccggctgcagagagaacctcaggttcagtggctggagcagcaggtggctaagcgcaggacaaagagggacgtgtaccaggaaccaactgacccaaaattcccacaacagtggtatctgtcaggggttacgcaaagggatttaaacgtgaaggccgcatgggcccaaggatacactgggcacgggatcgtcgtgagcatcttggacgatggaatcgagaaaaatcatcccgatctggctggaaattacgatccgggggcctcgtttgacgtgaacgaccaagatccggaccctcagccgcgttacacacagatgaacgataaccgtcatggaacccggtgtgcaggcgaagttgctgcagtagcaaataacggggtctgtggggtcggagttgcctataacgcccggattggaggcgtcaggatgttggacggggaggtcactgacgccgtggaggctcggagccttgggttaaaccccaaccatatccacatctattccgcaagttgggggcctgaagacgatggtaaaaccgtggacgggcccgcccgactggccgaggaagcgttttttaggggggtgtcacagggccggggtgggttgggctccatttttgtctgggcttccggcaatggcgggagagagcatgactcctgtaactgtgacggatacaccaactctatctatactttgtcaataagtagcgcaactcagtttggcaatgtgccctggtatagcgaagcatgctccagtacgctagctacaacgtactcatcgggcaatcaaaatgaaaaacagattgtgactactgaccttagacagaagtgcactgaatcacataccgggacatcggcaagcgccccactcgcagctggcattatcgcattgaccctagaggcaaataagaacttgacgtggcgggacatgcagcaccttgtagttcagacatccaaaccggcacacctgaatgccaatgactgggcaacaaacggcgtaggccgaaaggtgtctcatagctacggttatggactgctggacgctggggccatggtagctctagcccagaattggacaaccgtggccccgcaacgaaaatgtattatcgatatcctgacagaacctaaggatattggaaagcgtctcgaagtgcggaaaacagtaaccgcttgcctgggagagccgaatcatataactagattagagcatgcccaggcaaggctaacgctcagctacaatcgtaggggggatctcgctattcaccttgtcagtcctatgggtaccagaagcacccttcttgctgcacgcccccatgactactcagctgacggcttcaacgactgggctttcatgaccacccattcttgggatgaggatccatccggggagtgggtcctcgaaattgaaaacacttccgaggccaataactacggtaccctgaccaaattcactctggtcctctatggcacagcccctgagggcctgccagtcccacccgagtcttcgggctgtaagaccttaacctcttcccaggcctgcgtggtatgtgaagaaggattcagcctccaccagaagagctgcgttcagcattgcccccctggatttgctccacaggttctggacactcactactccactgaaaatgatgtcgagacaatacgcgcgagcgtgtgtgccccgtgtcacgcatcctgtgcaacctgtcaggggcctgcccttaccgactgtctatcttgcccatcacacgctagcttggatccagtggaacagacctgttcacgccagtcccaatcaagcagggagtcccctcctcaacagcagccaccacggctaccacccgaagtggaggccggccagagactgagggccgggctactgccatcacacttgcccgaagtggtggcaggcttatcttgcgctttcatcgtgctggtcttcgtaacagtgttcctggtattgcaactgaggagtggattttctttccgtggagtgaaagtgtacacaatggatagaggactgattagctacaaaggtctgcctccagaagcatggcaggaggagtgtcccagtgattccgaagaagatgaaggccgaggagaacgcacagcattcatcaaggaccagtccgctctctag

SEQ ID NO: 117577 - DNA, 210 bp, synthetic construct
  misc_feature 1..210: note = Description of Artificial Sequence: Synthetic coding sequence
  source 1..210: mol_type = other DNA
aaaccagctcacctgaatgcgaacgactgggctaccaatggagttggtagaaaggtctcgcactcttacggatatgggctgtggactcaggctccttggtggccgtggccgagaatcggcccccagtggccccccagtggaagcgcctcaagcaccagtagcccctcccctaagactagcgggaatgggtccagatgtggacgcccctag

SEQ ID NO: 117578 - DNA, 210 bp, synthetic construct
  misc_feature 1..210: note = Description of Artificial Sequence: Synthetic coding sequence
  source 1..210: mol_type = other DNA
atggaactgagaccatggctactgtgggtggtggctgctacggggactctggttctactggccgccgatgcacagggccaaaaagtctttacaaatacctgggccgtacggatccccggaggaccagctgttgcaaatagcgtggcacgcaagcacgggttccttaatttgggacagatattcggcgactattatcatttttggcattag

SEQ ID NO: 117579 - DNA, 1581 bp, synthetic construct
  misc_feature 1..1581: note = Description of Artificial Sequence: Synthetic coding sequence
  source 1..1581: mol_type = other DNA
atggcctcaaacgactacacacagcaggctacccaaagctacggggcataccccacccagcctggtcaaggatattcccaacagtcatctcagccctacggacagcagagctattcaggatacagccagtctaccgacacctccggatacggccagagttcttattcctcatacggacagtcacaaaacaccgggtacggtacccagtccacaccccagggttacggatctacaggggggtacggctcgtcccagtcgagccagagcagttacgggcagcagagttcctatccaggttatggacagcagccagcccccagttccacatcaggctcatacggatcttcatctcagagctcttcctacggtcaacctcagtcaggctcttactcccagcagccgtcctacggaggccagcagcagagctatgggcagcagcagtcatataaccctccccagggttacggacagcaaaatcagtataactcttctagcggtggagggggggggggaggcggtggaggcaattatggacaagatcagtcctcgatgagcagtggaggaggtagcggtggtgggtacggcaaccaggaccaatcagggggcggaggtagtggtgggtacggacaacaggataggggtggaagaggccgcggcgggtcggggggcggcggggggggcggagggggcggctataataggagcagcggcgggtacgaaccacggggacgcgggggtggacgaggaggccgcggtggaatgggaggaagtgacagaggaggcttcaataaatttggtggacctcgcgatcaaggaagccgacatgactcagaacaggataattctgataacaacactatcttcgtgcaggggctgggagagaacgtgactattgaatccgtggccgactacttcaagcagataggcataattaaaacaaataagaaaacaggtcagccgatgatcaatctgtataccgaccgagagaccggcaaactaaagggagaggccactgtctcttttgacgacccaccgtcagccaaagccgctattgattggttcgacggcaaagagttttcaggcaaccctatcaaagtcagttttgccacgcgacgggctgattttaatcgcggggggggcaatgggaggggaggtagaggccgcggagggccaatgggtcgaggcggatatggcggggggggtagtggtggcggtggccggggcggttttccttccggaggaggaggggggggcggccagcagagggccggtgattggaagtgcccgaatccaacctgcgagaacatgaatttctcctggcgcaatgaatgcaaccaatgcaaggctccaaaacccgatggccctggtggtggacccggtgggtcacatatgggcggcaattatggagacgatcgtagaggaggtagaggcggatatgatcgagggggttacagaggccgagggggagatcggggtggttttcgtggtggacgaggaggcggagacagaggggggttcggaccgggaaagatggactcccgcggcgaacacagacaggacaggcgggagcgcccttattag

SEQ ID NO: 117580 - DNA, 456 bp, synthetic construct
  misc_feature 1..456: note = Description of Artificial Sequence: Synthetic coding sequence
  source 1..456: mol_type = other DNA
atgaacccggaggttgtcgaggtggccgtggaggctgaggtggcctgggcggaagtgacggtggtggcatctattaatttggtagccctcgggactaaagaccacgtaatgactcctaccaacaagaagactgggcagccaatgatcaatctgtatacagaccgcgagaccggaaaactgaagggcgaagcaaccgtgtcatttgacgacccacccagcgccaaggcagctatcgattggttcgacgggaaagagttctctgggaaccctattaaggtctcattcgctacacgccgcgccgactttaaccggggcggcggcaacggccggggtgggagggggcgggggggacccatggggagaggaggctatggcggaggtggatccggcggggggggtcgtggcggcttcccctccggtggagggggcggaggcggtcagcagcgcgccgggtag

SEQ ID NO: 117581 - DNA, 1290 bp, synthetic construct
  misc_feature 1..1290: note = Description of Artificial Sequence: Synthetic coding sequence
  source 1..1290: mol_type = other DNA
atggcatcgaacgactatacccagcaagcaacacaatcctatggagcttatccaacccaacctggtcagggatattctcaacagtcaagtcagccttacggacagcaatcgtattccggatatagccagagcactgatacgagtgggtacggccaaagttcctactccagttacggccaaagtcagaatacagggtacggaacccaatcgacccctcagggctacggctcaacaggaggatacggatcatcccaatcgtcccagagctcgtacggccagcagagcagttatccaggatatggtcagcaaccagccccaagctctacctctggctcctacggatcttccagccagtcctcatcctacggacagccacagagcggctcttattctcaacagccctcctatggtgggcaacagcagagctatggacagcagcagtcctacaaccctcctcagggctacggacagcagaatcaatacaatagcagctcgggcggatacgaaccaagaggccgggggggaggccggggaggtcggggtggaatgggcgggtcagaccggggcggttttaacaaatttggcggtccaagagatcagggcagtcgtcatgacagcgaacaagacaactctgataacaacaccatcttcgtgcaaggtctgggcgagaatgtcaccattgagagcgttgccgactatttcaagcagatcgggattattaaaaccaataaaaagacaggacagcctatgatcaatctgtataccgacagggagaccggcaaactcaagggtgaggccacggtctcctttgatgaccccccaagtgcaaaggctgccattgactggtttgatggcaaagaattctctggaaatcctataaaagtgagcttcgcaacccgccgtgccgatttcaacagaggcgggggcaacggacgcgggggaaggggaagaggagggcccatggggaggggcgggtacgggggaggtggctccgggggaggagggcggggcgggtttccttcaggaggcgggggggggggtggtcagcaacgggcaggagattggaagtgtccaaatcccacctgtgaaaacatgaatttttcttggcgtaatgagtgtaatcaatgtaaggcccctaaaccagacggtcctggcggaggcccaggtggaagccacatgggaggcaattacggagacgaccgaagaggcggcgatcggggtgggttcgggcctggcaagatggatagcagaggtgaacaccgccaggacaggagagagcgcccctattag

SEQ ID NO: 117582 - DNA, 1257 bp, synthetic construct
  misc_feature 1..1257: note = Description of Artificial Sequence: Synthetic coding sequence
  source 1..1257: mol_type = other DNA
atgggggaggagggtaccggcgggaccgtgcatctgctttgtctagccgcctcatccggagttccactcttttgcagatctagccgcgggggggcccccgcacgtcagcagctgccattttccgtcatcggcagcctgaacggggttcacatgttcggacagaatctcgaagttcaactgtccagcgcccgcaccgagaacacgacagtcgtttggaaatcattccacgatagcatcaccctcatagtgctgtcctccgaagtgggcatttccgagctgagactcgagagattgctgcagatggtgttcggcgccatggttcttctggtcggacttgaggaactgactaatattagaaacgtcgaaagactcaagaaggacctccgagccagctactgcctgatcgacagttttctgggggactctgaacttattggcgacctgactcagtgtgtggattgcgtaattcctcccgaaggttcactcctccaggaggccctgtcaggatttgccgaagccgcaggtaccacctttgtctccctcgttgtgtcaggcagggttgtcgcagctacagagggctggtggcgactgggaactcctgaagccgttcttctcccgtggctggtggggtccttgccgccccagaccgcccgcgactaccccgtataccttccacatggatcccccacagtgccacaccggctcctcacactcacgctgttgccttccctcgaactgtgtcttttgtgtggcccaagtccacctctaagtcagttatacccccagctgctagagcgctggtggcagcccctgttagatccattacgcgcctgcttacctctgggaccacgcgccctgccatcgggttttcccctgcataccgatatcctcgggcttcttctcctgcacttagagctgaaacgctgtttatttaccgtggagcccctgggggacaaagagcccagccctgaacagcgcagaagattactccggaatttttacacactggtgactagtacccactttccacccgaaccggggcccccagagaagacagaagatgaggtctatcaagcgcagctgcctcgggcttgctatctagtgttggggactgaagaaccaggcactggcgtgcgcttagttgccctgcagctgggcctgcggcgcctgctgctcctgcttagtccccagtcgccaacacacgggctcagaagcttggcaactcacaccctccacgccttgacacctctcttgtag

SEQ ID NO: 117583 - DNA, 711 bp, synthetic construct
  misc_feature 1..711: note = Description of Artificial Sequence: Synthetic coding sequence
  source 1..711: mol_type = other DNA
atgggggaggagggcactggtggtacagttcacctgctctgtctggcggcttcatccggggtgccgctgttctgtaggagttcccggggcggcgcccccgcccgacagcagctgcccttttctgtgatcggctccctgaatggcgtgcatatgtttggccaaaacctcgaggtgcagctgagctctgcgagaactgaaaacacaaccgtggtgtggaaaagctttcacgattctattactttgattgtactgtcaagtgaagtcggaataagcgaactgcgcctggaacgcctcctacaaatggttttcggggccatggtgctcttggtcggtctcgaggagctgaccaatatccggaacgtagaacggctgaaaaaggacctgcgagccagctattgtctcatcgactcctttctgggtgacagtgagttgattggcgacttgactcaatgcgtggactgtgttattccaccagaaggttccctgttacaggtcctcgggatgctctggaagcttctccacctgttttgctggccctggctaagccctcacccactgtccagcgggccactcagccaacctccgccaattttgtctgcatcctcacccattccaacgtggtcccagaaaaatttgttctccttttttttttccttcctctccctgtctttcctctttagtttcctgtccctcttcctctttgaaacatag

SEQ ID NO: 117584 - DNA, 1164 bp, synthetic construct
  misc_feature 1..1164: note = Description of Artificial Sequence: Synthetic coding sequence
  source 1..1164: mol_type = other DNA
atgggggaggagggaacgggcggcactgtccacttgttatgtctggcagcctccagtggagtacccctattttgcagatcctctcggggaggggccccagctcggcagcagctacccttctccgttattggctcacttaacggcgtacacatgtttggccagaacctggaggtgcagctctcctctgcaaggaccgaaaatactaccgtggtttggaagtcttttcatgattcaatcaccctgattgtccttagctccgaagtgggaatttctgaattgcggcttgagaggctgctgcagatggtgtttggcgccatggtcctgctcgtgggtttggaagaactcacaaacattcgtaacgtggagcggttaaagaaggacttgcgcgcctcttattgcctgatcgacagcttcctgggcgattctgagcttatcggtgacttaactcaatgtgtagattgcgttattccaccagaaggtagtctgttacaggaggcgctgtcaggatttgctgaggccgctggtactacattcgtttctttggtcgtgagcgggagagtggtggccgccaccgaagggtggtggaggctcggcacccctgaagccgtgctactgccctggttagtcgggtctctgcctccccagactgcgcgagactatcccgtatacttacctcatgggtcacccaccgtcccacaccgacttctgaccctcaccttactcccttcattggaactgtgcttgctttgcggaccttcccctcctctgagtcaactgtaccctcagctcctagagagatggtggcagccactcttggaccccttgagagcctgtctccctttaggcccccgggctttgccttcgggcttccctctacacacagacattctgggattacttctgcttcacttagagcttaagcggtgtctcttcacagtagagccactcggtgataaagagcctagtcccgagcagagacgccggctacttcgaaacttctacacactggtaacaagtacccacttccccccggaacctggcccaccggagaaaacagaggatgaggtatatcaagcacagctcccccgtgcatgttatctcgtgatgggggacggccacaggcacggggccgttagtgtgtcactctttatacgatctcagtag

SEQ ID NO: 117585 - DNA, 1149 bp, synthetic construct
  misc_feature 1..1149: note = Description of Artificial Sequence: Synthetic coding sequence
  source 1..1149: mol_type = other DNA
atgggcgaagagggcaccggagggactgtgcatctcctatgtctggccgcctctagcggagtgccgttattctgtcgatcttctcgcggtggcgcccccgctaggcagcagcttcccttctcagtaatagggtcattaaatggggtacacatgtttggccaaaacttagaggtgcaacttagcagcgcaaggactgagaacactaccgtggtgctgctggtcggtctggaagagttgaccaacataaggaacgtggagaggctgaaaaaagacctacgagccagttactgtctcatagattcctttttaggagatagtgaactgatcggtgatctcacacagtgcgtggattgcgtgatccctccggagggaagcctgcttcaggaggcgctgagcggtttcgccgaagccgccggtacaacattcgtaagcttggttgtcagtggcagagtggtggctgccactgagggctggtggcgcctggggactccagaagccgtgcttcttccctggctggtggggtccttacctccccagacggctcgtgattacccagtgtacctgccccacggttctcctaccgtacctcatcgcttgcttacactgacactcctcccgtctttagagctttgcttattatgcgggccatcacctccactgtcccaattgtaccctcagctgctggaacgatggtggcagcctctgctcgatccactgcgtgcatgcttacccttgggcccacgcgccctccccagcggatttccactgcatacagacattctcggcctgttgctgcttcacttggagctcaagcgctgcctgtttacagtggagcccctgggcgacaaggagccgagcccagagcagagacgcaggctgttgagaaatttttatacattggtgacatccacccacttccctccagagcctgggccaccagagaagactgaggatgaagtttaccaggcccagctgccccgtgcatgctatctcgtcctgggcacggaggaaccaggaaccggggtgcgtctggtcgccctgcagctgggtctcaggaggctgttgttactgctgtcaccccagtctcccactcacggtttgagatctttagccactcacactttgcatgccttgaccccactgttatag

SEQ ID NO: 117586 - DNA, 279 bp, synthetic construct
  misc_feature 1..279: note = Description of Artificial Sequence: Synthetic coding sequence
  source 1..279: mol_type = other DNA
atggccagcttgggacacattctggtgttttgtgtgggcctgctgactatggccaaggccgaatctcctaaagaacatgaccccttcacatacgattatcaatccctgcaaatcggaggattagtgattgccggaattctcttcatcctagggattctgatcgttctttcacggagatgtagatgcaaattcaaccagcagcagcgtactggggaacccgatgaggaggaggggacgttcagatcatctatcaggcgattgtcaacaaggcgaaggtag

SEQ ID NO: 117587 - DNA, 279 bp, synthetic construct
  misc_feature 1..279: note = Description of Artificial Sequence: Synthetic coding sequence
  source 1..279: mol_type = other DNA
atggcaagtctgggccacatcttggtgttttgcgttggcttgctcaccatggcaaaggctgagtcccctaaggaacacgacccctttacctatgattaccagagccttcaaataggtgggcttgtgattgcagggatattgtttattctgggcattctgatcgtgttgtcacgccgatgccggtgtaaattcaatcagcagcaaagaacaggggaacccgatgaagaggagggtacctttcgcagttcaatccgcaggctttccacgagacgaaggtag

SEQ ID NO: 117588 - DNA, 195 bp, synthetic construct
  misc_feature 1..195: note = Description of Artificial Sequence: Synthetic coding sequence
  source 1..195: mol_type = other DNA
atggacaggtggtatctggggggttcacctaagggggacgtggaccccttttattatgactatgagacggtaaggaatggcgggctcatttttgctggactggcttttattgttggtcttttaatcctgctctctagacgctttcgttgtggaggtaataaaaagcgacgccaaatcaacgaagacgagccttag

SEQ ID NO: 117589 - DNA, 201 bp, synthetic construct
  misc_feature 1..201: note = Description of Artificial Sequence: Synthetic coding sequence
  source 1..201: mol_type = other DNA
atgacggggctgtctatggatggcggcgggtccccaaagggcgacgttgacccgttctattatgattatgagaccgttaggaacgggggactaatatttgccggcctggccttcatcgtgggcctgcttattctgctcagcaggaggtttcgttgtggcggtaacaaaaagaggaggcagattaatgaggacgagccttag

SEQ ID NO: 117590 - DNA, 195 bp, synthetic construct
  misc_feature 1..195: note = Description of Artificial Sequence: Synthetic coding sequence
  source 1..195: mol_type = other DNA
atggacagatggtacctgggaggttctccaaagggtgatgtggatccattctattatgactacgaaaccgtcagaaatggagggctcatttttgcaggcctggcatttatcgtcggtctgctcattttgctgtctcgccggtttagatgtgggggcaacaaaaagcggcgtcaaatcaatgaggatgaaccgtag

SEQ ID NO: 117591 - DNA, 264 bp, synthetic construct
  misc_feature 1..264: note = Description of Artificial Sequence: Synthetic coding sequence
  source 1..264: mol_type = other DNA
atgcaaaaagtcaccctgggattgttggtatttctggcgggatttccggtgttagatgccaatgacttggaagataaaaacagccctttttattacgattggcacagtctccaggtgggcggcctgatctgcgcgggggtcttgtgtgccatgggcataatcatcgtgatgtctgcgaagtgtaagtgcaaattcggtcagaagtcaggacaccacccgggtgaaacaccgccattaatcacccccggatcagcacagtcctag

SEQ ID NO: 117592 - DNA, 342 bp, synthetic construct
  misc_feature 1..342: note = Description of Artificial Sequence: Synthetic coding sequence
  source 1..342: mol_type = other DNA
atgcagaaggtcaccttaggactcctcgtctttttggcgggcttccctgtcctggacgccaacgatctggaggacaagaacagccctttttactacgattggcactcactgcaggtgggcggactcatctgtgcgggagtgctatgcgccatgggtataattattgtcatgagcgagtggagatcctctggcgagcaagcagggagaggctggggctctccccccctcaccacccaactgagcccaactggcgccaagtgcaagtgcaaattcgggcagaaaagcgggcaccaccccggtgagacacccccattaatcacgccgggatccgcgcagtcttag

SEQ ID NO: 117593 - DNA, 291 bp, synthetic construct
  misc_feature 1..291: note = Description of Artificial Sequence: Synthetic coding sequence
  source 1..291: mol_type = other DNA
atgcaaaaagtgactctcgggctgttggtcttcctggccgggtttccggtgctggacgcaaacgatctggaagacaaaaacagccccttttactatgattggcactctctgcaggtgggcggcttaatctgcgcaggagtcctgtgcgccatgggtataattattgtgatgtctgaatggagaagctcaggcgagcaggcggggcgtggatgggggtcccctcccctcactactcagctgtctcccaccggcgccaagtgcaaatgtaagttcggacaaaaaagtgggtag

SEQ ID NO: 117594 - DNA, 264 bp, synthetic construct
  misc_feature 1..264: note = Description of Artificial Sequence: Synthetic coding sequence
  source 1..264: mol_type = other DNA
atgcaaaaggtgactcttggtctcctggtgtttctagcgggttttccggtcctggacgctaacgatctcgaagataagaatagccctttttattatgactggcacagcttgcaagtgggtggactgatttgcgccggggttctgtgtgcaatgggaataatcattgtgatgagtgccaagtgcaagtgcaagttcggacagaagtctgggcaccacccaggagaaacgccaccccttatcactcccggctccgctcagtcctag

SEQ ID NO: 117595 - DNA, 435 bp, synthetic construct
  misc_feature 1..435: note = Description of Artificial Sequence: Synthetic coding sequence
  source 1..435: mol_type = other DNA
atgggccgcggatacagtggagcacttcaggctaggggtggcttggaggagccactcgagcgaggcctgaggggaccaagcttcactcaaagccctttgcacggggcagctgcggcatacctctcagctcagagggacgcttctctccccgtaccaggccagaggtctgacatgcagaaggtgacccttggactgctggtcttcctcgctggcttccccgtgctggatgccaatgacctagaggacaaaaacagcccattctactacgattggcattccctccaagtgggagggctcatctgcgctggcgttttatgcgctatggggatcatcatcgttatgtctgctaagtgcaagtgtaaatttggtcagaagagtgggcatcacccgggcgaaaccccacctttaataacacccggctccgctcagtcttag

SEQ ID NO: 117596 - DNA, 186 bp, synthetic construct
  misc_feature 1..186: note = Description of Artificial Sequence: Synthetic coding sequence
  source 1..186: mol_type = other DNA
atgcaaaaggtgacactgggtcttctagttttcctggcaggtttcccagtcctcgacgctaatgatctggaggacaagaacagtcccttttactacggtgaatccccatgcccccttagcccgccacacaatcctacatattgcctggtaccccgcgtgcccattcaggggtggggattgacatag

SEQ ID NO: 117597 - DNA, 435 bp, synthetic construct
  misc_feature 1..435: note = Description of Artificial Sequence: Synthetic coding sequence
  source 1..435: mol_type = other DNA
atggggcggggatatagtggcgccctccaagccagaggcggcctagaggaaccgttggagcggggactgcgcgggcctagcttcacccagagtccactgcatggggcagctgctgcctatcttagcgctcagagagacgcttcgctgcctgtgcctggacagagaagtgatatgcaaaaagtgacccttggccttctggtatttctggccggcttcccagttttagacgccaacgatctcgaagataaaaatagtcccttttattacgattggcactcgctgcaggtgggaggcttgatttgcgctggcgtactttgtgccatgggcataatcattgtgatgagtgcaaagtgtaagtgtaaatttggacaaaaaagtggacatcacccgggagagacacccccacttatcacccctggtagtgcccagagctag

SEQ ID NO: 117598 - DNA, 288 bp, synthetic construct
  misc_feature 1..288: note = Description of Artificial Sequence: Synthetic coding sequence
  source 1..288: mol_type = other DNA
atggagcttgtgctggtctttctgtgttccctgctcgcacccatggttctcgcttccgctgcggaaaaagagaaagagatggacccattccactacgattaccaaacgctgagaatcggaggtctcgtctttgccgtggtgctgtttagcgttggcatcctattaatcctctcacggaggtgcaagtgcagcttcaatcagaagcctagggccccgggcgatgaagaggcccaagtggagaacctgattacggctaatgcaaccgagccacagaaagccgaaaactag

SEQ ID NO: 117599 - DNA, 288 bp, synthetic construct
  misc_feature 1..288: note = Description of Artificial Sequence: Synthetic coding sequence
  source 1..288: mol_type = other DNA
atggagcttgtgctggtcttcctgtgctctttgttggccccgatggtgctggcgtccgcagctgagaaagaaaaggagatggacccgttccattacgattatcagaccctgcgcattggaggactcgttttcgcggtcgtcctcttcagcgtcggcattctgctgatcttatcacgtaggtgtaagtgtagcttcaatcagaagccccgcgcccctggagatgaagaggcacaagtcgagaacctgatcacggccaacgctactgagccgcaaaaggctgagaactag

SEQ ID NO: 117600 - DNA, 288 bp, synthetic construct
  misc_feature 1..288: note = Description of Artificial Sequence: Synthetic coding sequence
  source 1..288: mol_type = other DNA
atggagctcgtgttggtgttcctctgtagcttactcgctcccatggtcctggcctcagcggcagagaaggagaaggagatggacccattccactacgactatcagacactgaggatagggggtctggtgttcgcggtggtgctcttttcagtgggcatcttgctcatcttgagccggagatgcaagtgttcttttaatcagaagccacgagcacctggggatgaggaggcccaggtagaaaatttgataaccgcaaacgctactgagccacagaaggccgaaaactag

SEQ ID NO: 117601 - DNA, 288 bp, synthetic construct
  misc_feature 1..288: note = Description of Artificial Sequence: Synthetic coding sequence
  source 1..288: mol_type = other DNA
atggaactcgtgctggtgttcctgtgttccttgcttgcccctatggtcctggctagtgcggccgaaaaagagaaggaaatggacccattccattatgactaccagacattgagaatcggtggactggtgtttgccgtggttctctttagcgttgggatcctcctgatcctttcgaggagatgtaagtgctcctttaaccagaaaccacgagctcctggtgacgaggaggcgcaggttgagaatttgatcaccgccaatgcaacggaaccacagaaagccgaaaattag

SEQ ID NO: 117602 - DNA, 288 bp, synthetic construct
  misc_feature 1..288: note = Description of Artificial Sequence: Synthetic coding sequence
  source 1..288: mol_type = other DNA
atggagctcgtcctcgtgtttctgtgctccctgctagctccaatggttctggcttcggctgctgagaaggagaaagagatggatccttttcactacgattaccagaccctgagaatcggcggactggttttcgctgtagtccttttctcagtgggaattctgctgattctgtccagaaggtgcaagtgcagctttaaccagaaaccgagagctcccggcgatgaggaagcccaggtcgaaaatctcattaccgccaatgcaaccgagccacagaaggcagagaactag

SEQ ID NO: 117603 - DNA, 288 bp, synthetic construct
  misc_feature 1..288: note = Description of Artificial Sequence: Synthetic coding sequence
  source 1..288: mol_type = other DNA
atggagctggttctggtatttttgtgtagtctcttagcgcccatggtactcgcaagcgctgctgaaaaggagaaggagatggaccctttccattacgactaccagacactgaggatcggaggcttagtctttgctgtggttctattctcagtgggaattcttctgatcctcagccggcgttgcaaatgtagctttaatcagaaacccagggccccgggagacgaggaggctcaggtcgagaaccttatcacggcaaacgctacagagccccaaaaagcagagaattag

SEQ ID NO: 117604 - DNA, 243 bp, synthetic construct
  misc_feature 1..243: note = Description of Artificial Sequence: Synthetic coding sequence
  source 1..243: mol_type = other DNA
atggccactccaacacagactccaaccaaggcccccgaagagccggatcccttttactacgattataacaccgttcagaccgtggggatgactctcgcaactatcctattcctgctaggaattctaattgtaataagtaagaaggtcaaatgtaggaaggccgactcacgatccgaatctcctacctgcaagtcctgtaagtcagagctgccctcaagcgccccggggggggggggcgtgtag

SEQ ID NO: 117605 - DNA, 402 bp, synthetic construct
  misc_feature 1..402: note = Description of Artificial Sequence: Synthetic coding sequence
  source 1..402: mol_type = other DNA
atggtgagcgtgggattcggcgaccgggcaggcctgggctctagctgtagatgctcccagatcactccagatatggcttccgcagtggccactcggtatgtgctgggacactggccacgcgaccacatctgcggctgtggtagccaccaactcagctcttggcgggccgagcctgacggcggcgtgggcatgccccacactttgagcgagcccccgtccggcctaaccggtatttgggccggggctctggtgagtcccgagaagcaaatgaaagaaaatttgcgtagtaatgattctgaacctcggcttccaggatttgagtcatgcctgatccattctcttgcagtgtggccatgggctagcaatttcgccagtctcggtccatcagttaacaaagggtag

SEQ ID NO: 117606 - DNA, 882 bp, synthetic construct
  misc_feature 1..882: note = Description of Artificial Sequence: Synthetic coding sequence
  source 1..882: mol_type = other DNA
atgtacttcctgaccccaattttggtggcgatcctgtgcatcctggtggtgtggatcttcaagaatgcagataggtcaatggaaaagaaaaaaggagaacctaggacccgcgccgaggcacggccttgggtggacgaggacctgaaagatagctctgatctccatcaggccgaggaagacgccgatgagtggcaggaatctgaggagaatgtagagcacatccctttctcccacaatcattatccggagaaagagatggttaaaagatctcaagagttctatgagctgcttaacaaacgcagaagtgtgcggttcataagcaatgaacaggtacccatggaagttattgacaacgtgattcggactgccggcacagcgccctcaggcgcacacaccgaaccttggaccttcgtggtagtcaaggatccagatgtgaagcacaagattagaaagattatcgaagaagaggaggagattaattacatgaagaggatggggcaccgttgggtaaccgatcttaagaaactccgaactaattggatcaaagagtatctggatacagcacctattctgatattgatttttaaacaggtgcatggatttgcagcgaacggtaaaaagaaagtccactattacaatgagatttctgtgtctatagcttgcggcattctactggcagccctccaagtgaacaatggcatcactatgcgccaccaaaccgccagacacaggcatttaatcgaaggtcccggacgatccagtgaagcctgtagtaaactgagctcacagggttgcccagagtgccggagcggcgactgccactatcattcctcccagctgtggccctccacggagggagctccagggcctccacggacgtag

SEQ ID NO: 117607 - DNA, 1458 bp, synthetic construct
  misc_feature 1..1458: note = Description of Artificial Sequence: Synthetic coding sequence
  source 1..1458: mol_type = other DNA
atgggctgcgtgcagtgtaaagataaagaggccaccaagctaacggaggagcgtgacggaagcctgaaccagtcatctggatacaggtacggaaccgatcctacaccgcagcattaccctagtttcggcgtgaccagtatccccaactacaataattttcacgcagcgggaggtcaaggcctgaccgtttttggcggtgtgaactcctcttcccacacaggtactctgagaacgaggggtgggaccggggtcactttgttcgtggccctctatgattacgaggcacggaccgaggaatggtatttcggcaagctcgggaggaaagatgcggagcgacaactgctgtcgtttggaaacccacgtggcacattcctgattcgcgaatccgaaaccacaaagggggcatacagtctgagtattcgagattgggacgacatgaagggcgatcacgtgaagcattataagatccgcaaacttgacaacgggggctactacatcaccacaagagcacagttcgagaccttacagcagctggtccaacattacagtgaaaaagccgacgggctctgcttcaacctaactgtgatcgcgtcttcctgtacgccccagaccagcgggcttgccaaggatgcatgggaggtcgcccgacgcagcctgtgcctcgagaaaaaactcggacaaggctgctttgctgaggtgtggctcgggacttggaatggaaatacaaaagttgccatcaagacgctaaagcccggcactatgtcacctgagtcctttctagaggaggctcagatcatgaaaaagttaaaacacgacaaactggtccagctctacgctgttgtgtccgaggaacctatatatattgttacagagtatatgaacaaaggctcgctcttagattttttaaaggacggagaagggcgggcattaaaactccccaacctcgtcgacatggccgcccaggttgctgcaggtatggcttatattgagaggatgaattatattcatagggacctgcgttccgctaacatcctggtcggcaacggactcatttgcaagatcgccgactttggcctagccaggctcatcgaggacaacgaatatactgcgagacagggcgcaaagtttccaatcaaatggacagctcctgaagccgctctctacggacggttcacgattaaatcagatgtgtggtctttcgggattctcctgacagaactggtaacgaaaggcagagtgccttaccccggaatgaacaatcgggaggtcttggagcaggtcgagcggggctataggatgccttgtccccaagactgccccatatccctacatgagctgatgattcattgttggaagaaagacccagaagaaaggcccacattcgagtacctccagagcttcctggaggactactttaccgcgaccgaaccgcagtaccagcctggggaaaatttgtag

SEQ ID NO: 117608 - DNA, 1614 bp, synthetic construct
  misc_feature 1..1614: note = Description of Artificial Sequence: Synthetic coding sequence
  source 1..1614: mol_type = other DNA
atggggtgcgtccagtgtaaagataaggaggccactaagctaaccgaggagagagatggtagtttaaatcaatctagcggataccgctatggaacagatccaacaccccaacactatcctagtttcggagtaacatcgattccgaactataataacttccacgccgcgggcggccagggactaaccgtgtttggaggtgtgaactcaagtagccataccggtactttacggacaaggggaggcactggggtgactttgtttgtagcactctacgattatgaagccaggacggaagacgacctctcgtttcataagggggagaaatttcagatcctcaattccagcgagggagactggtgggaagctagatctctcactaccggcgagacgggatatatccctagcaattacgtggcacctgtggatagcattcaggccgaggaatggtacttcggcaaactcggaagaaaggatgccgaacgccagctcctgagcttcggcaatccccgggggacgtttttgatccgtgagagtgagacaaccaaaggcgcctatagcctgtcaattagggactgggacgatatgaagggggatcacgtcaaacattacaagatcagaaagctcgacaatggaggctactatataacaaccagggctcagttcgagacactgcaacaactggtacagcactacagcgagagagcagcaggcctgtgttgccgcctggtggttccttgccataagggaatgccgagactgactgacctgagcgtcaaaactaaggatgtgtgggaaattcctcgtgagtccttacagctcatcaagaggctgggaaacgggcagtttggcgaggtttggatgggtacttggaatggaaacacaaaagtggccatcaaaactttaaaacctggcaccatgagccctgagtcgttccttgaggaggcccagataatgaaaaaactaaagcacgacaagctggttcagttatacgcagttgtatctgaagagccaatctatatcgtcacagaatatatgaacaagggaagcctgctggattttctgaaggatggagagggccgtgctctgaagttgcctaacctggttgacatggccgcccaggtggccgccgggatggcttatatagaacggatgaattatattcacagagacctacgctccgccaatatcctcgtggggaatggcctgatctgtaagattgctgatttcggcctcgctcgacttattgaagacaacgagtatacagctaggcagggtgcaaaattcccaatcaagtggaccgcccctgaagctgcgctgtatggccgcttcaccatcaagtccgacgtctggtctttcggcatactcctgactgagctggttacaaaggggcgggtgccgtatccagggatgaataatcgcgaggttctggagcaggtggagcgtggataccgtatgccatgtccccaggattgccccatctcactgcatgagctgatgattcactgctggaagaaggatccagaagagcggcccaccttcgaatacctgcagtcttttctggaggactactttacagctaccgaaccccagtaccagccaggcgagaacctgtag

SEQ ID NO: 117609 - DNA, 1449 bp, synthetic construct
  misc_feature 1..1449: note = Description of Artificial Sequence: Synthetic coding sequence
  source 1..1449: mol_type = other DNA
atggggtgcgtgcaatgcaaggacaaagaggccacaaaactgacggaggagagggacgggtctttgaatcaatcttccgggtataggtacggaacagatcccacacctcagcattacccttccttcggtgtaacgtcaatacctaactacaataacttccacgccgctggcggccagggtctcaccgtgtttggcggtgttaattcctctagccacacgggaactctaaggaccagaggcggaacgggagtaacccttttcgtcgctctatatgattacgaagcgcgtacagaggatgacttatcctttcataagggcgaaaagttccaaattcttaacagctccgagggcgattggtgggaagcccgatcgctaactacgggcgagacaggctacataccatcgaattatgtggcgccagtcgatagcattcaggctgaggagtggtactttggtaagctaggtcgtaaggatgctgagcggcagctgctatccttcggcaatccaaggggcacttttctgataagagagtccgagacaacgaaaggagcttatagcctctcgattagggactgggatgatatgaagggcgatcacgtaaagcattataaaatccggaagctcgataatggaggatattatatcacaacgagggcccagtttgaaaccctgcagcagctggtacagcactattctggaacgtggaatggaaacacaaaggtcgccataaagaccctcaagccaggcacaatgagcccggagtcattcctggaggaggcacagatcatgaagaaactgaaacacgacaaattagtccagctttatgcagtagtgtcggaggagccgatttacatagtgacagagtatatgaacaaaggaagtctgctggatttcttgaaggatggcgaagggcgggctctgaaattacccaacctggtggatatggcagcacaagtggctgcagggatggcatacatcgaaaggatgaactatattcaccgggacctaagatctgctaacatcctcgtgggtaacggactcatatgcaaaatcgctgatttcggccttgcaagacttattgaggataacgagtacactgccaggcaaggcgctaagttcccaatcaaatggacagcacccgaggccgcactgtacggccggttcactataaagtctgacgtgtggtcatttgggatccttttaaccgaactggtgacaaaaggtagagtgccgtatcctggcatgaacaaccgagaagtgctcgaacaggtggagagaggctatcgcatgccctgtccccaagactgtccgataagtctgcacgagctcatgattcactgctggaaaaaagatccagaggagcggcctacgttcgagtatctgcaaagctttctcgaggattatttcacggctactgagccccagtatcagcccggggaaaatctctag

SEQ ID NO: 117610 - DNA, 1614 bp, synthetic construct
  misc_feature 1..1614: note = Description of Artificial Sequence: Synthetic coding sequence
  source 1..1614: mol_type = other DNA
atggggtgcgttcaatgtaaagacaaggaagcaacaaaactaaccgaggagcgcgacggctccctgaatcaaagtagtgggtataggtacggcaccgacccgacaccgcaacattatccatctttcggggtgacgagtatccctaactacaataatttccacgccgctggcggccaaggtttgactgtgttcggtggtgttaacagctcgagtcacacggggaccctccgtacgaggggtggcaccggcgtcaccctgtttgtggccctgtacgattatgaggcccgaaccgaggatgatttaagcttccacaaaggggaaaagttccagatcctcaacagctcagagggcgactggtgggaagctaggtcactgaccaccggagagacgggctacatcccttccaattatgtggcccccgtggactctatccaagctgaggagtggtactttggtaaactggggagaaaagatgccgagcggcagcttctgagcttcggaaaccctagaggcactttcctaatccgggaaagcgagacaactaagggagcctactcgttgtctatacgggattgggatgacatgaagggagaccacgttaagcactacaagatacgaaagctagataacggcggttattacatcacaacaagggcgcagtttgagaccctacaacagctggtacagcactacagcgagagggcggccggattgtgctgtagattagtggttccatgccacaaaggaatgcctagactgaccgacctgtctgttaagactaaggacgtttgggagataccaagagagtccctgcagctcatcaaaagactggggaacggacagtttggagaagtctggatgggcacttggaacggaaacactaaagttgcaatcaaaacactgaaacctgggaccatgtcacctgaaagcttcctcgaagaagcccaaattatgaagaaacttaaacatgataagctagttcagctctatgcagtggtgtcggaagagcctatctatatcgtgaccgaatacatgaataaaggcagtctgctcgacttcctcaaagacggagaaggcagagcactgaagcttccaaaccttgtggatatggcggcgcaggtggccgctggtatggcatacattgaacggatgaattatatccaccgtgacctgagatccgccaacattctggtaggaaacggattgatctgtaagatcgcagacttcgggctcgcccggctcattgaggacaatgaatataccgcccggcaaggcgcgaaattcccgattaagtggaccgccccagaagcagcactttacggccgattcacaataaagagcgatgtgtggagtttcggaatcctcctgacggagctggtaaccaaagggcgcgtgccgtatccaggcatgaataaccgggaagtgcttgaacaggtggagagagggtaccggatgccttgccctcaggactgcccaatctcccttcacgaattaatgattcactgttggaagaaggacccagaggaacgcccaacgtttgagtatctgcagtccttcctcgaggattatttcacagccactgagccgcagtatcagccaggtgaaaatctgtag

SEQ ID NO: 117611 - DNA, 1605 bp, synthetic construct
  misc_feature 1..1605: note = Description of Artificial Sequence: Synthetic coding sequence
  source 1..1605: mol_type = other DNA
atgggttgcgtgcaatgcaaggataaagaggctaccaagctgactgaggagcgggacggatccctaaaccagagctccggctatagatatggtacggacccaacccctcagcactatcccagcttcggagtgacctctattcctaattacaataactttcatgctgcaggggggcaaggtctcaccgtcttcggaggcgtgaattccagctcccatacagggactctgcggactcggggcggaacaggcgtcacactgtttgttgcactgtatgattatgaggcaagaacggaagacgacttgagctttcataagggtgagaaatttcaaatcctgaattcatctgaaggcgattggtgggaggctaggtccttgaccacgggtgaaactggatacattccctcaaactatgtggccccagtagattcaatacaggccgaggaatggtatttcggaaaactggggcggaaggacgcggaacgtcagcttctttctttcggaaacccacggggcacatttctgatccgggagtccgagactaccaagggtgcctattcattgtctattagagattgggacgacatgaaaggtgatcatgtgaagcactataagataaggaaactagacaacggcggctactatattacaacaagggcacagttcgaaaccctccaacagttggttcaacactattccgagaaggcagatggactgtgttttaacctgaccgtcatcgctagctcctgtacgccccagacaagcggccttgcaaaagatgcatgggaggtcgctagacgttctctgtgcctggaaaaaaagcttggtcagggctgcttcgcagaagtctggcttgggacttggaatggcaacacaaaggttgccataaagaccctcaagcccgggaccatgtccccagaatccttcctcgaagaggctcaaattatgaaaaagctgaagcacgacaaactagttcaactttatgctgtggtatctgaggagcctatttatatcgtgactgagtatatgaacaaagggagtctgttggattttctgaaggatggagagggtcgtgccttaaaattgccaaacctcgtggacatggccgcccaggtagctgcaggaatggcttacatcgaacggatgaattatatccaccgggatcttagatcagctaatatactcgtcggaaatggtttgatatgtaaaatcgctgactttggtctcgcccgtttaattgaggacaatgaatataccgccagacagggtgccaagtttcctatcaaatggacagcgcctgaggcagccctctatggcaggtttacaataaagtcggacgtgtggtcatttggaatccttctcaccgaacttgttaccaagggtcgcgtcccataccccgggatgaacaatcgtgaggtgctagagcaggtggagcgtggctaccggatgccgtgcccccaggactgtcctatcagtcttcacgagctgatgatccactgctggaagaaggatccggaggaaaggccgacattcgagtacctgcagtcctttctcgaagactactttaccgccaccgaaccccagtaccagcccggtgagaacttatag

SEQ ID NO: 117612 - DNA, 1605 bp, synthetic construct
  misc_feature 1..1605: note = Description of Artificial Sequence: Synthetic coding sequence
  source 1..1605: mol_type = other DNA
atgggttgtgtacagtgtaaggacaaggaagccaccaagctcacagaagagcgcgatgggtcattgaatcagagttccggatacaggtacggaactgaccctacgccacagcactacccgtcatttggtgtcacgtccattccaaactacaataacttccatgccgccgggggccagggtctgaccgtttttggtggcgttaatagcagtagccatacgggcaccttacggacaagaggaggaactggagtcaccctttttgtagctctgtatgattatgaagcccgaacagaggacgatctttcttttcataagggcgagaagttccaaattctcaattcctctgagggcgactggtgggaggcacgaagcctgacgacgggcgaaactggctatattccatctaattacgtggcacccgtagactctattcaggctgaggaatggtactttggcaaactgggacgcaaggacgccgaaaggcagctgttatcctttgggaaccccagaggaacatttctcattcgcgagtcagaaaccaccaagggcgcttacagcctctccattcgagactgggatgatatgaagggtgatcatgtcaagcattataaaattcgcaagctcgacaacggtgggtactacataactacccgcgctcagttcgagactctccagcaactagttcagcactactccgagaaggccgacggcttatgcttcaatctgactgtgattgccagttcttgcactccgcaaacctctgggctggccaaggacgcctgggaggtggcaagaagaagcctttgcctggagaaaaagctcggtcagggatgttttgcagaagtatggctgggaacatggaatgggaacaccaaggtagctattaaaacacttaaaccggggacaatgagcccagagtcattcctggaggaagcccaaatcatgaagaagcttaaacatgataaactggtgcaactgtatgccgtagtgtctgaggaacccatttatattgtaacagagtacatgaacaaagggagtctcctagattttctgaaggatggcgaaggccgagcactcaaactgccaaatctagtggacatggccgctcaggtcgcagctgggatggcctacattgagagaatgaactacattcacagagacctccgaagtgccaatattctggtcggaaacgggctgatctgtaaaatcgccgattttggcctggcgcgcttgatcgaggacaatgagtatacagctagacagggcgctaagtttcccattaagtggaccgcacccgaagctgcactttatggccggtttaccataaagagcgatgtgtggagttttggcatcctcctgacggaactggtcacaaagggtagagtgccgtacccgggcatgaacaatcgcgaggtgcttgaacaggtggagcgtggttaccggatgccctgcccgcaggactgtcctatatccctacatgagctcatgatacactgttggaaaaaggacccagaagagcgcccgacctttgagtacctacagagctttctggaggactatttcacagccactgaaccacagtatcagcccggcgaaaacctgtag

SEQ ID NO: 117613 - DNA, 363 bp, synthetic construct
  misc_feature 1..363: note = Description of Artificial Sequence: Synthetic coding sequence
  source 1..363: mol_type = other DNA
atgggttgcgttcagtgcaaagataaagaggcaacgaagctaactgaggagcgggacggcagtctgaatcagtcatccggctatcgctacggaactgatcctacccctcagcactatccctccttcggcgtgacctccataccaaattacaacaactttcatgccgcaggtggccaaggactgaccgtattcggcggagtgaactcctcctcccacacgggcacactgaggacccgtggggggaccggcgtcacgctatttgtcgcactgtatgactacgaggctagaacggaggacgacctgagtttccataaaggcgagaaattccaaattctgaactcctctgaaggcgactggtggtag

SEQ ID NO: 117614 - DNA, 699 bp, synthetic construct
  misc_feature 1..699: note = Description of Artificial Sequence: Synthetic coding sequence
  source 1..699: mol_type = other DNA
atgggctgcgtacagtgtaaagataaggaggctacgaagcttaccgaggaacgcgatgggtcactaaatcagagttcaggatatagatacgggaccgatcctacaccccagcactacccttccttcggcgtgacatcaattccgaactacaacaactttcatgccgcgggaggccagggactaacagtgtttggcggcgtaaactcatctagccacaccggcacactgcgcaccaggggcggtacaggagtaacactgttcgttgcactctatgactatgaagcacgaaccgaggacgacctatcgttccacaagggcgagaaatttcagatcctgaattccagtgagggcgactggtgggaggcgagatcacttacaacaggcgagaccggttacattccttcaaattatgtggcgcccgttgacagcattcaagctgaggaatggtattttggcaagcttggacgcaaggatgcagagcgccagctgctgtcctttggaaacccaagaggtacatttctgattcgggagagcgaaaccacaaaaggggcctactccttgtcaatccgcgactgggatgacatgaaaggtgaccacgtgaaacattacaagattcgcaagcttgacaatgggggttactatatcaccacccgtgcacaattcgaaacactccagcagcttgtgcagcattacagctag

SEQ ID NO: 117615 - DNA, 321 bp, synthetic construct
  misc_feature 1..321: note = Description of Artificial Sequence: Synthetic coding sequence
  source 1..321: mol_type = other DNA
atgggttgcgtgcagtgcaaagacaaagaggctaccaaactaacagaggaaagagatggcagtctcaatcaatcatcgggataccggtatggcaccgatcccacgccacaacactacccttcttttggcgttacaagcattcccaattacaacaattttcacgccgcaggaggccaaggccttacagtgtttggaggagtgaactcttcaagccacaccgggaccctgcgaaccagaggcggcacgggggtaacgttgtttgttgccttgtatgactacgaggcacgcacggaggatgacctgagctttcataaggggtag

SEQ ID NO: 117616 - DNA, 198 bp, synthetic construct
  misc_feature 1..198: note = Description of Artificial Sequence: Synthetic coding sequence
  source 1..198: mol_type = other DNA
atgggatgcgtccagtgcaaagataaagaagcaaccaagcttaccgaggaaagggacggctctctgaatcagtctagcggctaccggtacggaacagatcccacaccccaacactatccttctttcggagttactagcatccctaactataataattttcacgctgcaggaggacaagggttaactgtatttgggtag

SEQ ID NO: 117617 - DNA, 528 bp, synthetic construct
  misc_feature 1..528: note = Description of Artificial Sequence: Synthetic coding sequence
  source 1..528: mol_type = other DNA
atgggatgtgtgcagtgcaaggataaggaagccacaaagttaaccgaagaaagagatggtagcctgaaccagtcttcaggctacagatacggtactgatcctactccccagcattatccaagttttggagtgacctctatcccgaattacaacaatttccacgctgctgggggacagggcctgactgtgtttggcggcgtcaactcgagcagccatacaggcaccctgcgcactcgaggggggactggcgttacgctattcgttgccctttacgattacgaggcccgtaccgaggatgacctgagcttccacaaaggggaaaagttccagattctaaattcttctgagggtgactggtgggaggcccggagccttacaaccggcgagacaggttatatcccaagtaattacgtggcccccgtcgattcaattcaggctgaggagtggtactttgggaaacttgggcgaaaggacgcggaaaggcaacttctgtcctttggcaatcctaggggcacgtttctgatctag

SEQ ID NO: 117618 - DNA, 462 bp, synthetic construct
  misc_feature 1..462: note = Description of Artificial Sequence: Synthetic coding sequence
  source 1..462: mol_type = other DNA
atgggctgtgtgcaatgtaaggataaagaggcaactaagctgacagaggaacgcgacggctcactcaatcagtcctcaggatataggtatggtacggatcctacgcctcagcattacccttcatttggggtgacaagcatccccaactacaataactttcacgcagctggaggacaggggctaaccgtcttcggtggtgtgaattcctcttcacatacaggcaccttgcgcacaagggggggaaccggtgtgacactgtttgttgcgttatacgactatgaggcgagaactgaggatgacctgagcttccataagggcgagaagttccagattcttaatagtagtgagggagattggtgggaggctaggagtctgacaactggcgaaactggatatataccgagcaactatgtggctccggtggactccatccaagctgaggagtggtactttggcaaatag

SEQ ID NO: 117619 - DNA, 357 bp, synthetic construct
  misc_feature 1..357: note = Description of Artificial Sequence: Synthetic coding sequence
  source 1..357: mol_type = other DNA
atggggtgcgttcagtgtaaggataaggaagccacaaaactgaccgaggaacgagatggatctttgaaccagtcgtcaggatatcgatatgggaccgatcccactcctcagcactacccttcttttggggtgacatctattccaaattataataactttcatgctgcgggtggccaaggactgaccgtctttggcggggttaattcctcatcccacaccggtaccctgaggacaagggggggaactggtgtaacccttttcgtggccttatacgattacgaggcgcggacggaagacgacttgagcttccataagggagagaaatttcaaattcttaacagctccgagggagactag

SEQ ID NO: 117620 - DNA, 561 bp, synthetic construct
  misc_feature 1..561: note = Description of Artificial Sequence: Synthetic coding sequence
  source 1..561: mol_type = other DNA
atgggatgcgttcagtgcaaagataaggaggccaccaagctgacagaggagagagacggcagcctgaatcagtcgtccggttatcgttatggcaccgacccaacgccccagcactatccgtcttttggagtaacctcaatccccaactataataattttcacgccgctggagggcagggtctgactgtattcgggggcgtgaactccagttcccatactggtaccttacgcacgaggggaggaactggtgtcacgctatttgtcgccttgtatgactatgaggcacgcactgaggacgacctgagttttcataagggggagaagttccagattttaaactctagtgagggggattggtgggaagctaggtcattaactacgggggaaacaggctatatcccgtccaactacgtcgcgcccgtggatagtatccaggcggaggaatggtactttggtaaacttggccggaaagacgcggaacgccagctcctcagctttggcaatcctcgcgggactttcctgatcagagaatctgaaacaacaaaaggcgcctactcatag

SEQ ID NO: 117621 - DNA, 312 bp, synthetic construct
  misc_feature 1..312: note = Description of Artificial Sequence: Synthetic coding sequence
  source 1..312: mol_type = other DNA
atgggctgcgtgcagtgtaaggataaagaagcaaccaaactcacagaggaacgagatggatcactaaatcagtcgagtggatacagatacggaactgatcctacaccccagcactatccctctttcggcgtgacatcgatccctaattacaataattttcacgctgccggcggccaagggctgacggtgttcggcggcgtgaactccagttcacacacaggtaccctgcgcactagagggggcacaggcgtgacactgttcgtggctctgtatgactacgaagctaggactgaagacgatttatcattttag

SEQ ID NO: 117622 - DNA, 459 bp, synthetic construct
  misc_feature 1..459: note = Description of Artificial Sequence: Synthetic coding sequence
  source 1..459: mol_type = other DNA
atggggtgcgtgcagtgtaaggacaaagaggcaactaagctgacggaagagcgagacggctctctcaaccaatcgtccggctaccggtacgggaccgatcccacaccgcagcactacccctcttttggcgtgacctcaatccccaattacaataactttcacgccgccggcggccagggtctcaccgtctttggaggagtgaattcttcctctcacacaggcacactgagaacacgggggggaactggcgtcactctgttcgtggccctgtacgattacgaagcgcggacggaagatgatttgagtttccataagggcgaaaaatttcagattctgaacagctctgaaggcgactggtgggaagctcgttcactcaccacaggagagactggttacataccatctaattacgtggccccagtggattctatacaggctgaagaatggtacttcggctag

SEQ ID NO: 117623 - DNA, 351 bp, synthetic construct
  misc_feature 1..351: note = Description of Artificial Sequence: Synthetic coding sequence
  source 1..351: mol_type = other DNA
atgggctgtgtgcagtgtaaggacaaggaagccaccaagctgacagaagaaagggacgggtccctcaaccaatcaagtggataccgctacgggacggacccaactccccagcactatccttcgttcggcgtaacatcgattcctaactacaacaattttcatgcagctggaggccagggactgaccgttttcggcggggtcaatagtagttctcataccggcacgctacggactaggggaggcacaggcgtgacactctttgtcgccctgtatgattacgaggctcgaaccgaggacgacctgtccttccacaaaggcgaaaagttccagattctgaacagcagtgaatag

SEQ ID NO: 117624 - DNA, 423 bp, synthetic construct
  misc_feature 1..423: note = Description of Artificial Sequence: Synthetic coding sequence
  source 1..423: mol_type = other DNA
atggggtgcgtgcaatgcaaggacaaggaggcgacgaagctgacagaggagagagatggatccctgaaccaatcctcgggctacaggtacgggaccgaccctaccccacaacactatccatcctttggtgtgacctctatccccaactacaataacttccacgcagccgggggccagggattgaccgtgttcggtggcgttaacagctccagccacactgggactctacgcacgcggggcgggaccggagtgaccttattcgtggccctgtacgactacgaagcacgcaccgaagatgacctcagcttccataagggcgagaagtttcagatcctaaacagcagtgagggagattggtgggaagcccgatccctgactaccggagagaccggttatattccatcaaattacgtagctccttag

SEQ ID NO: 117625 - DNA, 438 bp, synthetic construct
  misc_feature 1..438: note = Description of Artificial Sequence: Synthetic coding sequence
  source 1..438: mol_type = other DNA
atgggctgcgtgcagtgcaaggacaaggaagccaccaaactaaccgaggagcgtgatggctcactgaaccagagtagcgggtaccgctatgggacagaccctaccccacaacattatcctagctttggcgtgacttcaatacctaactataacaactttcatgcagcaggaggtcagggccttaccgtgtttggaggagtgaacagcagttcccatacaggcacactcaggacccgagggggcaccggagtcacactgttcgtggcactgtatgattacgaggcccggaccgaagatgacttaagcttccacaaaggcgaaaagtttcagatcctgaattcttcggagggggattggtgggaagcgcggtcccttacaactggtgaaacaggctacattcccagtaattacgtggcccccgtcgacagcatccaatag

SEQ ID NO: 117626 - DNA, 1605 bp, synthetic construct
  misc_feature 1..1605: note = Description of Artificial Sequence: Synthetic coding sequence
  source 1..1605: mol_type = other DNA
atgggctgcgtccagtgtaaggacaaggaggcaacaaaattaacggaagaacgcgacgggtcgctcaaccagagctcagggtatagatatggcacagaccctaccccacagcattatcctagtttcggagttacctccatcccaaattataacaactttcatgcagccggaggacaaggtctcactgtgttcggaggcgtgaattccagctctcacactggaacactgaggacacggggagggaccggggtaactctgttcgtggccctgtatgattacgaagccagaactgaagacgatctgtcattccacaaaggggaaaaattccaaatcttgaacagctcagagggcgactggtgggaagctcgttctctgacaaccggcgagactgggtacatcccctccaactacgttgcgcccgtggattcaatccaagcggaggagtggtacttcgggaagctaggtcgaaaggacgcggagcgacagctgctgagtttcggcaacccaagaggtactttcctgatccgcgaaagcgaaacaacaaagggagcctattcattgtccatccgcgattgggacgatatgaagggcgatcatgtgaaacattacaagatcagaaagctcgacaacgggggctattacattaccacccgggctcagtttgagacgctgcaacagctagttcagcactattcagagaaagccgacgggctatgtttcaacttgaccgtgatagcgagttcatgcactccccagactagtggcctcgctaaggatgcctgggaagtggcccgtcggtccctctgcttagaaaaaaagctcgggcaggggtgcttcgccgaggtgtggctgggcacatggaatggaaatacaaaggtggcaattaaaacactgaaacctggaactatgtcacctgaatcctttcttgaagaagcccagataatgaagaagttaaagcatgataaactggtccaattatatgccgtagtgtccgaggagcccatctacattgtgactgagtacatgaataaaggctcactgctggacttcctgaaagatggtgaggggcgcgccctgaagctgcccaatttggtcgatatggccgctcaggtggccgctggtatggcttacatcgagcggatgaactatattcaccgggatttgagatccgccaacatcctcgtgggtaacggtctgatttgtaagattgccgacttcgggctggcacggctgattgaagacaatgagtataccgccagacagggcgcaaaattcccgataaagtggacggcaccagaagctgcgttatatgggcggttcaccattaagtccgatgtatggtccttcgggatcctgctgaccgagcttgttacaaaggggcgcgttccctatccaggaatgaacaaccgggaagtgttagaacaggtcgaaaggggatatcgcatgccatgcccgcaggattgccctatatctctccatgagcttatgattcactgttggaagaaggaccccgaggaacggccaacctttgagtatctgcaaagcttcctcgaggattattttacagctaccgaacctcaataccagcccggcgaaaatttatag

SEQ ID NO: 117627 - DNA, 1458 bp, synthetic construct
  misc_feature 1..1458: note = Description of Artificial Sequence: Synthetic coding sequence
  source 1..1458: mol_type = other DNA
atgggctgcgtccagtgcaaagataaagaagctactaagctaaccgaagaaagagacggatctctgaatcagtctagcggctatcggtacggcaccgatcctacgccccagcactacccatcattcggagtgaccagtattcctaactataacaattttcatgcagctggcggacaagggctaacagttttcggcggcgtgaactcttcaagccacacggggaccctcagaacgcggggtggaacaggggtgactctgttcgtcgcactgtatgactacgaggcccaggccgaggaatggtatttcggaaaactgggtcggaaggatgcagagaggcaactactgagcttcgggaacccacggggcaccttccttattcgtgaatcagagacaacaaagggcgcctacagcctttccattagagattgggacgacatgaagggcgatcacgtgaagcactacaaaattcgcaagctggacaacggaggttactacataacaactagagcccagtttgagaccctgcagcagctggttcagcactattccgagaaagcagacggattgtgctttaatctgactgtcatcgcttcttcgtgtacccctcagacaagcggcctggccaaagacgcctgggaggtggcgaggcgctctctgtgcctggagaaaaagctcggccagggatgcttcgccgaggtgtggctgggtacatggaacggaaatacgaaagtcgctatcaaaacactgaaaccaggcacaatgagtccagagtctttcctagaggaagcacagatcatgaagaaattaaagcatgacaagctcgtgcaactctatgctgtggtgagcgaagaaccaatttacatagttacggagtatatgaataaagggtcacttctagactttctgaaggacggcgaaggacgcgccttgaaactcccaaatctggtcgatatggccgctcaggtcgccgctgggatggcttatattgaaagaatgaattacattcacagggaccttcgatccgccaatatcttggtaggaaatggcttaatctgcaagatcgccgactttggcctagccaggctcatcgaagataatgaatatacagcccggcagggcgctaaattcccgatcaagtggaccgcccctgaggccgctctgtatggccggtttaccataaagagcgatgtgtggtccttcggaatcctgctgaccgagctggttactaaaggccgcgtgccctacccgggcatgaacaatcgtgaagtgctggagcaggtggagcgtggctaccggatgccctgcccgcaagattgtcccatttcattgcatgagctgatgattcactgctggaagaaagaccccgaggagcggccaaccttcgaatacctccagagctttctcgaagattacttcactgcgactgaaccccagtatcaacccggggaaaatttgtag

SEQ ID NO: 117628 - DNA, 4437 bp, synthetic construct
  misc_feature 1..4437: note = Description of Artificial Sequence: Synthetic coding sequence
  source 1..4437: mol_type = other DNA
atggcctctaccaacgctgagtcccagctccaacgcatcatccgagacttgcaagatgctgtgacagagctgagtaaggaattccaggaagcgggtgagccaataaccgatgattctacctccctccacaagttttcttataagctcgaatatctgctccagtttgatcagaaagaaaaggcaaccctcctcggcaataaaaaggactactgggactacttctgcgcctgtctggccaaggtgaaaggagctaatgatggaattcggtttgtgaagagtatctctgagctacgaaccagtttaggaaaaggccgcgcctttatcaggtactcgctcgtacaccaaaggctggcagatacactgcaacagtgcttcatgaacaccaaagtcacttccgattggtattatgcccgaagcccctttctgcagcctaaactaagttccgacatcgttggacagctgtatgagctgacagaagtccagtttgatctcgccagcagaggtttcgatttagacgccgcgtggccgacgttcgctaggaggaccctgacgactggaagtagtgcttacctttggaaaccccccagccgatctagctctatgtcatccttggtatcctcttatctgcagacccaggagatggtctcaaatttcgacctgaattctccccttaataatgaggcattggaagggttcgacgagatgcgactcgagctggatcagcttgaggtccgtgaaaagcagctgcgagaaaggatgcagcaactggacagagagaatcaggagctccgagcagctgtaagccaacagggagaacagttgcagacagagagagaacgcgggcgtaccgcggccgaagataatgtcaggcttacatgcttggtagctgaactccaaaagcagtgggaagttacccaggccacccaaaacaccgtgaaagagttacagacttgcctgcaagggttggagctgggagccgctgagaaagaggaggattaccacacagccctacgtcgcctggaaagcatgcttcagcccctggcacaggagctcgaggcaaccagggacagtttggacaagaaaaatcagcacctggccagctttcccggctggctagctatggcccagcagaaagcagacaccgccagcgacacaaagggtagacaagaaccgattccctctgacgccgcccaagagatgcaggaattgggagagaaactccaggccctcgagcgggagagaacaaaagtggaagaggtgaaccgccaacaatcagcccagctcgaacagctggttaaggaactgcagctgaaggaagatgcacgtgcatcgctagagaggcttgtgaaggaaatggcccccctgcaagaagagttgtccggcaagggacaggaagccgatcagttgtggcgccgactccaggagctgctcgcccatacaagttcttgggaagaagaacttgccgagctgcgtagagagaagaaacaacagcaagaagaaaaagagctgctcgaacaggaggttagatcccttacacggcagttacagttcctcgagacccaattagcccaagtgagccagcacgtctctgacctcgaggagcaaaagaagcagttgattcaagataaagaccacctctcgcagcaggtcggaatgcttgaaagactggctgggcctcctggccccgaactccctgttgccggggagaaaaatgaggcgctggttccagtgaatagctctctccaggaggcatggggaaaacctgaagaggaacagaggggactgcaagaggcacaactggacgatactaaggtgcaagaaggaagccaagaagaagaactgcggcaagctaaccgagagctagagaaggagcttcaaaacgtcgtgggccgaaaccaacttttggagggcaaactccaagcccttcaggctgactatcaggctctgcagcaacgagaatcagccatccaaggcagccttgcatccctcgaagctgagcaggctagcatacgccatctaggtgaccaaatggaggctagcctgctggccgtccggaaggccaaggaggccatgaaagctcagatggcagagaaagaagctatcctgcagagcaaggaaggggagtgtcaacagcttcgggaggaagttgaacagtgtcagcagttagccgaggccagacaccgcgagctgagggctttggaatcgcaatgtcagcagcagactcagctcattgaagtgctgaccgctgaaaagggccagcagggggtggggccacccacagataatgaagccagggaactcgcagcacagctggccctaagtcaggcacaactcgaggtacaccaaggagaagtccagcgtctccaggcacaggtcgtggatctacaggcaaagatgcgggccgccctggatgatcaagacaaggtgcagagtcagctgtccatggccgaggccgtgcttcgcgaacataagaccctggtccagcagttgaaggagcaaaatgaagccctcaatagagcccacgtgcaggaactcttacagtgtagtgaaagggagggggcgctacaggaagagagggcagacgaagctcagcagagggaggaggagcttagggccttacaggaggaattatcccaggccaaatgctccagtgaagaggcccaactggaacatgcagaactgcaggagcagctccaccgcgctaacaccgacaccgccgagttgggcatacaggtgtgcgccctgaccgttgaaaaggaaagggtggaggaggccctggcctgcgcagtccaagagctgcaggatgccaaggaggccgccagtcgcgagagggagggactggagagacaggtggcaggactgcagcaggaaaaagaaagcttgcaggagaagctaaaagcagccaaagctgcagccggtagcctgcccggcctgcaggcccaactggcgcaggctgagcagagagcacaatcactccaggaagccgcacaccaggagttaaatacactcaaattccaactttcagctgaaatcatggattaccaatctcgcttgaagaacgccggagaagagtgcaaatccttgcgggggcagctcgaagagcagggaaggcaacttcaggccgccgaggaggctgtggaaaaactgaaggctactcaagcagatatgggtgagaagctctcctgcacctcaaatcatctcgccgaatgccaggcagccatgctcaggaaggataaggagggtgctgctttgcgcgaagacctggaaaggactcagaaagagttagaaaaggcgacgactaagatacaggagtattataacaagctgtgccaagaggtaacaaaccgtgagcgtaatgaccagaaaatgctggctgacttggatgatctgaaccgtacgaagaaatacctggaagaacgacttattgaactgctgagggacaaagacgccctatggcagaagtcggacgccctcgaattccagcagaagttatctgccgaggagcgctggctcggggatacagaggccaaccactgtttagattgcaagagagaattctcctggatggtgaggagacaccattgtcgtatctgcggccgaatattctgctactattgttgtaacaactatgtcctcagtaaacacggcgggaaaaaggaacgttgctgcagggcatgcttccagaagttatcagaagggccgggttcccccgactctagcgggtcgggaacaagtcaaggggaaccctcacctgcattgagccctgcttcgcctgggccgcaggccaccggaggtcaaggtgctaacactgattacagaccacctgatgatgctgtgtttgatataattacagatgaagaactgtgccagattcaggagtcaggcagtagtttaccagagacgccgactgaaaccgattctctcgatcccaatgccgctgagcaggacacgacatctacctcacttacgcctgaagatacggaggacatgcccgtgggtcaggactcagagatctgtctcctgaagagtggagaactgatgatcaaggtgccactcacagtcgatgagatcgcgtcctttggagagggatctcgagagctatttgtccgaagtagcacttactcactgattcctatcacagtggccgaggcagggctcacaatatcttgggtgttcagcagcgacccaaagtcaattagctttagcgttgtgttccaggaggcagaagatacgcccctggaccaatgtaaagtcctgattcccactactcgatgcaactcccataaagaaaatattcaggggcaattgaaggtcagaactcccggaatttacatgttgatcttcgataacacgtttagcaggtttgttagtaagaaggtattttaccacttaacagtggataggcctgtaatctatgacggctcagactttctgtag

SEQ ID NO: 117629 - DNA, 804 bp, synthetic construct
  misc_feature 1..804: note = Description of Artificial Sequence: Synthetic coding sequence
  source 1..804: mol_type = other DNA
tgatctaagcacggcggcaagaaggaaagatgctgtagggcgtgtttccagaagctcagcgagggccccgggtcgccggacagcagcggcagcgggacatcacagggtgagcccagtccagcgctgagccccgccagccctgggcctcaggcaaccgggggccagggagcaaacacggattataggccacccgatgacgccgtgttcgacattataaccgacgaggaactgtgccaaatccaagagagcgggagctctctgcctgagacccctaccgagacagattctcttgaccctaatgcagctgagcaggatacaacatctactagtctgacaccagaggataccgaggacatgcctgtcggtcaggatagcgagatttgcctgctcaagtctggagagttgatgatcaaagtcccgctcactgtggacgagatagcgtcgtttggggagggatctcgggagctgttcgttcggtcttccacctatagcctgatccccatcaccgtggctgaagccggactgacgattagctgggtgttctcttctgatccaaagtcaatctccttcagtgtagtgttccaggaggcggaggacacccctctggatcagtgtaaggtgctgattcctaccactagatgcaactctcacaaggaaaacattcagggacagctcaaggtgcgcactcccgggatttacatgcttattttcgacaacactttcagccgtttcgtctcaaagaaagtcttttatcatttaaccgtcgaccgacctgtcatatatgacgggtcagattttctctag

SEQ ID NO: 117630 - DNA, 4497 bp, synthetic construct
  misc_feature 1..4497: note = Description of Artificial Sequence: Synthetic coding sequence
  source 1..4497: mol_type = other DNA
atggcctcgactaatgccgaatcccagctgcaaaggatcatccgagacttgcaggacgccgtgaccgaactgtcaaaggagtttcaagaggcaggtgagcctattaccgatgactcgactagtctgcacaaattctcttacaaactggagtacttgcttcagtttgaccagaaagagaaggccactttgcttggaaacaaaaaagactattgggactatttctgtgcctgcttggccaaagtgaagggcgcgaacgacggtatacggttcgtcaagtcaattagcgaactacgaacctctctcggcaaggggcgtgcattcattagatacagcctggtgcaccagcgcctggcagacaccctgcaacagtgcttcatgaacaccaaggtgactagtgattggtactacgctcggagccccttccttcaacctaaactgtcttccgacattgtaggacaactttatgaactcactgaagtccagtttgacttagcatcgagaggattcgatcttgatgctgcttggccgacattcgcccgcaggaccctgacaaccggcagctctgcatacctgtggaagcctccatcccgctcatccagtatgagttcgttggtatcaagctacctgcagacacaggagatggtgtcgaactttgatctcaactcccctctcaataatgaggcactcgaaggattcgacgaaatgaggttggaacttgaccagctggaggtgcgggaaaaacagttgcgtgagagaatgcagcaactggacagggagaatcaggagctccgtgcagccgttagccagcaaggagaacagctccagaccgaaagggagcgtgggcgcaccgctgcagaagataatgtcagactgacttgtcttgtggctgagctgcagaaacaatgggaggtcactcaggccacacagaatacagtcaaggaactgcaaacatgtctacagggccttgaactgggcgccgccgagaaggaagaggattaccacaccgctcttcggagacttgaatcgatgctccaaccgctggcccaggaactggaagcaactcgagattccctggataaaaagaaccagcacttagctagctttccaggttggttggccatggcgcagcagaaggctgacacagcctctgacacaaagggtagacaggagcctataccctcagacgcagcccaagagatgcaggaactgggagagaagctccaggctctcgagcgcgaacgaactaaggttgaagaggtcaacagacagcaaagcgcccagttagagcaactggtcaaagagctgcaattaaaggaagatgcgagggctagtttagagaggctggtcaaagagatggcgccactgcaagaagaactgtccgggaagggccaggaagccgatcagctatggaggcgcctccaggagcttctggctcacaccagctcctgggaggaagagcttgccgagttaagaagagagaagaagcagcagcaagaggaaaaggagcttctggaacaggaggtacggtctttgacccgacagctgcagttcttggagactcagctggctcaggtttcacagcacgtaagcgatctcgaggagcaaaaaaagcaactaatccaggacaaagatcacctgtcccagcaggttggcatgctagagcgcctggcaggaccccctggccctgagctcccagtggcaggggagaagaatgaagctctggtaccagtaaactcctctctccaggaggcatggggcaagcccgaagaagagcagcggggcctgcaggaagctcagctcgacgacacaaaggtgcaggagggcagtcaggaagaggagttaagacaggccaatcgcgagctcgagaaggaactgcagaatgtcgtggggagaaaccagctcctggaaggcaagttgcaagcactgcaggcagactatcaggccctgcaacagcgagagtctgctattcaagggtccttagctagcctggaggccgagcaggcctcaattagacaccttggcgaccagatggaggcttctctcctagccgtgaggaaagccaaggaggctatgaaagcgcagatggccgagaaggaagctatcttacagtcaaaagaaggggaatgtcaacagctccgggaagaggtggaacaatgtcagcaactggcagaagcccggcaccgagagctccgggctttagaatctcagtgtcagcagcagacacagctgatagaggtcttgaccgcagagaaggggcagcaaggagtggggccgcccacagacaatgaagcccgtgagctggccgctcagctggctctctctcaggcgcaactggaagtgcatcagggagaagtgcaaagactacaggcgcaggtggtcgacttgcaggccaagatgcgcgcagctcttgacgaccaggataaggtccagagccaactctccatggcagaggcagtacttcgcgaacacaagacactggtacagcagctaaaggaacagaatgaggccctgaatcgggcccacgtgcaggagttgctgcagtgttctgagagagagggggctctgcaggaggaacgagccgacgaggctcagcagcgagaggaggagctgagggcattacaggaggagctctcccaggctaagtgttcctcagaagaagcccagcttgaacatgccgagcttcaggagcagctgcaccgagccaacaccgatactgctgagctgggtattcaagtgtgtgccctcaccgtggaaaaagagagagtcgaggaggctctggcttgtgcagttcaggagctgcaggacgcaaaggaagctgcttcaagagagagggaggggctggaaaggcaagttgcgggactgcagcaagaaaaggaatcccttcaggaaaagctcaaagccgctaaagcggccgctggatccttgcctgggctccaggcccagctcgcccaagcagagcaaagggcacagagtctgcaggaagctgcgcatcaagagctgaacaccctcaagtttcagctgtccgcagagattatggattaccaaagtcgcctgaaaaatgctggggaagagtgtaagtcattaaggggacagctggaagaacagggaaggcaacttcaggccgccgaagaggcagtggagaagctaaaagctacgcaggcggatatgggtgaaaaactcagttgtacctcgaatcacctcgccgaatgccaggcggccatgcttaggaaggacaaggagggcgcggctctgcgcgaggatctagaaaggactcagaaagagttagagaaagccacaactaaaatacaagagtactacaacaagctctgtcaagaggtgaccaatagagagaggaatgatcagaaaatgctggcggacttagatgacctgaaccgcaccaaaaagtacctggaggaacggcttattgagctgctccgagacaaagacgccctctggcagaagagcgatgctcttgagttccagcagaaacttagtgcagaggagcgctggttgggagacaccgaagccaaccattgcctggactgcaagcgggaattttcctggatggtgcgacgacatcattgccggatttgcggcaggatcttctgttactattgctgtaacaattacgtgctgtccaagcacggtggcaaaaaggaaagatgttgtcgggcttgtttccagaaactgtcagaaggacccgggtccccagatagcagtggctccggaacttcccagggagagccttctccagccctgtctcccgccagccccggaccacaggcaacaggcggccaaggtgctaatactgactacaggcctcccgatgacgccgtcttcgatatcattactgacgaggagttgtgtcagatccaggagtccggtagttccttacctgaaacccctaccgaaacggattctctggacccgaacgcagctgagcaagctagcgttggcgccagcaaaggactcggtaatctcctgtgcgaatcgtccgcctgccgcgacacaaccagtacatcgctcacaccagaagacactgaggacatgccggtcgggcaagactctgagatttgtttgcttaagagtggggagctgatgattaaagtgcctctcactgtcgacgagatcgcttccttcggagaaggcagtcgcgaactcttcgtccgtagttctacatattctcttataccaatcaccgtggctgaggcagggctcactatttcttgggtgttttcctctgatcctaagtccatatccttttctgtggtgtttcaggaggctgaggacaccccactggatcagtgtaaagtcctgatccccacaacgcggtgtaactctcataaggagaacatccagggccaattgaaagttcggaccccaggcatatacatgctgatcttcgataacaccttcagtagatttgttagcaagaaagtcttttatcacctaacagtggaccgccctgtgatttatgacggaagtgattttctttag

SEQ ID NO: 117631 - DNA, 2886 bp, synthetic construct
  misc_feature 1..2886: note = Description of Artificial Sequence: Synthetic coding sequence
  source 1..2886: mol_type = other DNA
atgcacgggcatcgggctccaggaggagctgggccctccgagccagagcaccctgctaccaaccctccgggcgctgcaccccctgcgtgcgccgacagtgacccaggagcttctgagcctggcctactcgcccgccggggatccgggagcgcactgggtggccctctggacccacagttcgtgggccccagcgacacttctctcggtgccgcccctggtcatcgcgttctcccctgtggcccttcaccacagcatcacagggcattgcgtttttcctatcatctagagggttcccagcctcggcccggcctccatcaaggcaataggatacttgtgaaatcgctgagtctggatcctggtcagagtctggagcctcaccctgaaggccctcaacggctccgaagcgaccccgggccacctacagaaaccccgagccagaggccaagtcctctaaaacgggcacccggtccgaagccacaggtcccccctaagccatcataccttcaaatgcctagaatgcctcctcctctggagccaatcccccctccgccaagtaggcctctccccgctgaccctagggttgccaaagggctcgctcccagggcagaagcctctccctcatctgctgcggtctcgagcctaatcgaaaagtttgagcgcgaaccggtcattgtggcaagcgatcggcctgtgccaggtcctagccccggacctcccgaacctgtcatgctgcctcaacctacctcgcagccccctgtgccccagctgccggagggcgaagcctcaagatgtctgtttctcctggcccccggcccgcgtgacggcgagaaagttcccaacagggattcggggattgactcaattagttccccatctaactctgaggagacttgttttgtgtctgacgacggccctcctagccattccctatgtcccggtcctccagccctggctagtgtcccggtcgcactcgctgaccctcaccgacctggcagccaggaggtagattctgacttggaggaagaagacgacgaagaagaggaggaggaaaaagacagagaaattccagtgcctcttatggagaggcaggagtcggttgagctgacagtccagcagaaggtgtttcatatcgcaaacgaactgttacagactgagaaggcatatgtttccaggctgcaccttttggaccaggttttctgcgcccgtctcctggaagaggccagaaaccgttcctccttccctgctgatgttgtgcacggaatcttctcaaatatctgcagcatttactgcttccatcagcagttccttctgccagagctcgaaaagcgaatggaggagtgggacaggtaccctcgaatcggcgacattttgcagaagctggccccctttcttaagatgtatggggaatatgtaaagaactttgatagggctgttgaactcgtaaacacttggacagagcggagtacacagtttaaggtgatcattcatgaagtccagaaagaggaggcctgcgggaacctgacacttcagcaccatatgctggaaccggttcaaaggatcccccgatatgaactgctcctgaaagactatctgctgaagctgcctcatggttcgcccgattcaaaggacgcccagaaaagccttgagctgatcgcaacagcggccgagcatagcaatgctgctattcgcaaaatggagcggatgcacaagctgcttaaggtctatgagctgctgggtggcgaagaggacattgtttcaccaaccaaagaactaattaaggaaggtcatattctcaagctgtccgctaagaacggcacaacacaagatcgctacctgatcctgttcaatgaccgcctgctgtattgcgttccacgcctccgattgcttggacagaagttttcagtgcgtgcaagaattgatgttgacggcatggagctaaaggagagttccaatctgaatctgccccgaacattcctggtcagtggaaaacaaaggtcgctggagctgcaggcaagaactgaggaggaaaagaaggactgggttcaggcaattaatagtacgctcctgaagcatgagcaaaccttggagaccttcaaactgctgaactctacaaaccgcgaggacgaggacacgcctccaaatagccccaacgtcgatttgggaaaaagagccccaacaccaattcgggaaaaagaggttacaatgtgtatgaggtgccaggagccattcaacagcattacaaagcggcgccatcactgtaaggcctgtggacacgtcgtgtgtggcaagtgctcggaattcagagctcggttagtctatgacaacaatagaagtaatagggtatgcacagattgctacgtggcactgcacggcgtacccgggtccagccccgcctgctcccagcacacaccacaaagacggaggtcaatacttgagaaacaggcgagcgtcgccgctgagaactcggttatttgctcttttctacactacatggagaagggcggcaaggggtggcacaaagcctggtttgttgttcctgagaatgaacccctcgtcctgtacatttatggtgccccacaggacgtcaaggctcagaggtcattgccactcattggctttgaagtggggcccccagaggcaggtgagcggcccgataggagacacgtattcaaaataacgcaaagccacttgtcttggtacttttccccggaaaccgaggagctccagcgccggtggatggccgtgctgggccgggcaggtaggggcgacacgttctgtccaggccctaccctctctgaggatcgtgagatggaagaggcccccgtcgcagctctgggcgccactgccgaacctccagaatccccgcagaccagggataaaacttag

SEQ ID NO: 117632 - DNA, 1968 bp, synthetic construct
  misc_feature 1..1968: note = Description of Artificial Sequence: Synthetic coding sequence
  source 1..1968: mol_type = other DNA
atgaagggcgccagcgaggaaaagctggcctctgtgagtaaccttgtgacagttttcgagaattcacggacaccagaggccgccccccggggacagagactcgaagacgtgcatcaccggcccgagtgcaggccacccgaatcacctggcccaagagagaagactaatgttggtgaagctgtgggctccgagcccaggactgtctcacggcgttacctcaattccctgaagaacaagctctcttcggaagcatggcgcaagtcgtgtcaacctgtaacactctcagggtcaggcacccaggaacccgagaagaagatcgttcaggagttgctggagaccgaacaggcctacgtagcccggcttcacttactggatcaggtctttttccaagaattgctgaagaccgcccgctctagcaaggcctttccagaagacgtagtacgcgtgattttttctaacatttcttcaatctatcagtttcattcacagtttttcctacccgagcttcagagacgtctggacgattggacggccaacccaaggatcggggacgttattcaaaaactggctccctttttgaaaatgtattccgagtacgtgaagaattttgagagggctgccgagctgcttgccacgtggaccgacaagtcaccccttttccaggaagtcttgacacgaatccagagttcagaggccagtgggagtctgactctccaacaccacatgctggaaccagtgcaaaggattccgcgttatgaacttcttctgaaggagtacattcagaagctgccagcacaagcccctgatcaagccgatgcacagaaagccctcgatatgattttttccgccgcccagcacagtaatgccgcaattaccgaaatggagcgcctacaggacttgtgggaggtttaccaacggctgggcctggaggatgatatcgtggatccatcaaacaccctgttgagagaaggccctgtgctgaagatcagttttagacgaaacgaccccatggaacgatacctgtttctgtttaacaatatgctgctttactgtgtcccgcgcgtgatccaggttggcgctcagtttcaagtgcgaacacgcatcgatgtcgccggcatgaaggtgcgggaattgatggacgctgagttcccacattcttttcttgtgtctggtaaacagcgcacacttgagctccaggcacggtcccaggaggagatgattagttggatgcaagcgttccaagcagccattgatcagatcgaaaagcgcaacgaaacgttcaaggctgcagcccagggtccggagggcgacattcaggaacaggagctgcagagcgaggagctggggcttcgggcgcctcagtgggtgcgcgataagatggtcacaatgtgcatgagatgccaggagccgttcaatgcccttactcggcggcgccaccactgccgcgcatgtggttacgtggtctgcgcgagatgcagcgactatcgggccgaactcaaatatgatgacaacagacccaaccgtgtgtgcttgcattgctatgcgtttctaacaggcaatgtgctgcctgaagccaaggaggacaaacgtcgcggcattctggagaaagggtcctctgccacaccagatcagagcctaatgtgttccttcctccagcttattggagacaagtgggggaaaagtggaccccggggctggtgcgttatccccagggatgatcctttggtcctgtacgtgtacgccgccccgcaggacatgagggctcacacgtccatccccttgctgggctatcaggtgactgtgggccctcaaggcgacccccgagtattccagcttcagcaatcaggacagctgtacaccttcaaggccgagactgaggaactaaaaggaagatgggtgaaggccatggaacgggcggcatcaggatggtcaccttcatggcctaacgacggcgacctgagtgactag

SEQ ID NO: 117633 - DNA, 852 bp, synthetic construct
  misc_feature 1..852: note = Description of Artificial Sequence: Synthetic coding sequence
  source 1..852: mol_type = other DNA
atgaaagtaagagagctcatggatgcggagttcccacatagcttcttggtgtccggcaaacagcgaactcttgagctgcaagctcggtcccaggaggaaatgataagttggatgcaggctttccaagcggccatcgatcagatcgaaaagcggaatgagacgttcaaagcagccgcccaaggcccggaaggagatatacaagagcaggagttacagagcgaggaactagggttacgcgccccccagtgggttcgggacaaaatggtgactatgtgcatgcggtgtcaggagccattcaatgcccttactcggagacgccatcactgtagggcgtgcggttacgttgtgtgcgcccggtgttcggattaccgcgcagagctgaagtatgacgacaatcgacccaacagagtgtgcttacactgttatgctttcttaaccggcaatgtgctccctgaggcaaaggaggacaagcgccgcggtatccttgagaagggctcgtccgcaacacctgaccagagccttatgtgttctttcctccaattgatcggtgacaaatggggtaaatctgggccacgcggctggtgcgtgattccccgagatgatccactggtgttatatgtgtatgcggctccccaggatatgcgagcccatacatccatcccccttttggggtatcaggtaactgtgggcccgcagggagacccccgtgtctttcagctacagcagagtggccagctatatacatttaaagcagagacagaggaactcaaggggcggtgggtcaaggccatggagcgtgccgcctcaggttggtcgccttcctggccaaacgatggagaccttagcgattag

SEQ ID NO: 117634 - DNA, 2178 bp, synthetic construct
  misc_feature 1..2178: note = Description of Artificial Sequence: Synthetic coding sequence
  source 1..2178: mol_type = other DNA
atggagtcaggccgcggctcgtcaacccccccaggacctatcgccgcactggggatgcctgatacaggacctggttctagcagcctggggaagttgcaggcactaccggtggggccacgagcacactgcggagaccctgtgtccctcgcagcggccggcgacgggtctcctgatattggacctactggcgagctgtctggcagcttgaagattccaaatcgggattctgggatcgattcaccctcttcttcagtggccggcgagaacttcccttgtgaggaaggtctggaggctggcccctcccccaccgttctcggcgctcatgccgagatggcactggattcacaggtgcccaaggtgaccccacaggaggaagccgattcagatgtgggcgaggagccggactccgaaaatacgccacaaaaagccgataaagatgcaggcctggcgcagcatagtggcccccagaagctccttcatattgcccaggagcttctgcatacggaagaaacttatgtgaagcgcttgcacctgcttgatcaggtcttctgtaccagactcaccgacgcgggcataccacccgaagtgattatgggaatcttttctaacattagctctatccaccggtttcatgggcagtttctcctccccgagctcaagactcgcattaccgaagagtgggacacaaacccaaggttaggagatattctccagaagttagctcccttcctgaagatgtacggagaatatgtcaaaaattttgacagggctgtgggactggtgagcacctggacacagagatctccactgttcaaggacgttgtgcacagtatacagaaacaggaggtgtgtggcaacttgactctgcagcatcacatgttggaacccgtgcagcgggtaccacgttatgagttgctgctgaaggattacttgaagaggctccctcaggacgcgccagatcggaaggatgcagagcgatccttggaactgattagtaccgctgccaatcactcaaatgccgctatcagaaaggtagagaaaatgcataaactgctcgaagtttacgagcagctcggaggagaagaggacatcgtgaaccccgctaacgagctgatcaaggaaggacagatacaaaaactgtcagccaagaacggcactcctcaagatagacacctgttcctgtttaactcaatgatcctatactgcgttcccaagctcagattaatgggccaaaaatttagtgtcagagagaagatggacattagcgggctgcaagttcaggacatcgtaaaacctaatactgcccacacctttatcataacaggtcgaaagagatcactagaacttcaaaccaggaccgaggaagagaaaaaggagtggatccagatcattcaggctactatcgaaaaacataaacagaatagcgagaccttcaaagctttcggaggcgctttttcccaggacgaagatccgtcactttccccagacatgccaataacttcaacaagcccggtggagccagtcgtcaccacagaagggagctccggtgccgccggacttgaaccaaggaagctgtcaagcaagacccgcagggataaagagaaacagtcttgcaagagttgcggggagaccttcaattctattacgaaacgccgacaccattgtaaattgtgcggagctgtgatttgtggaaagtgctctgaattcaaagctgagaatagtaggcagagtagggtctgcagagactgttttttaacccagcctgtggccccagaatccaccgagaagaccccgacagcggatcctcagccatcccttttgtgtggcccgctccgtttgagtgagagcggagagacatggtctgaggtatgggccgcaattcctatgtcagacccccaggtgttgcacctgcagggaggtagccaggacggccggctgccacggaccatcccattgccttcctgcaagcttagcgtgcctgatcctgaggaacgactggacagtgggcacgtatggaagttacagtgggctaagcagagctggtacctatcggcaagtagtgctgaacttcagcagcaatggctggaaaccctgtcgaccgccgctcacggcgataccgcacaggattcacccggagcattacagctgcaagtcccgatgggcgctgctgccccttag

SEQ ID NO: 117635 - DNA, 2178 bp, synthetic construct
  misc_feature 1..2178: note = Description of Artificial Sequence: Synthetic coding sequence
  source 1..2178: mol_type = other DNA
atggaatcaggccgggggtcttcaacgcctcccggcccaattgccgcacttgggatgcctgacacaggaccaggatcctcatccttaggaaagcttcaggccttgccagtaggtccccgggcccattgtggcgaccccgtgtccctcgccgcagccggagacggcagtccagacattggaccaacgggggagctttctggatcactcaagatacccaatagggattcaggaatcgattccccaagttcttcggtggcaggcgaaaactttccttgcgaagaaggcctggaggcgggaccaagtccaacagttctcggtgcacatgccgagatggctctcgattcccaggtccctaaagtgactccccaggaggaggccgatagtgatgtgggtgaagaaccagactcagagaatactccccagaaggctgataaagatgccggtcttgcccaacactctggaccccagaagctgcttcacatagcccaggagttgttgcacacagaggagacctacgttaagcggctccacttactcgaccaggtcttttgtacaaggctgacggacgctgggataccgccagaagtgatcatgggaatcttctccaacatctcctctattcacaggttccatggccaatttttgttgcctgagttaaaaacgagaattactgaggaatgggacaccaacccgagactcggagatattctgcagaagctggccccgtttctgaaaatgtacggtgagtacgttaagaactttgaccgcgccgtgggtctggtgtccacctggacccagaggtcacctcttttcaaagatgtcgttcactcaattcagaaacaagaggtgtgcggcaacctgacccttcagcaccatatgctcgagccggtacagagagtgccgcggtatgaactgctgctaaaggattacctcaagagattgccacaggacgcaccggaccgtaaagatgccgaaaggagcctggaactgatttctacagctgctaaccactcaaacgctgcaattagaaaggtggagaagatgcataaactgctcgaagtctacgagcaactagggggggaagaagacattgtgaaccctgcgaatgagcttattaaggagggtcaaattcaaaagctgtcggcgaagaacggaacccctcaagaccggcaccttttcctgttcaatagcatgattctatactgcgtacccaagctgcggctgatgggccagaagttcagtgtccgagaaaaaatggatataagtggtctgcaagtgcaggacattgtgaagcctaacacggcccacacatttatcattaccggcaggaaacgctctctcgagctccagactcgtacagaggaggaaaagaaggaatggatccagataattcaggctaccattgagaagcacaaacagaactctgagactttcaaggcctttggcggcgccttctcacaagatgaggatcccagcctaagtccagatatgcccataacctccactagtcccgtggagcctgttgtcactactgaaggctcttcaggtgctgccggcctcgaaccccgcaagctatcaagcaagacccgcagagataaggagaagcagtcttgtaagtcttgtggtgaaacatttaactccataactaaacgcagacatcactgcaagctttgcggcgctgtgatttgcgggaaatgctcagagttcaaagccgagaactctagacagtctcgcgtgtgtagagactgctttcttacacaacctgtggctcctgagtcaaccgaaaaaacacccactgcagatcctcagccaagtttgctgtgcggtcccctccgacttagtgagtcgggtgaaacttggtccgaggtgtgggccgcaatccccatgagtgatccccaggttctacacttgcaggggggaagtcaggacggaagactgccccggaccattccattgccttcttgtaagctgagcgtgcctgaccccgaagaacgtctggactccggacatgtatggaaactgcagtgggccaaacagagttggtacctgtccgcttcaagtgcggaactgcagcagcaatggctagagacactttcaaccgcggctcatggagatactgctcaggattctcctggagccctacaacttcaagtgccgatgggtgcagccgccccgtag

SEQ ID NO: 117636 - DNA, 2175 bp, synthetic construct
  misc_feature 1..2175: note = Description of Artificial Sequence: Synthetic coding sequence
  source 1..2175: mol_type = other DNA
atggaatcaggccgtggaagtagcactcctcccggacccattgccgcattagggatgcctgataccggacctgggtccagctcgctgggaaagctgcaggctttgcctgtaggacctcgagcgcactgcggagacccggtgtctctggctgccgccggggatggtagcccagatatcggtcccactggtgagctttctgggtctctcaagattcccaatcgggactccggtattgactcccctagctcatcagtagccggtgagaactttccctgtgaggagggcctagaggccggtccttcccctaccgtgctgggggcacatgctgagatggcactagacagccaagtccccaaagtcactccacaggaagaggctgactccgacgtcggcgaggaacctgactccgaaaacacgcctcagaaagccgataaagacgccggcctggctcagcacagcggcccacagaaactgctacatatagcacaggaactgctgcacactgaggagacttatgttaagcgcctccatcttctggatcaggttttctgtaccaggctgactgatgccggcattcctccggaagtgattatgggaatttttagcaacatctctagcatccatcggttccatgggcagtttttgctgccggagctgaagacacgcatcaccgaagagtgggatacaaatcccaggctgggggacatcctccagaagcttgccccatttttgaaaatgtacggtgagtacgtaaagaacttcgatcgggcggtggggctggtgagtacttggacacaaagatccccacttttcaaggatgtcgttcattctattcagaagcaggaggtttgtggaaatttaaccctccagcaccacatgttggagcctgtacagagagttccacggtatgagctgctgctcaaggactatctaaagaggctccctcaggacgcaccagaccgcaaagacgccgagaggtctctcgagttaataagcactgccgcaaatcactcaaatgccgccatccggaaagtcgagaaaatgcataagctgttagaggtctacgaacaactaggcggtgaggaagacatcgtgaatcctgcgaatgagcttataaaggaaggccagattcagaagctgtctgcaaagaatggaaccccacaggatagacatctgtttctttttaactcaatgattctttactgcgtgccaaagctgcggttgatgggacaaaagttcagcgtgcgggaaaaaatggatatctcgggtctccaggtccaggatattgttaaaccgaacaccgcgcatacatttatcattacagggcggaagcggtccctggagttgcaaacaagaaccgaagaagagaaaaaggaatggatacagatcatccaggcgacaatagagaaacacaagcagaacagcgagacatttaaagcatttggtggcgccttctcacaggacgaagatccaagtctgagtcccgacatgccgatcacatctacctctcccgtggagccggtggtgactacagaggggtctagtggagcggctggactggagcctaggaaattgtctagcaaaacaaggcgcgataaggagaagcagtcctgtaaaagttgtggagagacatttaattcaataactaagaggcggcaccactgcaaactgtgcggggctgttatttgtggaaaatgttcagaatttaaggcagaaaactcaaggcaaagccgtgtttgccgagactgttttctgacccaaccggttgcccccgaatctactgagacacctacagctgatccgcagcctagtctgctgtgtggtccgcttcgcctgtccgaaagcggggaaacctggagcgaagtctgggccgccattcccatgtctgatccccaagtgttacatctgcaaggaggctctcaagacggtcggctacctaggacgataccattaccttcttgcaaattgtctgtcccagacccggaggagcggctggacagcggccacgtgtggaaacttcagtgggccaaacagtcttggtacttgagcgcatcgagcgccgaacttcaacagcagtggctggaaacactgtccacagcagctcacggagacacagcacaggatagccccggcgcacttcagttgcaggtccctatgggagcagcggccccttag

SEQ ID NO: 117637 - DNA, 987 bp, synthetic construct
  misc_feature 1..987: note = Description of Artificial Sequence: Synthetic coding sequence
  source 1..987: mol_type = other DNA
atgattctatattgtgtgcccaagctgcgcctgatgggtcagaaattttccgtgcgggagaaaatggacattagcggactgcaggtccaggacatcgtcaagcccaataccgcccataccttcattattactgggagaaagcggtctttagagttgcagacccgcaccgaggaggaaaaaaaggaatggattcaaattattcaggctacaattgagaagcataaacaaaattctgaaacattcaaagcctttgggggagcattctcccaggatgaggatccttccttgtccccagacatgccaatcacctcaacatctcctgtggaacccgttgtgacaactgagggatcatccggtgccgccgggctggaacctaggaaattgtccagcaaaaccaggcgagataaggaaaaacagagctgcaagtcttgcggggagacttttaacagtattaccaaacggagacaccactgcaagctatgcggggccgtgatctgtggaaaatgttcagagttcaaggcagagaactcaaggcagagccgcgtctgtcgagattgctttctgacccagcctgtcgcacccgagagcactgagaagactcctaccgccgaccctcaaccctctctgctttgcggaccattgagattatccgagtctggggaaacctggtcagaagtgtgggccgctatacccatgagcgacccacaggtgcttcaccttcagggaggttctcaggatggccggcttccacgaacaattcccttgccaagttgtaagctgagcgtccccgaccccgaggagagactcgattctgggcatgtctggaaacttcaatgggctaagcagagctggtatctgtctgcttcaagcgccgaactgcagcagcagtggctggaaacactttcgaccgccgctcacggagatacagcccaggactctcccggagctctacaactgcaggtgcctatgggcgccgccgctccctag

SEQ ID NO: 117638 - DNA, 1416 bp, synthetic construct
  misc_feature 1..1416: note = Description of Artificial Sequence: Synthetic coding sequence
  source 1..1416: mol_type = other DNA
atggtcaataagatcttttctaatattagtagcattaacgcgttccacagcaagttcctgctgcctgaactggagaaacggatgcaagagtgggaaactacaccgcgcattggcgatatcttacaaaagctagctccattcctaaagatgtacggtgaatacgtcaaggggttcgataatgcaatggagctggtcaagaatatgacagagcgaatcccacaattcaagagcgtagtggaggagattcagaaacagaaaatttgtggctctctcacgctccagcaccatatgctggaaccagtgcaaaggatcccgcgttatgagatgttactgaaggactaccttcgaaaattacctccagactccctggattggaacgatgccaagaaaagcttagagataatatcaacagcagcgtctcactcaaactctgcaatcaggaaaatggagaacttaaagaaattgcttgaaatctatgagatgctgggtgaggaagaggacattgttaatccatcaaatgaactgatcaaggagggacagattctgaagctggccgctaggaatactagtgcccaggagagatacttatttctgttcaacaacatgctcctctattgcgtgcctaaattttcgttggttgggtctaagttcactgtgaggacaagagtgggaatagacgggatgaaaatcgttgagacgcaaaatgaagagtaccctcatactttccaggtgagtggcaaggagagaacacttgagcttcaggcctcatccgctcaggataaggaagagtggatcaaggcgctgcaggaaacgattgacgcattccaccagaggcacgagacatttagaaacgccatcgccaaggacaatgacatccatagcgaggtcagcactgcggagctcggcaagcgtgcaccacggtggattcgggataatgaggtaacaatgtgtatgaagtgtaaagaaccgtttaatgccctcacccgaaggaggcaccactgcagagcttgtggctacgtggtgtgttggaagtgttccgattataaagcacaattggagtatgacggtggaaagctctccaaagtgtgcaaagattgctatcagatcatttccgggttcactgattccgaggaaaagaaaaggaaggggatcctggagatcgaaagcgccgaagtttcaggaaactctgtggtctgtagtttcttgcaatacatggaaaagtctaagccctggcagaaggcctggtgcgtgatcccgaagcaggaccccctagtgctgtatatgtacggcgctcctcaggttagtaaacctcacctgagtgagggcactgatgccctcggtggcaagggtaagagggtcgactcagggctgaagatttgcaggactcgagtgcaggccgtgtcactgttccactag

SEQ ID NO: 117639 - DNA, 843 bp, synthetic construct
  misc_feature 1..843: note = Description of Artificial Sequence: Synthetic coding sequence
  source 1..843: mol_type = other DNA
atggtcaataagatttttagtaatatttcgtcaattaatgcattccattccaagttccttttaccggagctcgaaaaaaggatgcaggaatgggagactacccccaggattggtgatattttgcagaagctagcaccttttctcaaaatgtatggcgaatatgtgaagggcttcgataatgctatggaactggtgaaaaacatgactgaacgcatccctcagttcaagagcgtagttgaggaaatacagaaacagaagatctgtggcagcctcaccctgcagcatcatatgctcgaaccagtccagagaatccctaggtacgaaatgctgttgaaggactatctgcgaaagctgccaccggattctctggactggaatgatgctaaaaagagtttggagatcatcagtaccgctgctagccacagcaatagtgctatccgaaaaatggagaacctgaagaagctgttagagatctatgagatgcttggggaggaagaggacatcgtgaacccaagcaatgaactgataaaagaaggccagattttgaaactagctgcacggaacacttccgcccaggagcgttatctctttctgttcaataatatgttgttgtattgcgttcccaagtttagtctggtcggatctaaatttaccgtccggaccagagtcggaattgacggaatgaagattgtggagactcagaatgaggagtatccacacaccttccaggtttcgggaaaggaacgcacgctggagctgcaggccagttcagcacaagacaaggaggaatggatcaagcgcagggggtttgccatgctgccacgtttaatatcaaacagttag

SEQ ID NO: 117640 - DNA, 567 bp, synthetic construct
  misc_feature 1..567: note = Description of Artificial Sequence: Synthetic coding sequence
  source 1..567: mol_type = other DNA
atgttttcttgctttctctgcatcctgagcttttctagtctttcaaactactcagacttgaaaaaggaaagtgcagtgaacctaaacgcaccaagaacacctggaaggcacggtctgactacaacaccccaacaaaagctcttgagccaacacctcccccagagacaggggaacgataccgataaaacacagggggctcagacctgtgttgccaacggtgttatggccgcacagaatcagatggaatgtgaggaagaaaaagctgcaaccctgtcctctgacacctccatccaggcttctgagccactcctggacacacatatcgtgaacggcgagcgcgacgagactgccactgcccccgcttctcccactaccgatagttgcgacggcaacgcttccgacagtagttacagaacccctggcatcgggcctgttttgcccctggaagagaggggggcagaaaccgagacaaaggtccaagagagggagaacggagagtcacctctggagctggaacagctggaccagcaccacgaaatgaaggtcgagcacgaaacctcatcctag

SEQ ID NO: 117641 - DNA, 2301 bp, synthetic construct
  misc_feature 1..2301: note = Description of Artificial Sequence: Synthetic coding sequence
  source 1..2301: mol_type = other DNA
atggaggagatcaaaccagcctccgcatcctgcgtatctaaggagaaaccaagcaaggtctccgacctgattagtcggtttgaaggcgggagctcactcagcaattattccgatctgaagaaagagagtgccgttaacctgaacgcacctcgaacccctggcaggcacggtctgactactacaccacagcagaagctgctgtcacagcacctgcctcagagacaggggaacgacaccgacaaaacgcagggagcccagacatgcgttgccaatggtgtcatggcagcccagaaccagatggagtgtgaagaggagaaagccgccactttgtcttccgatacttccatccaggccagtgaaccactgcttgacacgcacatcgtcaatggcgagcgcgatgagaccgccaccgccccggcctcaccaactacggactcgtgcgatgggaatgcatccgacagttcctacaggacccctggaataggacctgtgctgccgctggaagagcggggcgccgaaacagagacaaaggtacaggaaagggagaacggcgagagccccctggagctggaacagcttgatcagcaccacgagatgaaagaaacaaacgagcaaaagctgcacaagatcgctaatgaattgctccttaccgagcgggcatacgtcaacagacttgatttactggaccaggttttttattgcaagctcctcgaagaagccaaccgtggcagtttcccagccgagatggtgaataaaatcttctcaaacattagctctataaacgcttttcatagtaagttcttactgcctgagctggagaagcggatgcaagaatgggagacaacccccagaataggagatatcttacagaagcttgcccctttcctgaagatgtacggggaatacgtgaagggctttgacaacgccatggagttggtcaagaatatgactgagcggatcccacagtttaaaagtgttgtagaggagattcaaaaacaaaagatatgcggctccctcacgttgcagcaccacatgctggaaccagtccaacgcatcccccgatacgaaatgcttctcaaggattatctacgtaaattgcccccagattctcttgattggaacgacgctaagaagtccctagagatcatctcaactgccgcatcccactctaacagcgccatacgtaagatggagaacctcaaaaagctacttgagatttatgagatgttaggcgaggaagaggacattgtaaatccctccaacgaattgatcaaagagggacagatccttaaactcgccgcaagaaatacatctgcccaggagcgttatttgttcctgtttaacaatatgttgttgtattgtgtccctaagttctctctggtgggttctaagtttaccgtaagaacacgagtgggaatcgacggaatgaaaattgtcgagacccagaatgaggagtatccccataccttccaagtatcgggcaaggaacgtactctggagcttcaggccagcagcgctcaagacaaagaagagtggattaaggccctgcaggagactattgatgccttccatcaacggcatgaaacatttcggaacgccattgctaaggacaacgatatccattctgaggtctctactgctgagctgggtaaaagggcaccacgctggatccgcgacaacgaagtgactatgtgcatgaagtgtaaagagccattcaatgctctaacccgccggagacaccattgcagggcctgtggctatgttgtgtgctggaaatgtagcgactacaaggcacaacttgagtacgatggaggaaaactgtcaaaggtctgtaaagattgctaccagatcatcagtggcttcacagacagcgaggagaagaagaggaagggcattctggagatagaatcggcagaggtgtcagggaattctgtagtgtgttcatttttgcaatacatggaaaaatcaaaaccttggcaaaaggcatggtgcgtgatacccaagcaggaccctctggtgctctacatgtatggagcacctcaggatgtccgggcccaggcaacaatacctctcctcggctacgtggtggacgagatgcctcgcagtgccgatttacctcacagctttaaacttacccagagcaaatcagttcatagtttcgctgccgatagcgaggagctgaagcaaaagtggctgaaagtgatccttctcgcggttaccggggaaactccgggcgggcctaatgagcatcccgcgacactcgacgatcatcccgaacccaaaaagaagtccgaatgctag

SEQ ID NO: 117642 - DNA, 624 bp, synthetic construct
  misc_feature 1..624: note = Description of Artificial Sequence: Synthetic coding sequence
  source 1..624: mol_type = other DNA
atggaggaaattaaacctgcatccgcctcctgcgtgagcaaagagaaaccttccaaagtctccgacttgatctcaaggtttgagggggggtcctcccttagcaactactccgatctgaagaaagagtcagccgtgaaccttaatgccccacgcacaccgggacgtcacggcctgacgactacacctcaacagaagctgctttctcagcatttgccacagcgtcaagggaacgacacagataagacccagggcgcccagacatgcgtcgctaatggtgtcatggccgcgcagaatcagatggagtgcgaagaagagaaggctgcgactctatcctccgacacttctatccaagcaagtgagccactcctggacacccacatagttaatggcgagcgggatgagactgctactgctccggcaagtccaactaccgatagctgcgatggcaacgccagcgacagttcctacaggacaccaggcatcggacctgtgttacccctggaggagcgcggggccgagacagaaaccaaggtgcaggagagggagaacggcgagtcacccctggaactggagcagctcgatcagcatcacgagatgaaagtcgaacatgaaactagttcttag

SEQ ID NO: 117643 - DNA, 2637 bp, synthetic construct
  misc_feature 1..2637: note = Description of Artificial Sequence: Synthetic coding sequence
  source 1..2637: mol_type = other DNA
atgaattttaaacgggtgaaacccaacatttttctcctgaatcagtcacggcttatcatctctatctgcgaaataatgtccaccgatcagggatctagtacttgtcccaaaattgccttagtgcccccatgcagcacttcgagcactactaccttagtgggagagaatgtatccgaagaggaagcccaaggcatcaatggcaatcgacctgctaagcatagtgccgccagtcccaaaccccaggtcccgcctaaaccactccatctccaaaacagtccgtcgtctaatatccatcaaacccctcgacacaaggcattgccttcagcgaagccaaggatggaagagatcaaacccgcctccgccagctgcgtttccaaggagaaaccttctaaagtgagcgatctgattagcagatttgaaggcggcagctctttaagcaactacagtgatctcaagaaagaatctgccgtgaatctcaatgcaccacgaactccgggacggcacggtcttaccacgactccccagcagaaactcctaagtcaacatctgcctcagcgacagggaaacgacactgataaaacacagggagcccagacctgtgttgcaaacggagtaatggcagctcagaaccagatggagtgtgaagaggagaaagcagctactcttagctcagacacctccatacaagcctcagagcccctcctcgacacccacattgtgaacggggaacgcgacgagaccgccacggctcctgcctctccaaccaccgattcctgtgatgggaacgccagtgactctagctacagaaccccaggcattgggccagttctacccttggaggaacgcggtgctgagacagaaaccaaggtgcaggaaagagaaaacggagaatctcccctcgagctcgagcagctggaccaacaccacgagatgaaggaaacaaacgagcaaaaactgcataagattgcgaacgaattgctgcttacggaacgagcgtacgttaacagactggatctgcttgaccaagtcttttactgcaagctgttggaagaggccaaccgggggtcgttcccagccgagatggttaataagattttctctaacattagctctataaacgcttttcactcaaagttcctcctgccagagctcgagaaaaggatgcaagaatgggaaaccacccctaggattggggacattctgcagaaactggccccatttctgaagatgtacggggagtatgtgaaaggattcgataatgcaatggagttggtcaagaatatgacagagcgaattccccagttcaaatccgttgttgaagagattcaaaaacagaaaatctgcggttcactgacattgcagcaccacatgctggagcctgtgcagcggattcctcggtacgagatgctcctcaaagactacctgcgcaagctgcctcccgactccctcgactggaacgacgctaagaagtccctggaaattatatccaccgctgctagccacagtaatagcgcaattcggaaaatggagaacttgaagaagctgctcgagatttacgaaatgctcggagaggaggaggatatcgtaaacccatctaatgaactgattaaagaagggcagatcttgaaactggcggctagaaatactagtgcccaggaacgctatctgttcttgtttaacaatatgctgttatattgtgtgccgaaattctctctggtgggttcaaagttcacagttaggacacgcgtgggcatcgatggtatgaagatcgtcgaaacgcaaaacgaagagtatccccatacctttcaggtgagtggcaaggagaggactctggagctccaggcaagcagcgcccaggacaaggaggagtggataaaggcacttcaagaaaccattgatgcgttccatcagaggcacgagacattcaggaatgccattgccaaggataacgatattcatagtgaggtgtcaactgccgagctcggaaaaagagctcctcgttggataagagacaacgaagtgacaatgtgcatgaaatgcaaggagcctttcaacgctcttaccaggcgaagacatcattgccgcgcttgcggatacgtggtttgttggaagtgcagcgactataaagctcagcttgagtacgatgggggaaaactgtctaaagtttgcaaggactgttaccagataatctcaggcttcacagattcggaggagaagaagagaaaggggattctcgagatcgagagcgcggaagtctccggtaacagtgtggtatgcagttttctgcagtatatggagaagtcaaagccttggcagaaggcatggtgtgtgatcccaaaacaagaccccctcgtgctgtatatgtacggcgccccccaggacgtgcgcgctcaggccaccatcccacttcttggttatgtggtcgacgaaatgcctaggagtgccgacctcccccacagcttcaagctgacccaaagtaagagcgtgcactctttcgccgccgacagcgaggagctcaagcagaagtggcttaaggtgatactcctggcagtaaccggtgagacccctgggggtcctaacgagcatcccgctacactggatgatcaccccgaaccgaaaaagaaaagtgagtgttag

SEQ ID NO: 117644 - DNA, 2556 bp, synthetic construct
  misc_feature 1..2556: note = Description of Artificial Sequence: Synthetic coding sequence
  source 1..2556: mol_type = other DNA
atgggagggtgtagcagcacgtgtcctaaaatagcccttgtccccccctgttccacttcaagtactactactctggttggggaaaacgtcagcgaagaggaggcgcaaggtatcaacgggaataggcctgctaagcacagcgcagcctcacccaagcctcaggtgccccccaaacctctccatctgcagaacagtcctagcagtaacatccatcaaacacctaggcacaaagctctgccgtccgctaagcccagaatggaagaaattaaaccggcgagcgcttcatgcgtgtcgaaggagaagccttctaaagtgtccgacctgattagcagatttgaagggggatcttctctgtcaaactacagtgacttgaaaaaagaatccgccgtgaatctaaacgccccacggacccccggccgccacggcctgaccacaaccccacagcagaagcttctgtctcagcacctaccacagagacagggaaacgatacggacaagacgcagggtgcacagacttgtgtggctaatggtgtcatggcagcgcagaaccagatggagtgtgaggaggagaaagcagcaaccctgtcaagcgatacatctatccaggcaagcgaacccctgctggatactcacatagtgaatggagaaagggatgaaaccgccactgcaccagcctcgccgaccacggacagctgcgatgggaatgcctctgacagcagctacaggacccccggtattgggcccgtgcttccattggaagaaaggggtgccgagacagagactaaggtgcaggaacgggagaatggcgaatcaccattggaactggaacaactggatcagcaccatgagatgaaggaaacaaatgaacagaagctgcataagatcgccaacgaattacttctcacggaacgggcgtacgttaaccgtcttgacttattggaccaggtcttttactgcaagttactcgaggaagcaaaccgggggtccttcccggccgaaatggttaacaagatattttcaaatatttccagcattaacgccttccactctaaatttctgctgccggagttggagaagagaatgcaggaatgggaaacaacacctcggattggcgacattttacagaagctggcaccctttcttaagatgtatggggagtatgtcaagggctttgataatgccatggagcttgtgaagaatatgacggagaggataccacaattcaagagcgtagtggaagaaattcagaagcagaagatctgcgggtcactgactctccagcatcacatgctggaacccgtgcagagaataccgcgatatgagatgctgctcaaagactacctgagaaaactgccccccgactcccttgattggaatgacgcaaaaaaatcactggaaatcattagcaccgcggcctcacactctaatagcgccattagaaagatggaaaatttgaaaaagctcttggagatctacgaaatgttgggtgaagaagaagacattgtgaatccctccaatgaattgattaaagagggacagatcctgaaactcgctgcgaggaatacaagtgctcaggaacgttatctgtttctgttcaacaatatgcttttgtactgcgtgccaaagttttccctggtggggtctaagttcactgtccgcacgcgtgtcggaatcgacggaatgaaaattgtggaaacccaaaatgaagaatacccgcacactttccaggtgtcagggaaagaacggactctcgaattacaggcctcatcagcccaggataaagaggagtggattaaggccctccaggaaactatcgatgcattccaccagagacatgagaccttccgaaatgcaattgccaaggacaatgatatccattccgaggtgagtactgcggaactcggcaaaagagcaccaaggtggatccgagacaacgaagttacaatgtgcatgaagtgtaaggaaccctttaacgccctgacccgtagaaggcaccactgcagggcatgtggatacgtcgtgtgttggaagtgctccgactacaaagcacaattagagtacgatgggggaaagctctccaaggtgtgcaaggattgctaccagataatatccgggttcaccgatagtgaagagaaaaagcgcaagggtatcctcgaaattgagagcgcagaggtgtctggaaactccgtggtgtgctcattcctgcagtatatggagaagtcaaagccttggcagaaagcatggtgtgtcatccctaagcaggacccgcttgtcctgtatatgtacggagctccccaggatgtgcgggcccaggcaactatccctctcttaggctacgtggtcgatgagatgcccaggagtgctgatcttccccactctttcaaactgacccagtcaaagagtgtgcactcattcgccgccgattccgaagaattgaagcaaaagtggttgaaagtgatcctgctggccgttacgggggagacgcctggaggccctaacgaacacccagcaaccctggatgaccatcctgaacccaaaaagaaatccgagtgttag

SEQ ID NO: 117645 - DNA, 2712 bp, synthetic construct
  misc_feature 1..2712: note = Description of Artificial Sequence: Synthetic coding sequence
  source 1..2712: mol_type = other DNA
atgtcggacgagggcggcagcaattttcggagagtggcaattcggcgtaaaagcaacccctcctacctcccacccggcgttccacgaccgtggagccgccccgcctcacacctaggccgagtgggtaccgccgctttcaagggacaggttccttcgggggccactggctccagtacatgtcctaagatagctttggtgccaccttgttccacgtctagcaccactaccctggtgggggagaatgtaagcgaggaggaggctcagggaatcaacgggaatagaccagccaagcactcagcagcctctcctaagcctcaagtcccacccaaaccgttgcacttgcagaattcacccagcagcaacatccaccagacacccaggcacaaggctctgccctctgccaaaccaagaatggaagaaattaagcccgcctccgctagttgcgtgtccaaggagaagccatccaaagtcagcgacctgatctctaggtttgaaggagggtcatctctgtcgaattattctgacctcaaaaaagaaagcgctgttaacctgaatgctcctcgcactccaggtcggcacgggttaacaaccacccctcagcagaagcttctctcacagcatttgccgcaacgtcaggggaacgacacagataaaacccagggcgctcagacctgtgtggctaacggagtgatggccgcgcaaaatcagatggaatgcgaagaggagaaggcagctacactttccagcgatacctccattcaggcatctgagcctctgttggacacccatatcgtgaatggtgagcgcgacgagacagccaccgcccccgccagcccgactacggactcatgtgatggcaacgcaagtgattcaagctatcgcaccccaggcattggacctgtgctcccccttgaggagcgtggtgcagaaaccgaaaccaaagttcaggaaagggagaacggggaaagtccactagaactggagcaactggaccaacatcacgaaatgaaggaaaccaacgaacagaagctccataaaattgccaacgaattgctcctgaccgagcgtgcctacgtaaaccgtttagatctgctcgaccaggtcttttactgtaaactcttggaagaagccaataggggatcctttcccgccgagatggttaacaaaattttttccaatatctcctccattaatgcatttcatagtaaattcttattgcccgagctggagaagcggatgcaggagtgggaaaccacgccaaggatcggggacattctgcagaagctcgccccgtttcttaaaatgtacggcgaatacgtaaaaggctttgataacgccatggagctggtcaaaaacatgaccgaacggatcccccagtttaagtcagtggtcgaggagatccagaagcagaagatatgtgggtctctgactcttcagcaccacatgttggagccagtgcagcgcatccccaggtacgagatgctgcttaaggactaccttcggaaactccctcctgatagccttgactggaatgatgctaaaaagagtttagagattatcagcaccgccgcgagtcatagtaatagcgccattcgcaagatggaaaacctcaagaaacttctagagatatacgaaatgcttggggaggaggaagacatcgtgaatccatctaacgaattgattaaggaaggacagatactgaaactggcagcccgtaatacatctgcccaagaaaggtatttgtttctgtttaataacatgttactttattgcgtgccgaagttctccttggttgggtctaagttcactgtacgtacacgggtagggattgacggaatgaagatcgttgagacgcagaacgaagagtacccacacacctttcaagttagtggcaaggagagaacactggaattgcaggccagttcagcccaggataaagaggaatggattaaagccctgcaggagacgatagacgcatttcaccaacgtcacgagacctttagaaacgcgattgcgaaggacaacgacatacattccgaagtatcaaccgcagaattggggaaaagagctccaaggtggatccgagacaatgaggtcactatgtgtatgaagtgcaaagagccattcaatgccttaacccgccgcaggcatcattgtcgcgcttgtgggtatgtggtgtgttggaaatgctctgactacaaagcccagctcgagtatgatggtgggaaactgtctaaggtgtgtaaggattgttaccagattatcagcggtttcacggatagtgaagagaaaaaacgaaaaggcatcctggagatcgagagtgctgaggttagcggaaacagtgtggtctgcagttttctgcagtacatggagaaaagcaagccatggcaaaaggcctggtgtgtaatccccaaacaggatcctctcgtgttgtatatgtacggcgcacctcaagacgtccgggcccaagcaaccattccactgctcggttacgtggtcgacgagatgcctcgatcagccgatctgccgcactcattcaagctcacacagtctaaaagtgttcactcctttgccgctgactccgaggaactcaagcagaagtggctcaaagtgattcttttggccgtgactggggagacaccaggcggcccaaatgaacacccggcaacgctcgacgatcatccagaacctaaaaagaagtccgagtgttag

SEQ ID NO: 117646 - DNA, 420 bp, synthetic construct
  misc_feature 1..420: note = Description of Artificial Sequence: Synthetic coding sequence
  source 1..420: mol_type = other DNA
atgagctggcgcggcaggtcaacatattattggcctaggcctcggaggtatgtccagcccccagaaatgataggccccatgcgccctgaacagttttcagacgaggtggagccggccactccggaagagggggagcccgcaacccagcgccaggatcctgctgccgcacaggagggggaagatgagggggcaagcgccggacagggccccaaacctgaggcggatagtcaagagcaagggcatccacagacaggatgcgaatgtgaggatggccctgacggtcaggagatggacccaccaaacccggaagaggtaaagaccccggaagaagagatgcgcagtcattacgtggctcagactggtattctttggctactcatgaacaactgttttttaaatctctcccctcgcaaaccttag

SEQ ID NO: 117647 - DNA, 351 bp, synthetic construct
  misc_feature 1..351: note = Description of Artificial Sequence: Synthetic coding sequence
  source 1..351: mol_type = other DNA
atgtcttggagagggaggtctacctacaggagtagaccacgcctctatgtggagccaccggaaatgataggccctatgctgcctgagcagtttagcgatgaggtcgaacccgccacaccagaagaaggcgaacccgccactcagagacaggatcccgcggcagcccaagagggtgaggatgaaggagccagcgctggtcagggacctaaacctgaagcggacagccaggaacaagttcacccgaagaccggctgcgaatgtggggacggtcctgacggccaggagatgggtttgcccaatcccgaagaagtgaagcgtcctgaagaaggtgagaagcagtctcagtgctag

SEQ ID NO: 117648 - DNA, 354 bp, synthetic construct
  misc_feature 1..354: note = Description of Artificial Sequence: Synthetic coding sequence
  source 1..354: mol_type = other DNA
atgagctggcggggaagaagcacatactattggccgaggcctcggcgttacgtacagccaccagaaatgattggaccgatgcgccccgaacagttttcggacgaagttgagcccgctactccagaggagggggagccagccacacagtgccaggacccagccgccgctcaggagggcgaagacgaaggggcaagcgccggccaagggccgaaacccgaagcgcattcacaggagcagggccacccccagaccggatgtgaatgtgaggatgggccagacggccaggaaatggatccacccaatccagaggaggttaagactcccgaagagggggagaagcagagccaatgctag

SEQ ID NO: 117649 - DNA, 354 bp, synthetic construct
  misc_feature 1..354: note = Description of Artificial Sequence: Synthetic coding sequence
  source 1..354: mol_type = other DNA
atgtcctggagaggtcggagtacttactactggcccaggccacgacgctacgtacagcctcccgagatgatagggcccatgagacccgaacaattttctgacgaggtcgaaccagccactccagaagagggggaaccagcgactcagtgtcaagatccggcagccgcccaagaaggcgaagatgagggcgcaagcgccggccagggtcctaaacctgaagcacactctcaagaacagggtcatccccagactggctgtgaatgtgaggacggacccgatggccaagaaatggatccccccaaccctgaggaggtaaagacgccagaggaaggggaaaagcagtctcaatgttag

SEQ ID NO: 117650 - DNA, 354 bp, synthetic construct
  misc_feature 1..354: note = Description of Artificial Sequence: Synthetic coding sequence
  source 1..354: mol_type = other DNA
atgtcttggcgtggtaggtcaacgtattattggcctcgcccgaggcggtacgttcaaccccccgagatgattggaccaatgagaccagaacagttttcggatgaagtagaaccagccaccccagaagagggcgagcccgcgactcaatgccaggaccctgcggctgcgcaagagggcgaagacgagggcgcatccgccggccagggtcctaaacctgaagcgcactcacaggagcaggggcaccctcagaccgggtgtgagtgcgaggacggacccgacggccaggaaatggatccgccgaatccagaggaggtgaaaacacctgaggaaggagagaagcagagccagtgttag

SEQ ID NO: 117651 - DNA, 354 bp, synthetic construct
  misc_feature 1..354: note = Description of Artificial Sequence: Synthetic coding sequence
  source 1..354: mol_type = other DNA
atgagctggaggggccgctccacttactactggccgcggccccggcggtatgtgcagcctcccgagatgataggccccatgcgtccagagcagtttagcgacgaagtggaacccgccactcccgaagaaggggagcccgccacacagaggcaagatccagctgccgcccaggagggtgaagacgaaggcgccagcgcgggacagggtcctaaaccggaagctcatagtcaggagcagggtcacccacaaaccggttgcgaatgtgaggacggacccgatggacaggagatggacccccccaaccccgaagaagtaaagacacctgaagagggagagaagcagagccagtgctag

SEQ ID NO: 117652 - DNA, 354 bp, synthetic construct
  misc_feature 1..354: note = Description of Artificial Sequence: Synthetic coding sequence
  source 1..354: mol_type = other DNA
atgtcatggagagggagaagcacatactattggcctcggcccaggaggtacgtgcaaccgcccgagatgatagggcccatgcgcccggagcaatttagtgatgaggtggagcctgccacaccggaagaaggcgaacccgccacacagcgacaggacccagccgcagcccaagagggcgaggacgagggcgcatccgccgggcaaggccccaagcctgaggcccactcccaagaacagggtcacccacagactggatgtgaatgcgaggacggacccgacggacaagagatggatccacctaacccagaggaggttaaaactcccgaagagggggaaaagcagagtcaatgttag

SEQ ID NO: 117653 - DNA, 354 bp, synthetic construct
  misc_feature 1..354: note = Description of Artificial Sequence: Synthetic coding sequence
  source 1..354: mol_type = other DNA
atgagctggcggggacggagtacctattactggcctcgccccagaagatatgtgcagccccctgagatgatcggaccaatgcgtcctgagcagttttccgatgaagtggagccggccactccggaggaaggggagcccgctacccagtgtcaagatcccgctgccgctcagaagggtgaggacgaaggtgcaagcgcaggtcagggtcccaagccagaagcacactcacaggaacagggccacccccagaccggatgcgaatgtgaggatggccccgacgggcaggaaatggatccaccaaaccccgaagaggtaaaaaccccggaggaaggcgagaagcagtcacagtgctag

SEQ ID NO: 117654 - DNA, 354 bp, synthetic construct
  misc_feature 1..354: note = Description of Artificial Sequence: Synthetic coding sequence
  source 1..354: mol_type = other DNA
atgagctggcgggggcggtctacttactactggccccgtccgagaccctacgtacagcccccagagatgatcggcccaatgagaccagagcagttctccgacgaggttgaaccagcgacccccgaagaaggagaacccgctacacagaggcaggatccagccgctgcccaagagggggaggacgaaggagccagcgctggacaggggcccaaaccagaagccgatagccaggaacagggccaccctcagacagggtgcgagtgtgaagatggccctgacggccaggagatggatccaccaaatccagaggaggttaaaactcctgaagaaggtaagaaacaaagtcagtgttag

SEQ ID NO: 117655 - DNA, 354 bp, synthetic construct
  misc_feature 1..354: note = Description of Artificial Sequence: Synthetic coding sequence
  source 1..354: mol_type = other DNA
atgagttggcgcggccgctctacctattataggcctcgcccacgtcgttatgtggaacctcctgagatgatcggccccatgcggccagagcagttctccgatgaggtcgagccagccaccccagaggaaggcgaaccggctactcagtgccaggatcctgctgctgcacaggaaggggaagatgaaggagcctcggctggtcaggggccaaaacctgaagccgattcgcaggaacaggggcatccacaaactggttgtgaatgcgaggacggtcctgacggacaggaaatggacccacctaatcccgaggaagtcaaaactcctgaagaagggaagaagcaatctcagtgctag

SEQ ID NO: 117656 - DNA, 351 bp, synthetic construct
  misc_feature 1..351: note = Description of Artificial Sequence: Synthetic coding sequence
  source 1..351: mol_type = other DNA
atgtcttggcgtggtaggtcaacctatcgtccaaggccacggaggtatgtggagccccctgagatgatcggacctatgagacccgagcaattttccgatgaggtagagcccgctactccagaggaaggtgagccagcaactcagcgtcaggaccccgcggctgcccaagaaggtcaggacgaaggagcttccgctgggcagggccccaaaccagaagcccactcacaggaacaggggcatccgcagactggctgcgagtgcgaggacggtcctgacggccaagaaatggatcctcccaaccccgaggaggtgaagactcccgaagaaggggagaagcagagtcagtgctag

SEQ ID NO: 117657 - DNA, 351 bp, synthetic construct
  misc_feature 1..351: note = Description of Artificial Sequence: Synthetic coding sequence
  source 1..351: mol_type = other DNA
atgagttggcgaggacgcagcacttaccggccaagaccccggcgttatgtagagcctcccgaaatgattggacctatgcgcccggagcagttctccgatgaagtggaaccagcaacacccgaggagggagagcctgcgacccagcgccaggatcctgcagctgcccaggagggcgaagatgaaggtgcatccgccgggcagggtcccaagcccgaagcgcattcacaggagcaagggcacccgcagaccggttgcgagtgtgaggacgggccggacggccaggaaatggacccccctaatccagaagaagtcaaaaccccagaagagggagagaaacagtcccagtgttag

SEQ ID NO: 117658 - DNA, 351 bp, synthetic construct
  misc_feature 1..351: note = Description of Artificial Sequence: Synthetic coding sequence
  source 1..351: mol_type = other DNA
atgagctggcggggcaggtccacttacaggccccgtcctagaagatacgttgagcccccagaaatgattgggccaatgaggcccgagcaattctcagatgaggtggaaccggctacacctgaagagggcgaaccagccacccagaggcaggaccccgccgccgcccaggaaggagaggatgagggcgcctccgccggacagggcccgaaacctgaggctcacagccaagaacaggggcacccccagactgggtgtgaatgcgaggatggccctgacggccaggagatggacccccccaaccccgaggaagtgaaaaccccggaagaaggcgaaaagcagtcccagtgttag

SEQ ID NO: 117659 - DNA, 351 bp, synthetic construct
  misc_feature 1..351: note = Description of Artificial Sequence: Synthetic coding sequence
  source 1..351: mol_type = other DNA
atgagttggcgcggtcggtcaacttatagaccacggcccagacgctacgtggagcctcccgagatgatagggccaatgcgccctgaacagttttcagatgaggtggagccagccacaccggaagagggagaaccggcaacccaacgacaggaccctgctgcagctcaggagggtgaggacgaaggtgcctcggctggtcaaggacccaaacccgaagcggacagtcaggaacagggtcatccacaaaccggatgcgaatgtgaggacggtcctgatggacaggagatggatcccccaaaccctgaggaggtgaaaacccctgaggagggtgagaagcagtcacaatgttag

SEQ ID NO: 117660 - DNA, 351 bp, synthetic construct
  misc_feature 1..351: note = Description of Artificial Sequence: Synthetic coding sequence
  source 1..351: mol_type = other DNA
atgagttggcggggaagatccacttatcgaccacggccacgaagatacgtggagccgccagaaatgattggccccatgcgccctgaacagttcagcgacgaagtggaaccagccacaccagaggagggggagcccgcaacacagcggcaggatccggcagccgcacaggagggggaagatgagggcgccagtgccgggcagggacccaagcccgaagctgattctcaggagcagggacatccacagactggatgcgaatgcgaagacgggcccgatggacaagaaatggaccccccgaaccctgaggaggtgaaaacgcccgaagaaggcaaaaaacagtcacaatgttag

SEQ ID NO: 117661 - DNA, 435 bp, synthetic construct
  misc_feature 1..435: note = Description of Artificial Sequence: Synthetic coding sequence
  source 1..435: mol_type = other DNA
atgttcctggaggaaaaaatcccttccattagcgatcttaagcttgccatcagaagagctactctgaagagatctttcacccccgtgttcttgggttctgccctcaagaacaagggtgtacagcccctccttgatgctgtcctcgagtaccttccaaatccctccgaggttcagaattacgccatactgaataaggaggacgattccaaagagaaaacaaagattttgatgaactccagccgtgataattctcacccatttgtgggccttgcctttaagttggagttcctgagcagatctttttttaggctgactcggcagaaggaccacaggaggccgatacaacgtacaaccctctatctcatcgtgatgagcccgtatgacctgctagggtgtaacagctttctcgatttcccgtgttttagtagggactag

SEQ ID NO: 117662 - DNA, 2256 bp, synthetic construct
  misc_feature 1..2256: note = Description of Artificial Sequence: Synthetic coding sequence
  source 1..2256: mol_type = other DNA
atgagactactgggcgccgcggccgtagctgcactgggtcgcgggagggctccggcgagcttaggttggcagaggaagcaagtgaactggaaagcctgtcgctggtccagcagcggggtgatccctaacgagaaaatccgaaacatcggcatttcagctcatattgatagcggcaagaccactttaactgagcgggtcttgtactatacgggcagaatcgcaaagatgcacgaagttaagggaaaggacggcgtcggcgccgtgatggactcaatggagttggagaggcagagaggaatcacaatccagtccgcagcgacatacacaatgtggaaagacgtgaatatcaatatcatcgatacccctgggcatgtagacttcactattgaagtcgagcgagctttacgggtattggacggcgccgtcctggtgttgtgtgccgtcggaggcgtgcagtgtcagacaatgacagtgaaccgccagatgaagaggtataatgtgcccttcctgacgttcataaataagctggacagaatgggttccaatcccgcacgggcactgcagcagatgcgctcaaaattaaatcataacgccgcttttatgcaaatcccaatgggactagaagggaattttaaagggattgtggacctgatcgaggaacgggcaatctactttgatggagacttcggccagatcgtccgctacggcgagatacccgcagagctgcgtgccgctgccacagaccatcgacaagagctgatagaatgcgtggcaaattctgacgagcagttgggcgaaatgtttctggaggaaaagatccctagcatctctgatctcaagctggctattcgtagggctacacttaaaaggtcgtttacacctgtgttcctcggttcggctctgaagaataaaggcgtccaaccactgttggatgccgtgctcgaatacttaccaaaccctagcgaggtacagaactatgccatactaaataaggaagatgatagtaaggagaagacaaaaatcctgatgaattcttccagggacaacagccatccctttgttggactggccttcaagctggaggtcggcagattcggccagctcacctatgttcgttcctaccagggggaactgaagaagggcgataccatctacaacacgcgcacacgcaaaaaggttcggttacaacgtctggccaggatgcacgctgatatgatggaggatgttgaagaggtgtacgcaggagatatctgcgcattgtttggcatcgactgcgcgagcggtgatacgtttacagataaggccaattcaggcctatcaatggagtccatacatgtgcccgatccagtgatttccatcgcaatgaagccgtccaataagaacgatcttgagaagttcagcaagggtattggccgctttaccagagaggacccaaccttcaaggtgtatttcgatactgagaataaggaaacggtcatttcaggtatgggcgagttgcacctcgagatctatgcacagcgcctcgagagagaatatggctgcccatgtatcactggaaaacccaaagtagcatttagagagacaatcaccgcacctgttcctttcgactttacacacaagaaacaatcggggggagccgggcagtacggtaaagtcattggagtgttggagcccctggatcctgaagattacactaaactggaattcagtgatgaaacgtttgggtcaaacattcctaaacagttcgtgcctgccgtggagaaaggatttctcgacgcctgcgagaaaggccctctgagcggacataagcttagcgggcttaggttcgttctgcaggacggagcccaccatatggtggactccaatgaaatttccttcattagagctggagagggggcccttaagcaggcactggcgaatgctaccctttgcattctagaacccatcatggctgtggaagtggtcgccccgaatgaattccaagggcaggtaatagcgggtattaataggaggcacggcgtaattactggtcaagatggcgtcgaagactacttcacactatacgccgacgtgcccctcaatgacatgttcgggtatagtaccgaactccggagctgcacagagggtaagggcgagtacactatggaatacagtcggtatcagccctgcctgcccagtacacaggaggatgttattaacaaatacctcgaggccacaggccaattgccggtcaagaaaggcaaagctaaaaactag

SEQ ID NO: 117663 - DNA, 459 bp, synthetic construct
  misc_feature 1..459: note = Description of Artificial Sequence: Synthetic coding sequence
  source 1..459: mol_type = other DNA
atgagcctcgttatacccgagaaattccagcacatcctgagagtccttaataccaatatagatggcagacgcaagatcgctttcgcaatcaccgcaattaaaggggttggtaggcgctatgcccatgtggtccttcgtaaagccgatattgaccttactaagagggccggcgagctcaccgaggacgaggtggagcgggtcattaccataatgcagaaccctaggcagtacaaaattccagattggttcctgaatagacagaaggatgtgaaagatggtaaatactcacaggtgcttgccaatgggctggacaataaattaagggaggatttagaacgtctgaagaagattagggcacaccggggcttaaggcatttctggggcttacgggtcagaggccagcacaccaaaaccacagggagacgaggacgtaccgtgggcgtgagtaaaaagaaatag

SEQ ID NO: 117664 - DNA, 1071 bp, synthetic construct
  misc_feature 1..1071: note = Description of Artificial Sequence: Synthetic coding sequence
  source 1..1071: mol_type = other DNA
atgagccggcctttgctgatcacctttactcctgcaaccgacccaagcgacctctggaaagacggccagcaacaacctcagcctgaaaagcccgagtccaccttagatggggccgcagcgcgtgctttctacgaggctctgattggagacgagtcaagtgcccccgatagccagagaagccaaaccgagcctgcgcgagaaaggaagcggaaaaagcgtcgaatcatgaaggcgcccgccgccgaggccgtggctgagggagccagcggccggcacgggcagggccgctcactggaagccgaggataaaatgacccatagaatcctccgcgctgcacaggaaggcgatctgcctgagttgagacgattacttgagcctcatgaggctggaggcgccggtggaaatatcaatgcacgggatgccttttggtggactccacttatgtgcgctgcccgcgccggtcagggagcagcagtcagttacctgctgggaaggggcgctgcatgggtaggggtgtgcgagctctctggccgggacgctgcccagctcgccgaggaagcaggatttcccgaggtagcgcggatggtgagagagagccatggcgagacacgatcccccgaaaaccgatcgcctacaccaagcctgcagtactgcgaaaattgtgacacccacttccaggatagcaaccacaggacatcaaccgcccacctactatcgctgtcccaagggccccagcccccgaacttaccactgggagtacccatctcaagtccgggtttcaagttgcttctgcgggggggatgggagcccgggatgggtctgggcccaaggggggagggaagagccaatcccattcctacagtcctgaagagagaccaggaagggctgggctatcggagcgcaccacagccccgtgttacccatttcccggcctgggatacccgggccgttgccggtagagagcggcccccccgcgtggccaccctttcctggagggaggaaaggcggagggaggaaaaggatcgggcctgggaacgcgatctacggacatacatgaaccttgaattctag

SEQ ID NO: 117665 - DNA, 1071 bp, synthetic construct
  misc_feature 1..1071: note = Description of Artificial Sequence: Synthetic coding sequence
  source 1..1071: mol_type = other DNA
atgtctcgacccctgttgataaccttcacccccgccacagaccccagcgacctgtggaaggatggacaacagcagccacagccagaaaaacctgagtccacactggatggagcggccgctcgcgccttctatgaggcattgataggtgacgaatcaagcgccccggacagccagcgctcccagaccgagccagctcgcgaacggaaacggaaaaagcgaagaatcatgaaggcccctgctgctgaagcggttgcagagggagcctccgggcgccacggccagggacgcagcctggaggcagaggacaaaatgacccatcgaatcctccgcgccgcgcaggagggtgatctgccagagctccgacgcttactcgagccccacgaagctggaggtgccgggggcaacatcaatgccagggacgccttctggtggacccccctgatgtgcgcagccagagcaggccaaggggccgctgtctcttacctcctggggaggggggcggcttgggtgggtgtctgcgagctgtcaggccgagatgctgcacagttggcagaggaggccgggtttcccgaagtagcccgtatggtccgcgagtcccacggggagacacgaagtccagaaaacaggtcccctaccccttccctgcagtactgcgaaaactgcgacactcatttccaagattcaaaccatcgcacctccaccgctcatctgctgagtctgtcccaggggccccaaccacccaatctcccattaggagtgcccatctcttccccaggtttcaagctgttgcttcgtggaggctgggagcctggtatgggtctgggaccacgaggcgaaggacgagcaaaccctatcccgactgtgttaaaacgggatcaggagggtctgggctatagaagtgcccctcagccacgggtaactcactttcctgcctgggacacccgcgctgtggcgggtcgcgagcggcctcctagggtggcaacactgtcctggagagaggagaggaggcgggaagagaaagaccgggcttgggagagagacctgcggacctatatgaacctggaattctag

SEQ ID NO: 117666 - DNA, 1071 bp, synthetic construct
  misc_feature 1..1071: note = Description of Artificial Sequence: Synthetic coding sequence
  source 1..1071: mol_type = other DNA
atgagccgccccttgctgatcacatttacacctgccaccgatccatctgacctctggaaggacggacagcagcagccccagcctgagaaacctgagtctacgctggatggggccgcagcacgggccttttacgaggccctgatcggcgatgaatcttccgcacctgatagccaacgatctcagaccgaacctgcccgcgaacgaaaacgcaagaaaagaagaataatgaaagcgccagccgctgaagccgtagcagaaggcgcttccggcaggcacggtcaggggagatcacttgaggcagaagataagatgactcacaggattctccgggctgcccaggaaggtgacctgcccgagctgcgccgcctcctggagccccatgaagctgggggagccggtggcaatattaacgcccgcgacgcgttttggtggactcccttaatgtgcgctgcccgggccggacaaggggccgctgtgtcctaccttctgggccggggggcagcttgggtaggcgtttgtgagttaagtggccgggatgccgcccaacttgctgaggaagctggtttcccggaagttgcccgaatggtgagggaatcccacggagagacccgctctcccgaaaatagatcacccactccttctctccagtattgtgaaaactgcgacacccatttccaggactcgaatcaccgcacgagtaccgctcatctgttatccttgagccaaggcccacaaccccccaaccttcccttaggcgttcctattagcagccctggttttaagttactcctgcgtggtggttgggaacccggtatgggcctggggccccggggtgaaggccgagctaaccctatcccaacagtactgaaaagggaccaggagggcttaggatatcggagtgccccacagccgcgcgtaacccattttcccgcctgggatacacgtgctgtcgcagggcgggaacgtccgccacgggtagcgactctgtcgtggcgggaggagcgcagaagggaagaaaaggatcgcgcctgggagcgggacctgaggacttatatgaatctcgagttttag

SEQ ID NO: 117667 - DNA, 1071 bp, synthetic construct
  misc_feature 1..1071: note = Description of Artificial Sequence: Synthetic coding sequence
  source 1..1071: mol_type = other DNA
atgagccgacctttgcttattaccttcactcctgcgacagatccttctgacttatggaaagatgggcagcagcaaccccagcccgagaaacctgaatctacactcgacggtgccgctgctagagcattctatgaggccctgattggagacgagtccagcgctcctgatagtcagaggagtcagacggagcctgcaagagagaggaagcgaaaaaaaagacgaataatgaaggctcccgcggctgaggccgttgcggaaggcgcaagtgggcgccacgggcagggccggagcctcgaggcagaggataagatgacccatcggatcctgagggcggcgcaggagggagacctgccagagctccgtcgacttctggaaccccacgaggctggaggagccgggggaaacatcaacgccagagacgctttctggtggaccccactgatgtgtgcagcccgcgctgggcagggagctgctgtatcttatctgcttggccgtggggcggcatgggtgggagtatgcgagctcagcggaagagacgcagcacagcttgctgaggaagcggggtttccagaggtcgccagaatggttcgagagtcccatggagagaccaggagccccgagaaccgatcaccgacccctagtctgcaatattgtgagaactgcgatactcatttccaggacagcaaccacaggacatcaaccgcccacctgttatcattgtctcagggtccgcagccaccaaatttgccactcggcgtccccatatcttctcccgggtttaagctgctactgcgtggaggttgggaacccggcatgggcttggggcctcggggggaaggacgggccaacccgatccctaccgttctaaagagggaccaggagggtttagggtacagatcggcaccccagccgcgtgttacccacttccccgcctgggacactcgggccgtggcagggcgggagagacctcctcgcgtagctaccctttcttggagagaagagcgtcggagggaggaaaaggatcgggcttgggagagggacctgcggacatacatgaatttggagttctag

SEQ ID NO: 117668 - DNA, 1071 bp, synthetic construct
  misc_feature 1..1071: note = Description of Artificial Sequence: Synthetic coding sequence
  source 1..1071: mol_type = other DNA
atgagtcgccctctgctgatcacattcacccctgccacggatccttctgatctttggaaggacggacaacagcagcctcagcctgagaagcctgagtcgactctagacggagcagcagctcgtgccttctatgaagcacttattggagacgaatcctcagcccctgattcacagagaagccagacggagcccgcgcgagaacgaaagcgtaagaagcgcagaattatgaaagcaccggccgccgaagcggtggcagaaggcgcatccgggaggcatggtcagggtcggtcactggaggcagaggacaaaatgacccaccggattctgcgagctgcccaagaaggagatttgcctgaattacgtaggcttttagaacctcacgaggccggtggcgctgggggcaatatcaatgctcgggatgcattttggtggactcctctgatgtgtgcagcccgggccggacagggcgcagccgtctcatacctccttgggcgaggcgccgcctgggtgggggtgtgtgagctgagcggcagagatgccgctcagctcgccgaggaagccggcttccctgaggtcgccaggatggttagggagtctcatggagaaaccagaagcccagaaaatcgcagcccgacaccaagccttcagtactgcgaaaattgtgacacacactttcaggatagcaatcatagaacttccaccgctcatttgctttcattgagccaagggcctcagcccccaaacttgcccctgggagtgcctatctcatcaccagggtttaaactcctcctcagaggtggctgggagccaggcatgggactcggcccacgaggtgaaggacgggctaacccaatccccacggtgttaaagcgagaccaggagggactcggctacagatccgccccgcagccccgggttacccactttcctgcttgggacacgcgagctgtagcgggcagagaaaggccaccaagggtcgcaactctatcttggcgggaggagcgacggagagaagagaaggatagagcgtgggagcgagacctgcggacgtacatgaacctcgagttttag

SEQ ID NO: 117669 - DNA, 1071 bp, synthetic construct
  misc_feature 1..1071: note = Description of Artificial Sequence: Synthetic coding sequence
  source 1..1071: mol_type = other DNA
atgagtagacctttgctaatcacattcacgcctgccactgacccttctgatctgtggaaagacgggcagcagcagccgcagccagagaagccggaaagcacacttgatggggccgcagctcttgcgttctacgaggccctcattggggacgaaagttcggcccctgacagccagaggagtcagactgagcctgcccgtgaacgcaaaagaaaaaaaagaaggattatgaaggctccagcagccgaagcggtggctgaaggagctagtggaaggcatggccaggggaggtctctcgaggccgaagataagatgacgcatagaatcctccgcgcagcgcaggaaggagatctccctgagttacgcaggttgctagaacctcatgaggctggaggggcaggcgggaatattaacgctcgagacgccttctggtggactccattgatgtgcgccgcgcgcgccggtcagggcgcggcagtctcctacctgttagggcggggtgcggcttgggtcggagtatgcgaactgagcggccgtgacgccgcccagctggccgaagaagctggattcccggaagttgcccgaatggtgcgggagagccacggcgagacaaggtcccctgaaaatcgtagtccaaccccctccctgcagtactgcgaaaattgcgacactcacttccaagatagcaaccaccgcacaagcaccgcgcatctgctatctctctctcaggggccccagccacccaacctccccctgggcgtgcctatcagctcccccggtttcaagctgcttctccggggtggatgggagcccggtatgggcctgggaccccggggcgaagggcgggcgaaccccattcccaccgtgttaaaaagggaccaggagggactcggctacagatcagctccacagccacgggtaacccatttccctgcctgggacacgcgcgctgtggccgggcgggagcgaccaccgagagtcgccaccctctcctggcgagaggaacgcagacgagaagaaaaagaccgggcttgggagagggacttgagaacctacatgaacctggagttctag

SEQ ID NO: 117670 - DNA, 1071 bp, synthetic construct
  misc_feature 1..1071: note = Description of Artificial Sequence: Synthetic coding sequence
  source 1..1071: mol_type = other DNA
atgtcaagacccttgctaattactttcacccctgcaaccgatccctcagatctatggaaagacggtcagcagcagccgcagcctgagaaacccgagagcacgttggatggtgccgctgccctggccttctacgaggctctaatcggtgatgagagctccgctcctgacagccagcgctctcaaactgagccggccagagagcgtaagaggaagaaaaggagaataatgaaggcccctgcagccgaagccgttgccgagggcgccagtggaagacacggccaagggagatccctggaagcagaagacaagatgactcatcgcatccttcgcgccgctcaagaaggggacttgccagagctccggcggttgctggaaccccacgaagccggaggggcgggcggtaacattaacgcccgagatgcattttggtggacaccactgatgtgtgcagcaagggccggccagggtgccgcagtcagctaccttttggggcggggagctgcctgggtgggggtgtgcgaactcagcgggcgggatgctgctcaattggctgaggaggctggcttcccggaggttgcgagaatggtccgtgaatcgcatggcgagacgagatccccagagaaccgcagccccacgcctagcctacagtattgtgaaaactgtgatacccactttcaggactctaatcaccgaactagtaccgcgcacctcctgtcactgtctcaggggccgcagcccccaaatctccccttgggcgttcctatcagttctcccggatttaagctacttctgcgcgggggatgggaacctggcatggggttgggcccacggggtgagggtcgggctaaccccattccaaccgtacttaagcgcgaccaggagggccttggctataggtccgcgccccagccacgggtgactcactttccagcttgggacaccagagccgtcgctggacgagagaggccccccagagtcgcaacactcagctggagggaagagcggcggagagaggagaaggaccgagcctgggagagggacctgcggacatacatgaatttggagttttag

SEQ ID NO: 117671 - DNA, 1071 bp, synthetic construct
  misc_feature 1..1071: note = Description of Artificial Sequence: Synthetic coding sequence
  source 1..1071: mol_type = other DNA
atgagtagaccactccttattacattcacaccggccacagacccaagtgacctttggaaagacgggcagcagcagccgcagcctgagaaacctgaatccacattagacggcgcggcagcactagccttttacgaggcactgatcggtgatgagagctccgctccagacagccagaggagtcagaccgagccggccagagaaaggaaacggaaaaagcgtaggataatgaaagcccctgccgctgaagctgttgcggagggggcaagcggcaggcatggccagggccgctcactggaagctgaagacaagatgacccacaggatcttacgagcagcccaggaaggcgacctgccagaactgagacgactcctcgagccccacgaagccgggggggcaggcggcaacataaacgcacgcgacgccttctggtggacccccctaatgtgcgccgcccgggctggacagggggctgcggtatcctatctgctcggaaggggggccgcctgggtaggggtgtgtgagcttagcggcagggacgccgctcagctcgcagaggaagccggctttcccgaggtagcccgaatggttcgggagagccatggagaaaccagatctccagaaaaccggagtcccactccctccctccaatattgcgaaaactgtgatacccatttccaagattctaatcaccgcacctccaccgcccacttgttaagcctgagtcagggacctcagccccctaaccttcctctaggcgtgccaataagttccccaggattcaagctccttctcaggggcggctgggagccaggcatgggccttgggccccggggagaagggcgtgctaaccccattccgaccgtgctgaagcgggatcaggagggcttaggataccggagcgccccccaacctcgagtaacccactttcccgcctgggatacaagagcagttgcggggcgggagcgaccaccccgtgttgccacattatcctggcgagaagaaagaagacgagaagagaaggaccgagcatgggaaagagacctccgcacgtatatgaatctcgagttctag

SEQ ID NO: 117672 - DNA, 1071 bp, synthetic construct
  misc_feature 1..1071: note = Description of Artificial Sequence: Synthetic coding sequence
  source 1..1071: mol_type = other DNA
atgtctcgccctctcttaataacgtttaccccagctacagacccatctgacctttggaaagatggccagcagcagccgcagccagagaagccagagtcaacactcgacggtgccgccgccttggcgttctacgaggccctgattggcgatgaatcctctgcccccgatagccaaaggtcacaaacagagccagctagggaaagaaagaggaagaagcgaagaattatgaaggcccccgccgctgaggccgtggcagaaggggccagcggacgccacggccaagggcgctccctggaggcagaagataagatgacccataggatcctgagagcggcccaggaaggagatctgcccgaattgcgcaggctcctcgaacctcatgaagccggtggagcagggggcaacataaatgccagagacgctttttggtggacccctctaatgtgtgccgcccgcgctggacagggcgctgccgtatcctatctgttaggacgtggcgccgcatgggtaggtgtttgtgaactcagcggtagggatgctgctcaactggctgaagaagcgggttttcctgaagtggcacgtatggtgagagaatcgcacggcgaaactcggtcgcccgagaaccgttctccaactccatccctgcaatattgcgaaaactgcgacacacatttccaagactctaaccataggacatccacagcccacctgttatccttgtcacaggggccccagcctcccaacttacccctcggagttccgatttcttcacccggctttaagttattgctacgcgggggatgggagccggggatgggtttggggcctagaggagagggccgggctaatcctatcccaactgtgcttaaaagggaccaagagggccttggatatcgctccgccccacagccgcgagtgacccacttccctgcatgggacacacgcgccgtcgccggtagggaaagaccaccacgagtggccaccctgagctggagagaagaaaggcgacgtgaagaaaaagatcgtgcgtgggagcgcgacctaaggacctatatgaacctggaattctag

SEQ ID NO: 117673 - DNA, 1071 bp, synthetic construct
  misc_feature 1..1071: note = Description of Artificial Sequence: Synthetic coding sequence
  source 1..1071: mol_type = other DNA
atgagtcgcccactgctgataacctttacgcccgcaacagacccctcggacctgtggaaggacgggcagcaacagccacagcccgagaaacccgaatccacactggacggtgcagcagcgttggcattctatgaagcccttattggggatgaaagttcagcaccggattcacaaaggtcacagaccgaacctgcaagagaaaggaagcgcaaaaaacgaagaataatgaaagcaccggcagcggaggccgttgcggaaggtgcttccggacgacacggacaggggagatccttggaggccgaagataagatgactcaccggattctaagggccgcccaggaaggcgaccttccagagctcaggaggttgctcgaacctcacgaggcaggaggggctggggggaacatcaacgcgcgggacgcattttggtggacacctctgatgtgtgctgcacgtgcagggcaaggcgctgccgtgtcctatctgctcggcagaggtgctgcctgggtcggcgtgtgcgaattaagcggtcgagatgccgcacaattagctgaggaggcaggtttcccggaagttgccagaatggtcagagagagccatggcgagacgcggtcacctgagaaccgttctccaacaccgtcattacagtactgcgagaactgtgatacacactttcaagattccaaccaccgcacctccaccgcccatcttctgtccctgagtcaggggccgcaacctccaaatctcccactcggagtgccaatttccagccccggtttcaagctgttacttcgagggggatgggaacccgggatggggctgggcccgaggggtgaggggcgcgccaatccgattcccaccgttctgaagagggatcaagagggcttaggctatcgcagtgccccgcagcctcgggtgacacacttcccagcctgggacaccagagcagttgccggacgcgagcggcccccgagagtggcaactctctcctggagagaggagaggaggagggaggaaaaagacagagcctgggaacgggatctgcgcacttatatgaatctggagttttag

SEQ ID NO: 117674 - DNA, 498 bp, synthetic construct
  misc_feature 1..498: note = Description of Artificial Sequence: Synthetic coding sequence
  source 1..498: mol_type = other DNA
atgagccgccctttgttgattacttttacaccggcgactgatccgagcgacctgtggaaagatgggcagcagcagccccagcccgaaaagcctgagtctacgctcgatggcgctgccgcgcgcgctttctacgaggccctgattggggacgagagtagcgcacccgacagccagcgttctcaaaccgagcctgcgcgcgaacgtaagcgcaagaagcggcggattatgaaggcccccgccgctgaggccgttgcagagggcgccagcgggcgacacggacaagggagatccctggaagcagaagacaagatgactcatagaattctccgtgccgcgcaagaaggagacctccctgaattaaggcgacttctcgaaccgcacgaagccgggggagctggcggtaatatcaacgccagagatgccttctggtggacccccctcatgtgtgctgcccgtgctggtcagggagctgcagtgagttaccttcttggaagatag

SEQ ID NO: 117675 - DNA, 459 bp, synthetic construct
  misc_feature 1..459: note = Description of Artificial Sequence: Synthetic coding sequence
  source 1..459: mol_type = other DNA
atgtccagacctctgctcattacttttaccccggccactgacccgagcgacttgtggaaggatggtcagcaacagccacagcccgagaagcctgaatccaccttggacggagccgccgctctcgccttttacgaggctctgatcggggatgagagctcggcgccagacagtcagagaagccagacagagcctgcccgagaacggaagagaaagaaacgacgtatcatgaaagcccctgcagcagaagcagtcgccgagggggcgtctgggaggcacggacagggacgatctttagaggctgaggataagatgacgcaccgtatcttaagagccgctcaggagggggacctccccgaacttagacggctgctagaacctcatgaggctggaggggctggtggtaacatcaatgctcgggacgccttctggtggacccctctgatgtgtgccgcccgctag

SEQ ID NO: 117676 - DNA, 1071 bp, synthetic construct
  misc_feature 1..1071: note = Description of Artificial Sequence: Synthetic coding sequence
  source 1..1071: mol_type = other DNA
atgagtcggcccctgcttataaccttcactccagctacagaccccagtgatctctggaaggatgggcagcaacaaccccaacctgagaagcctgagagcacccttgacggcgcggccgcattggctttctatgaagccctgattggcgatgaatcctcggctccggacagccagaggtctcagaccgaaccggcgagggagagaaagcgcaagaagaggagaataatgaaagccccagctgccgaggcggtagctgagggcgcaagcggacgccatggccaggggcgctctctcgaagccgaggataagatgacccacagaattttaagggccgctcaggaaggagatcttcccgagcttagacgcctgctggaaccgcacgaggctggtggcgcgggtgggaatataaatgcacgagacgccttttggtggacgcctctaatgtgcgccgcccgagctggacagggcgctgccgtctcatatctactgggccgcggcgccgcctgggtcggagtctgcgagctgtccgggagggacgccgcccagttagcagaagaagctggattcccggaagtcgcacggatggtcagagaatctcacggggagacaaggtcccctgagaatagaagccctacccccagcctccagtattgtgaaaattgtgatactcactttcaagattcgaaccaccgtacatccaccgcccacctgctcagcttatcacaggggccacagccaccaaacctcccccttggcgtccccatttcgtcgcctgggtttaaattgctgctgcgcggcggctgggaaccggggatgggattggggccccgcggtgaggggcgggccaacccaatcccgaccgtgcttaaacgcgatcaggaaggcctaggttacagatcggctccgcagcctcgagtgacccacttccccgcttgggatactcgcgccgtggcaggccgggaacggcccccccgagttgccacactctcatggcgggaggagcgacggcgcgaagagaaagaccgcgcatgggaaagggaccttcggacttacatgaatcttgaattttag

SEQ ID NO: 117677 - DNA, 459 bp, synthetic construct
  misc_feature 1..459: note = Description of Artificial Sequence: Synthetic coding sequence
  source 1..459: mol_type = other DNA
atgtcccgcccactgctcatcacattcactcccgcaacagacccaagcgacctctggaaagatggccagcagcaaccacagccagagaagcctgagtctacactcgacggagctgccgctcgagccttctatgaagccctgatcggcgatgagagctccgcgcccgactctcagcgctcacagaccgaacctgcacgggaaagaaaacggaaaaaacggcggattatgaaagctcccgccgcagaggcagttgctgagggcgcttccggacgccacggccaaggtcgctctttagaagccgaggacaaaatgacccataggattctcagagccgcccaggagggagacttgcccgaactccgaagactcctcgagccgcatgaagctggcggtgcgggaggtaacattaatgcaagagacgccttttggtggacacccttaatgtgtgctgctagatag

SEQ ID NO: 117678 - DNA, 498 bp, synthetic construct
  misc_feature 1..498: note = Description of Artificial Sequence: Synthetic coding sequence
  source 1..498: mol_type = other DNA
atgagccgccccctcctcatcacctttactcctgcaaccgacccaagtgacctgtggaaggatggccagcagcaaccccagccagagaagcccgagagtactctcgatggcgcagccgctttggccttttatgaggcattgatcggcgacgagtcatcagcacctgatagtcagcgatctcagaccgagccggcaagggaacgtaagagaaagaagaggcggattatgaaggcccctgctgccgaggccgtagcagaaggcgcaagcggccggcacggccagggacggagcttggaggccgaggacaaaatgactcaccgcatcttaagagcagcccaggagggtgacctgccagaattgcgccgattactcgagccacatgaagctgggggcgcaggcggaaacatcaacgccagagatgcattttggtggacgcctctgatgtgcgccgcgagggccggacagggcgccgctgtatcatacctcctaggtcgctag

SEQ ID NO: 117679 - DNA, 273 bp, synthetic construct
  misc_feature 1..273: note = Description of Artificial Sequence: Synthetic coding sequence
  source 1..273: mol_type = other DNA
atgtccagaccactgctcattacattcacgcccgccacggaccccagcgacttatggaaagacggccagcagcagccccagcctgaaaaacctgaatctaccctggatggcgcagccgcactggcattttacgaggctttaataggggatgagtcatcagcccctgactcccagagatcacagactgaacccgcacgggagaggaagcggaaaaagcggagaatcatgaaagcccctgcggctgaagccgtggctgaaggcgccagcggttag

SEQ ID NO: 117680 - DNA, 1071 bp, synthetic construct
  misc_feature 1..1071: note = Description of Artificial Sequence: Synthetic coding sequence
  source 1..1071: mol_type = other DNA
atgtcacggccgttactgattacattcacccctgctaccgatccatctgacttatggaaggacggacagcagcagcctcagcctgagaagcccgagtctacccttgatggggcggctgccagagctttctacgaggcactgatcggtgacgagtcttctgcacctgatagccagcgttcccagactgaaccagcgcgcgagcgcaagaggaaaaagaggagaattatgaaggccccggccgctgaagctgtggccgagggcgcatcaggcagacacgggcaggggagatccctagaagcggaggacaagatgacccaccgtatactgcgggctgcccaggaaggtgatctgcctgaattgcggcgtttgctcgagcctcacgaggctggcggtgcaggtggcaatatcaacgcgcgggatgccttctggtggacacccttaatgtgtgcggcccgggcggggcagggagctgctgtgtcatacctcttgggaagaggcgccgcttgggttggcgtttgcgaattgtccggccgagacgccgcccagctggctgaggaagccggctttcccgaagtggcacgtatggttcgcgaatcacacggagaaacccggtcccctgaaaataggtcgcctaccccaagtttgcagtattgtgagaactgcgacacacatttccaagattcgaaccacaggactagcacggcccatctgctctccctatcgcagggcccccagcctcctaacctccctttgggcgttccaatttcatcacccggctttaagctgttactgaggggtggctgggaacccggaatgggattagggccgaggggcgagggtcgagcaaatcccatcccgaccgttctgaaacgcgatcaggaaggccttggctacagaagcgctccccaacctcgggtcactcacttccccgcttgggatacgcgggcggttgccggcagagagagaccccctcgagtagccactctgagctggcgcgaggagcgtagaagagaagagaaggaccgtgcgtgggagagagatttgcgaacctacatgaacctggaattttag

SEQ ID NO: 117681 - DNA, 1071 bp, synthetic construct
  misc_feature 1..1071: note = Description of Artificial Sequence: Synthetic coding sequence
  source 1..1071: mol_type = other DNA
atgagcagaccgctgcttatcacctttactcctgcaaccgacccctcagacctgtggaaggatggccagcaacagccacagccagagaagcccgagtctacactggacggtgctgctgcaagagccttctatgaggccctgattggtgacgagtcctctgcccccgattcccagcgaagtcaaactgagcccgccagagagcgtaaacgtaaaaagcgcagaatcatgaaagctcccgctgcggaagcagtggcggaaggtgcctccggccgacatgggcagggaagatcactggaagccgaagacaagatgactcatcggattctgagggccgctcaggagggtgatctgcccgaattgagaagactgctggaaccacatgaggctggcggtgcaggtgggaacatcaatgcacgggacgctttttggtggactcctctaatgtgtgctgccagggccgggcagggggcagcggtgtcctacctgctggggcgaggcgctgcctgggtgggggtctgcgagttgtccggccgcgatgccgcacaattggcagaagaggctggcttccccgaggtggctaggatggtccgcgagtctcacggagagacacgctctcctgaaaataggtccccgaccccttctctgcaatactgcgagaactgtgatacacacttccaggactccaaccacagaacaagcacagctcacctcctttccctctcgcagggcccacagccaccaaacttaccactcggagtgccgatatcatcccctggctttaagctgctcctcaggggtggatgggaacccggcatggggctgggccctcgtggcgagggccgcgccaatccgatccccaccgttcttaagagggatcaggaaggactggggtaccgctccgccccgcagccccgggttacccactttcccgcatgggacacacgggcagtcgccggaagagagcggccacccagagtcgctaccctgagctggagagaggagagaagaagggaggaaaaggacagagcatgggaaagagacctcagaacgtacatgaatctggagttctag

SEQ ID NO: 117682 - DNA, 324 bp, synthetic construct
  misc_feature 1..324: note = Description of Artificial Sequence: Synthetic coding sequence
  source 1..324: mol_type = other DNA
atgtctcgtcccctgttgatcacattcactccagccacggatccatccgacctatggaaagatggccagcagcagccacagcctgaaaagccggagagtaccctggacggtgcagctgcccgggctttctacgaggcgctgatcggggacgaaagctctgcgcccgatagtcagaggtcgcagaccgagcctgctagggagcggaagcgtaagaagcgccgaatcatgaaggcccctgccgcagaagctgtggcagaaggagctagcggccgacatgggcaggggcgctccctggaggctgaggataagatgacccatagatag

SEQ ID NO: 117683 - DNA, 324 bp, synthetic construct
  misc_feature 1..324: note = Description of Artificial Sequence: Synthetic coding sequence
  source 1..324: mol_type = other DNA
atgtcccggcctttgttgatcacttttacacctgcgaccgatccatccgacctatggaaggatggacagcagcagccccagcctgaaaaacccgaaagtaccctggatggagctgccgctctggccttttatgaggcactgatcggggacgagtctagtgcgcccgatagccagcgatcccaaaccgaaccagcacgggaaagaaaaagaaagaaaagacggattatgaaggccccagccgctgaagccgtggccgaaggagcctccggcaggcacggacaaggcaggagcttagaagctgaggacaaaatgacgcatcgttag

SEQ ID NO: 117684 - DNA, 1071 bp, synthetic construct
  misc_feature 1..1071: note = Description of Artificial Sequence: Synthetic coding sequence
  source 1..1071: mol_type = other DNA
atgagcagacccttgctgataacgttcacgcctgcaactgacccctccgatctgtggaaagacgggcagcagcagcctcagccggagaagcctgaaagtactctggacggcgcagccgctcgagccttttatgaagctctaatcggggatgagtcgtctgcacctgactcccaacggagccagactgagccagccagagaacgcaagcgaaaaaagcggcggattatgaaggctcccgccgccgaggctgtggctgagggtgcctctgggagacatggtcaggggcgctccctggaggccgaagataagatgacgcatcggattcttagagccgctcaggagggtgatctgcctgaacttagaagactgctggaaccccatgaggccggcggtgccggaggaaatatcaacgcccgcgatgcattctggtggacccctctgatgtgtgccgcccgcgcaggccagggcgctgctgtgagttacctcctaggccgcggggcagcatgggttggtgtgtgcgaattgagcggacgggacgctgctcaactcgctgaagaggccggatttcccgaagtggcacgtatggtgagagagtcacacggtgagacacggagccctgagaacagaagccctactccttcacttcagtattgcgaaaactgcgacacccacttccaggactccaaccatcggaccagtactgcccatctcctgagtctcagccagggaccacagccacccaatcttccactaggggtgccaatctcctctcctggcttcaagctgcttctgcgtgggggttgggaaccagggatgggactggggcctcggggggagggccgcgccaaccctatcccaacagtgcttaaaagagaccaggaaggcctagggtaccgcagtgcaccacagccaagagtcactcactttcccgcttgggacacacgagccgtggcaggtcgagaacgccctccaagggtcgctaccctgtcttggcgcgaggaaaggagacgtgaggaaaaagaccgcgcctgggagcgcgatttacgcacatacatgaacctcgaattctag

SEQ ID NO: 117685 - DNA, 1071 bp, synthetic construct
  misc_feature 1..1071: note = Description of Artificial Sequence: Synthetic coding sequence
  source 1..1071: mol_type = other DNA
atgtctaggcccctactgatcacatttaccccagccactgacccatccgatctgtggaaagatggccagcaacagccccagcctgaaaaacctgaaagcacactcgatggcgcagccgctcgtgccttctacgaggcccttattggcgatgaaagcagtgcccctgatagtcagcgatcccagactgaaccagccagagagcggaaaagaaaaaaacgccggatcatgaaggccccagccgctgaggctgtggctgagggcgctagcggcaggcatgggcagggcaggtccttagaagcggaggacaaaatgacacaccggatactaagggccgctcaggagggagacctgccagagttgcggcgtctgttagaaccacacgaggccggcggggcggggggcaatattaacgcccgcgatgccttttggtggactcctctgatgtgcgccgcccgtgctggacagggcgccgcagtgtcgtatttgctcggaaggggagcagcatgggtcggcgtttgtgaactctctggccgcgacgcagcccagttggcggaggaagctggcttcccagaagttgcccgcatggtgagagaatcacacggggagactcgaagccccgaaaataggagccccacaccctccctgcagtactgcgagaattgcgacacacacttccaggatagcaatcaccgcacatccacagcacatcttttgtcgttaagccagggcccacagccacccaacctccctctcggcgtgcctatctcatcaccgggattcaagttgctcctgaggaggggatgggagcctggaatggggctcggaccacgcggggagggaagagccaatcccattcctactgtgctaaaacgcgatcaggaaggattggggtaccgcagcgcaccacaacctagggtgactcacttccccgcctgggacactagggctgtggcgggcagggagagacccccacgggtagccaccctgagctggcgagaagaacgacgccgggaagagaaggaccgcgcctgggaacgtgacctaagaacatatatgaacttggagttctag

SEQ ID NO: 117686 - DNA, 1071 bp, synthetic construct
  misc_feature 1..1071: note = Description of Artificial Sequence: Synthetic coding sequence
  source 1..1071: mol_type = other DNA
atgtcacgacctctcctcatcaccttcacacccgcgacagatcctagcgacctctggaaggacgggcagcagcagccacagcccgagaagcctgaatccaccctcgacggcgcagctgcccgtgccttttatgaggccctgatcggcgacgagtcatccgctccggattcacaaagatcccagactgaacccgctcgcgaaaggaagagaaagaagagacgaatcatgaaagcacctgcggcagaggcggttgctgagggggcatctggtcgtcatgggcaaggcagatctcttgaagctgaggataagatgacacacagaattcttcgggccgcccaggagggggacctgccggagctacgccggctccttgagccgcacgaagctgggggagcaggtgggaacatcaatgcgagagatgccttctggtggaccccactgatgtgcgcagccagagccggccagggcgccgcagtgtcttacttgctgggacggggcgccgcttgggtcggtgtttgcgagttatcaggccgagacgctgcccaactcgctgaagaggctggatttcctgaagttgcacgcatggtccgcgagagccatggggaaactaggagccctgagaaccgctctccaacacctagccttcagtactgtgaaaattgcgatacacattttcaagactccaatcaccgaacaagtacagcccacctgctttctttgagtcagggccctcaaccacccaatctacccctgggggtccctatttcatccccaggcttcaaacttttgttgcgccgcgggtgggagccaggtatgggactggggccacgaggagaaggacgggcgaatccgatccccaccgtccttaagcgcgaccaggaaggcctcgggtatagatccgccccacagcctcgcgtcactcattttcccgcttgggacacccgagctgtcgctggcagggagagaccgcccagggtggccaccttgtcttggagagaagagcggcggcgggaggaaaaggaccgcgcctgggagagggacctcaggacttacatgaacctggagttctag

SEQ ID NO: 117687 - DNA, 498 bp, synthetic construct
  misc_feature 1..498: note = Description of Artificial Sequence: Synthetic coding sequence
  source 1..498: mol_type = other DNA
atgagtcgaccactcttgatcaccttcacccccgctactgatccaagcgatctttggaaagatgggcaacaacagccccagcccgagaaacccgagagcaccctggacggcgcagctgcccgggctttctatgaggccctgatcggtgacgaatcctctgcacctgattctcagcgatcccagactgagcctgctcgtgagcggaaacgcaagaaacgcagaatcatgaaggccccggctgcagaggccgtggcagagggagcgtcagggaggcacgggcagggaaggagcttggaagctgaagacaagatgacccaccgtattctgcgggccgcacaggaaggcgatctgcccgaactccgtcgactgcttgagccccacgaggccggcggagccggtggcaacataaatgctcgcgacgctttttggtggacaccactgatgtgtgccgcacgggctggtcagggcgcggctgtgtcatatctgctaggtcgttag

SEQ ID NO: 117688 - DNA, 1071 bp, synthetic construct
  misc_feature 1..1071: note = Description of Artificial Sequence: Synthetic coding sequence
  source 1..1071: mol_type = other DNA
atgtcacgccccctcctgatcactttcacgcctgcgaccgaccctagtgatctttggaaagatgggcagcaacagcctcagcctgagaagcctgaatcaacgctagatggagctgcagcaagagcattctacgaagccctcattggagatgagtcatcagcccctgattcccagaggtcacaaactgagcccgccagggaacgcaagcggaagaaacgacgaatcatgaaagcgcctgccgccgaggccgtcgccgagggagcttctggacgtcacggccaaggacgaagcttggaggccgaagacaaaatgacccaccggattctgcgtgctgcccaagaaggtgatctccccgaattgcggagactcctcgagcctcatgaggccggcggagctggagggaatatcaacgcccgagatgctttctggtggactcccctgatgtgcgccgcccgtgccggacaaggtgcagctgtgtcctacctactggggcgaggtgccgcctgggtgggggtgtgcgagttgtcgggtagggatgccgcccaactagccgaagaagctggctttcctgaggtggcccggatggtcagagagtctcatggcgagacccgctcccccgagaacagaagccctacccccagcctccagtattgtgagaattgtgatacccattttcaggattcaaatcaccgcacttcaacagcacacttgctttctctttcccagggccctcaaccccctaatctgcccttaggtgtgcccataagctctccagggtttaagctccttctccgcggcggttgggaaccaggtatgggattgggacccaggggcgagggaagggccaaccccattcccaccgtgctaaagagggaccaggaaggattggggtatcgatccgccccccagccacgagtcacgcacttccctgcctgggacaccagggccgtagccgggagggagcgcccaccaagggtggcgaccctgagctggcgggaggagcggaggcgagaagagaaggaccgggcttgggaacgagacttgaggacctacatgaatctggagttctag

SEQ ID NO: 117689 - DNA, 597 bp, synthetic construct
  misc_feature 1..597: note = Description of Artificial Sequence: Synthetic coding sequence
  source 1..597: mol_type = other DNA
atgtctagacctctcctgatcacattcacacccgcgaccgatcctagcgatctgtggaaagacgggcagcaacagccccaacccgagaaacccgaatccaccctcgacggagcggccgcgcgggccttctacgaggcactgatcggggacgaaagctcggcccctgactcccagcgcagtcagaccgaacctgcgcgtgaacgaaaaaggaaaaaacgccgaataatgaaagctccagctgcagaagctgtggcagagggagcctctgggcgccatggtcagggcaggtctctggaggccgaggacaagatgacacataggatcttaagagcagctcaagaaggcgatttgcccgaactcaggaggctccttgaaccccatgaggcaggcggcgctggcgggaacattaacgctcgggacgccttctggtggacgccacttatgtgcgcagcaagggcaggccagggcgccgccgtgtcttatctgctgggcaggggggcagcttgggttggtgtgtgtgagttgtctgggagagacgccgcacagctggcagaagaggcaggattcccagaggtagctaggatggtgcgcgaatag

SEQ ID NO: 117690 - DNA, 1071 bp, synthetic construct
  misc_feature 1..1071: note = Description of Artificial Sequence: Synthetic coding sequence
  source 1..1071: mol_type = other DNA
atgagtcgacctttgctcatcacttttactcctgccacagacccgagcgacctgtggaaagatggccagcagcagccccagccagagaagcctgaatcaacgctggatggggcggctgccagagctttttacgaggcgctgatcggcgacgagagcagcgcccctgacagccagaggtctcagaccgaaccggcgcgggagcgcaagcgtaagaagcgtagaattatgaaggctccagcggcagaagcagtcgcagagggcgcgtccggccgccacggacagggccggtcgctcgaggccgaagacaaaatgacacaccgcattctcagggcagcccaggagggggatcttccggagcttagacgcctcttggaaccccatgaagccggcggtgctggaggcaatattaacgcacgggacgccttctggtggacccccctgatgtgcgctgccagggcaggccaaggagccgcagtatcatatctccttggccgaggcgccgcgtgggtgggcgtttgtgagctgagtgggcgagatgctgcccagttagcagaggaagctggtttccctgaagtggctagaatggttcgcgagagtcacggggaaactcgctcccccgaaaacagatccccaacaccaagtctgcagtattgtgagaattgcgacacgcattttcaagattctaaccaccgtactagcacagcccacctcttatcacttagccagggccctcagcctcctaatcttccattgggggtgccgattagcagtccaggcttcaagctgttgttacgccgcggatgggagccaggaatggggctcggtccccggggagagggacgagctaatcctatacccaccgtgctgaagcgggaccaggaagggctgggctaccgatctgcaccacaacctagagtcacccacttccctgcttgggacaccagggccgtggcggggcgcgaacgacctccaagagtggcgaccctctcctggcgggaggagagaaggcgagaggagaaagacagggcgtgggagcgcgacctccgtacatacatgaatctggaattctag

SEQ ID NO: 117691 - DNA, 498 bp, synthetic construct
  misc_feature 1..498: note = Description of Artificial Sequence: Synthetic coding sequence
  source 1..498: mol_type = other DNA
atgtcacgtccactgctgatcacttttacccccgccactgacccaagtgacctctggaaagacgggcagcagcagccacagcccgagaaacctgagtccactctcgacggtgcagcggctctcgcattctatgaagctttaataggtgatgagtccagcgcccctgactcacaaagatcccagaccgaacccgctagggaaaggaagcgcaaaaagaggcgcatcatgaaggctccagccgcagaagcagtggctgagggcgcctcaggaagacacggtcaggggagatctctggaggccgaggataagatgactcatcggattctgcgggccgcacaagagggtgatctacccgaactccgccgactgcttgagccgcacgaggctggcggtgcgggggggaacatcaacgcacgcgacgctttctggtggacgccattgatgtgtgctgccagggcagggcagggggcggccgtatcctatttgttagggcgctag

SEQ ID NO: 117692 - DNA, 459 bp, synthetic construct
  misc_feature 1..459: note = Description of Artificial Sequence: Synthetic coding sequence
  source 1..459: mol_type = other DNA
atgtcaagaccgctgcttatcactttcacacctgctaccgatccttccgatctgtggaaagacggacagcaacaacctcagcctgaaaaaccagaatcaactcttgatggagctgctgcacttgccttctatgaggccttaatcggcgacgagtcctccgccccggacagtcagagatcacagaccgagccggcccgcgagaggaaacgcaagaaaaggagaataatgaaagctccagcggcggaggcggtcgctgagggcgcatccggcaggcacggacaggggcgctctttggaggccgaggacaaaatgacgcataggatactgcgcgccgcacaagaaggagacctgcctgaactcaggcggctccttgagccacacgaggccgggggcgcggggggaaatatcaatgcaagagatgcgttctggtggacccccttaatgtgcgctgcacggtag

SEQ ID NO: 117693 - DNA, 459 bp, synthetic construct
  misc_feature 1..459: note = Description of Artificial Sequence: Synthetic coding sequence
  source 1..459: mol_type = other DNA
atgtcgcgcccactcttaatcacgttcacaccagcaaccgaccccagcgatctgtggaaggatggccaacagcagccccagccggagaagcctgagtcaaccttagatggtgctgctgccttagccttctatgaggccctgatcggcgacgaaagctctgcacctgatagtcagcgtagtcaaacggagcctgcaagagaaagaaaaagaaagaagagaagaatcatgaaagcacccgctgctgaagccgtggccgaaggcgcctccgggagacatggccagggccggtctctggaagcagaagacaaaatgactcaccgcatcttgcgagccgcccaggaaggcgacctgccagaactacgtcggctcctcgagccccacgaagccggcggggcaggaggcaacattaatgcccgggacgccttctggtggacacccctgatgtgcgcagcaaggtag

SEQ ID NO: 117694 - DNA, 597 bp, synthetic construct
  misc_feature 1..597: note = Description of Artificial Sequence: Synthetic coding sequence
  source 1..597: mol_type = other DNA
atgtccagaccgctgctcattaccttcactccagctactgatcctagtgacctgtggaaggatgggcagcaacagccacagccagaaaaacctgagtctacgctagacggtgccgccgctctagcattttatgaggccttgatcggcgacgagtcctccgcgcctgactcccagcgatcccaaactgaacccgctcgcgagaggaagaggaaaaaacgaaggataatgaaagcaccagccgccgaagccgtggcagaaggagcttctggccgacacggtcagggtagatcccttgaggctgaggataagatgacacaccgcattcttagggccgctcaggaaggcgatctcccagaactgcggcgcctgttagaaccacacgaagccggcggcgccggaggaaacataaatgcaagagatgctttctggtggacaccgcttatgtgcgccgcgcgagcgggacaaggtgcagcggtttcctatctgctcggaaggggggccgcttgggtcggcgtctgcgaactgagcgggcgtgacgctgcgcagctggcagaagaggctggttttcctgaggtggcccggatggttcgcgagtag

SEQ ID NO: 117695 - DNA, 597 bp, synthetic construct
  misc_feature 1..597: note = Description of Artificial Sequence: Synthetic coding sequence
  source 1..597: mol_type = other DNA
atgtcaaggcccctcctcattacattcacacccgcaacagacccttcggacctctggaaggatgggcagcagcagcctcagcctgaaaaacctgagagtaccctggacggagccgctgccctggccttctacgaagcactcattggagacgagtccagcgctccagactcccagcggtctcagacagagccagcaagagaaagaaagcgcaagaagaggcggatcatgaaagcaccagcggccgaggctgtcgctgagggtgcaagcggccgccacggccagggacgatccctcgaagcggaagataagatgacccacagaatcctccgggctgcgcaggagggcgatttgcctgaattgagaaggctcctcgaacctcatgaggccggtggcgctggcgggaacattaatgcacgcgatgccttctggtggacccccctcatgtgtgccgcgcgtgcggggcagggagccgcagtgagctacctcctggggcggggagcagcctgggttggagtgtgtgagcttagtgggcgagatgctgctcaactggctgaggaggctgggtttccagaggtcgcgagaatggtgagagaatag

SEQ ID NO: 117696 - DNA, 1071 bp, synthetic construct
  misc_feature 1..1071: note = Description of Artificial Sequence: Synthetic coding sequence
  source 1..1071: mol_type = other DNA
atgtcacgtcctcttctgatcaccttcaccccggcgacggacccctccgacctttggaaagatgggcagcagcagccccaacctgagaaacccgagtcaaccctggatggcgccgccgcaagagcgttttacgaagccctgattggcgacgagtcctcagctcccgattcacagcggtcccagacggagccagcgcgggagagaaaaaggaaaaaacgtcggatcatgaaggcccccgccgcagaggcggtcgccgagggagcctccggcaggcacgggcagggaagaagtctggaagctgaagacaagatgacacaccgcatcctgcgcgctgcacaggaaggggatcttcctgagctgcgcagactgctggaaccccacgaagctgggggggctgggggcaacatcaatgccagggatgctttctggtggacaccactcatgtgtgcggcccgagctggacaaggggcagccgtgtcgtacttgctgggacgcggagctgcctgggttggagtctgcgaactgagcggaagagatgccgctcagcttgccgaggaggccggattcccagaggtcgcgagaatggtgagagagtcccatggcgagacccgctcacccgaaaatagatcgccaactccctctcttcagtattgtgagaattgcgacacccatttccaggacagcaatcacagaactagtacagcccatctgctgtctttatcccaggggccgcagcctccaaacctgcccctgggcgttccaattagttcccctggttttaagttgctcctgaggcgggggtgggaaccaggcatgggcttgggaccgcggggggagggcagggcaaacccaatacccacagttctgaagcgagatcaagaggggttgggctaccggtccgctcctcagccccgagttactcacttccctgcctgggacacccgggcggttgctggaagggaacgaccaccgcgtgtggccacactctcatggcgggaagagcgacgacgtgaggagaaggacagggcctgggaacgggacttgaggacgtatatgaatctggagttttag

SEQ ID NO: 117697 - DNA, 1071 bp, synthetic construct
  misc_feature 1..1071: note = Description of Artificial Sequence: Synthetic coding sequence
  source 1..1071: mol_type = other DNA
atgtctagaccactgctgataacgttcactccagcaacagatccatcggacctgtggaaggatggccagcagcagccccagccggagaaacccgaatccacccttgatggcgctgccgccctcgcgttctacgaggccctcataggcgatgaatcctccgctccggatagccagcgttctcagaccgaacccgcccgcgaacgcaaacgcaagaaacgtagaatcatgaaggcaccggccgccgaggctgtagcggagggggcgtctggtcggcacgggcagggtagaagcctggaggctgaggacaaaatgacgcatcgaatcctccgtgccgcccaggaaggtgacctgcccgagttgcgcaggttgctggagccccacgaagccggaggggccggcggtaacataaatgcgagagacgctttttggtggaccccactgatgtgcgccgctcgggccggccagggcgccgctgtaagctacttactgggaaggggggcagcatgggtaggcgtatgtgagctcagcggcagagacgccgctcaattggccgaggaggcgggctttccagaggtggcccgtatggtcagggagagccatggagagacgaggtctcctgagaatagatcgccaactccatcccttcagtattgcgagaactgcgacacccatttccaagactccaaccatagaacgagcactgcgcacttgttaagcttgtcccagggacctcagccccctaatctgcccctcggcgtacctataagctccccagggttcaagttactccttcggggcggctgggaacctggaatgggcctcggaccacgaggggagggccgggccaatcctatcccgacagtgcttaagagggaccaggaaggtctgggataccgctctgcccctcagcctcgagtcacccacttccccgcgtgggatacacgggctgtggcagggagagagcggccgccccgggtcgccaccctcagctggagagaggagcgccgtagagaggaaaaagatagagcatgggaacgggacttgaggacatatatgaacttagagttctag

SEQ ID NO: 117698 - DNA, 597 bp, synthetic construct
  misc_feature 1..597: note = Description of Artificial Sequence: Synthetic coding sequence
  source 1..597: mol_type = other DNA
atgagtagacccctgctgataaccttcactcctgctacggacccctctgacctgtggaaggatggccagcagcagcctcaacctgaaaagcccgagagtaccctggatggagccgccgccctggctttttacgaggctctgattggtgacgagagttctgcccctgattcacagcgctctcaaactgaaccagcccgcgaaaggaagcgaaagaaacgcagaattatgaaagcccccgcagccgaggctgttgccgaaggcgcctcgggaaggcacggacaggggagatctctggaggcggaagataagatgacccaccgcatcctcagggccgctcaggaaggagacctgcccgaacttagacgtctgctcgagcctcatgaagccggaggggcaggaggcaacatcaatgcccgcgatgctttctggtggacacccctgatgtgcgccgctcgggcagggcagggggctgcagtcagttacctgctgggcagaggggcagcatgggttggggtgtgcgagctgtccgggcgagacgccgcccagcttgccgaggaggctggctttcccgaggtcgccagaatggtgcgcgagtag

SEQ ID NO: 117699 - DNA, 1071 bp, synthetic construct
  misc_feature 1..1071: note = Description of Artificial Sequence: Synthetic coding sequence
  source 1..1071: mol_type = other DNA
atgagtcggcctttattgattactttcactcctgcaacagacccaagcgatctttggaaagatgggcagcagcaacctcagccagaaaaacctgaaagcacgcttgatggtgctgccgcactagcattttatgaggccctaataggcgatgagtcaagcgcacccgatagccagagaagccaaaccgagcccgcgcgggaacgtaagagaaaaaagaggcgcatcatgaaggcgcctgctgccgaggcagtcgccgagggcgcatccggaaggcatggacagggccgatcactcgaggccgaggacaaaatgacccatcgaatactgcgcgctgcacaggaaggtgacttacccgagctgcgacgacttcttgaaccccatgaggctgggggcgcgggtggaaacattaatgctcgcgacgctttctggtggacccccctcatgtgtgcagccagggccggccagggcgccgcggtgagctacctactggggagaggggccgcgtgggtgggcgtctgcgagctctcgggaagagacgctgctcagctggcggaggaggcaggattcccggaggtcgccagaatggtccgtgagtctcacggagagacacggtctccagagaacaggagtccaacgcctagcctgcagtactgtgagaattgtgacacccacttccaggatagtaaccatcgaaccagcactgcccatcttctttctctcagtcaaggcccccaacctcccaatctgccactcggcgtgcccatcagcagccctggctttaaacttctgctgagaggtggttgggagcctggaatgggtctgggccccaggggtgagggcagagccaacccaattcccacagtgctgaagagggaccaagaaggcctgggctatcggagcgcaccccagccgcgcgtgacgcacttccccgcttgggatacccgggctgtcgccggtcgcgagcgccctccacgggtggctactctttcctggagagaggaaagacgacgagaagagaaggatagagcctgggagcgagacctgcgcacttatatgaatctggagttttag

SEQ ID NO: 117700 - DNA, 597 bp, synthetic construct
  misc_feature 1..597: note = Description of Artificial Sequence: Synthetic coding sequence
  source 1..597: mol_type = other DNA
atgagccggcccctccttatcacgttcacgcccgctaccgatccgagcgacctgtggaaggacgggcagcagcagccacagccagagaagccagagtcaacactcgatggcgccgccgctcgcgccttctacgaggccctcatcggagatgagagctccgccccagactcgcagagatctcagactgagcccgctcgtgaacgcaagcgtaaaaagcgcaggatcatgaaggcaccagccgccgaggccgtagccgagggggcatcggggcggcatggccaaggcagatccctggaggccgaagataaaatgacacatagaatcttacgtgccgcccaggagggagaccttcctgaacttcgtagactcctagagccccacgaggccggaggcgcgggaggcaacatcaacgcccgagatgcgttttggtggacacctttgatgtgtgcggcgcgggctggtcagggtgccgcggtgtcctatcttctcggcagaggtgccgcttgggtgggcgtctgcgaattgtcaggacgcgacgccgcacaactagctgaggaggccggcttcccagaagtggcgcgtatggtgcgagagtag

SEQ ID NO: 117701 - DNA, 1071 bp, synthetic construct
  misc_feature 1..1071: note = Description of Artificial Sequence: Synthetic coding sequence
  source 1..1071: mol_type = other DNA
atgtcacgccctcttctaatcacattcactcctgccacagatcctagtgatctgtggaaagacggccagcaacagccccagcccgagaaacctgaatctactctggacggcgcagccgccagagccttttacgaggcgttgatcggtgacgagagcagcgctccagatagtcagaggagccaaactgagccagctcgtgaaagaaagcgaaagaagcgacgaattatgaaggccccagccgcagaagctgtggctgagggagcgtcagggcggcacggtcagggtcggtcactggaggccgaagataaaatgacccatcgcattttgagagccgctcaagagggtgacctgcccgagctacgtaggttattagagccccacgaggccgggggcgccggcggcaacattaatgcgcgtgacgcgttttggtggacgcctctcatgtgtgccgcccgtgccggacaaggtgcagctgtctcgtatctgcttggccgcggtgctgcttgggttggcgtgtgtgagctcagcggcagggatgctgcccagctcgctgaggaggccgggtttccagaggtggcccggatggtgagagaaagccatggggaaacccgcagccctgagaatcggtcaccgactcctagcttacagtactgcgagaactgcgacacacattttcaggatagtaaccaccgtacctctacagcacacctgctgtcgctttcccagggccctcagccacctaatctgcctctcggtgtgccaatttcaagtcctggcttcaagctcctgctaagaggaggctgggaacctgggatgggtttaggacctagaggagaaggacgagccaaccctatacctaccgtgctcaaacgggaccaggagggcctaggctaccgtagtgcccctcagcccagagttacccattttccggcctgggatacgcgcgccgtggccggaagggagagacccccaagggtagcaacactgagttggcgggaggaacgccgaagggaagaaaaagacagggcttgggaaagagatctgaggacttacatgaaccttgagttttag

SEQ ID NO: 117702 - DNA, 324 bp, synthetic construct
  misc_feature 1..324: note = Description of Artificial Sequence: Synthetic coding sequence
  source 1..324: mol_type = other DNA
atgtccaggcccctgctcatcactttcaccccagccaccgatcccagcgacctgtggaaagatggccagcagcagccacaacctgaaaaacccgagtcaaccctagacggggcggcggctcgcgctttctatgaggcacttatcggggacgagagcagcgctcctgatagccagaggagccagacagagcctgctagggaaagaaaaaggaagaagaggagaatcatgaaagcacccgctgcagaggccgtggccgaaggcgcctccggcaggcatggtcaaggccgaagtctggaagctgaggataaaatgacccataggtag

SEQ ID NO: 117703 - DNA, 1071 bp, synthetic construct
  misc_feature 1..1071: note = Description of Artificial Sequence: Synthetic coding sequence
  source 1..1071: mol_type = other DNA
atgtcaaggcctctgctgattactttcaccccagcaaccgacccgtccgacctgtggaaggacggccaacagcaaccacagcccgaaaagcccgagagtacactcgatggggccgctgcaagggccttctatgaggcgctcatcggagatgaaagctccgcccccgatagtcagcgttctcaaacggagcctgcacgagagagaaagaggaagaagaggaggattatgaaagcacctgctgctgaggccgtggccgagggagcaagtggaaggcatgggcagggacggagcttggaagccgaagacaagatgacacaccggatcctccgggccgcgcaagagggagatctgccagagcttaggcggctgctcgaaccccatgaggctggtggggccgggggcaacatcaacgctcgggatgcattttggtggacaccattaatgtgtgcagctcgagcaggccagggcgcagccgtatcctacttactcggtcgaggcgctgcatgggttggagtatgcgaactctctggccgggacgccgcacagctggcggaggaggcgggattcccagaggtcgctagaatggttcgggagagtcacggcgagaccaggtcacccgagaataggtcgcccactccctcactacagtactgtgaaaactgcgatacacactttcaggatagcaatcaccggacatcgaccgcacatctcctctccctgtcccagggtccacaaccgcctaatctccccttaggggtccctatctccagtcccgggtttaagttgctcctgaggcggggctgggagcccgggatgggactcggcccaagaggcgagggtagggcaaatccgatccctaccgtcttgaaacgggatcaggaggggctaggatacaggagcgctcctcagcccagagtcacacacttccccgcttgggacactcgcgccgtcgcaggtagggagaggccccctagagtggcaacattgtcctggcgggaagagaggcgccgggaggaaaaagatagggcatgggaacgagatctgagaacgtacatgaatctggaattctag

SEQ ID NO: 117704 - DNA, 324 bp, synthetic construct
  misc_feature 1..324: note = Description of Artificial Sequence: Synthetic coding sequence
  source 1..324: mol_type = other DNA
atgagcaggcctctcctcattaccttcacccccgctaccgatccgagcgacctgtggaaggatggccagcagcagcctcagcctgagaaaccagaaagcaccttggacggagctgccgcccgcgcattttacgaggcgctgatcggtgatgagagcagtgcacctgattcacagcggtcccagactgagccagctcgagaacggaaacgcaagaagagacggatcatgaaggcgcctgccgccgaagccgtggctgagggtgcctcaggaaggcacggacagggaagaagcctcgaggccgaggacaaaatgactcataggtag

SEQ ID NO: 117705 - DNA, 459 bp, synthetic construct
  misc_feature 1..459: note = Description of Artificial Sequence: Synthetic coding sequence
  source 1..459: mol_type = other DNA
atgtcacgcccattactgattaccttcacgcccgctaccgacccctcagatctgtggaaggacgggcaacagcaaccccagcctgaaaaaccagagtccacactcgacggagcagcggccagagccttttatgaagcccttataggcgacgagagtagtgcaccggactcacagagatctcagactgagccggcccgggaacggaaacgtaagaagcggcgcattatgaaagcgcccgccgctgaagctgtggctgaaggggcttctggccgccacgggcagggacggagtcttgaagccgaagacaaaatgacccacagaattctgcgggctgcccaggagggcgatttgccggagctccgtcggttgctggagccccatgaagctgggggcgcaggcggcaacatcaacgccagggacgccttctggtggacacctttgatgtgtgccgctcgctag

SEQ ID NO: 117706 - DNA, 1071 bp, synthetic construct
  misc_feature 1..1071: note = Description of Artificial Sequence: Synthetic coding sequence
  source 1..1071: mol_type = other DNA
atgtcgagacctctcttgattacctttacgcccgcgacagatccatcggacctgtggaaggatggccagcaacaaccacagcctgagaagccagagtcgaccctggatggggctgctgcactagcattttacgaggcactcatcggcgatgagagctcagctccggactcacagaggagtcagacggagccagcccgcgaacggaaaaggaagaagagaaggattatgaaggcaccggctgccgaggcagtggccgagggtgcttcaggacgccatggacagggaaggtccctcgaggctgaggacaaaatgacccatcggattctacgggctgcccaggaaggagaccttcccgaacttaggcgcctcttggagccacacgaagctgggggggctgggggcaatatcaacgcacgggacgcattttggtggactccactgatgtgcgcagccagggcgggccagggagcagccgtcagctatctgttgggacgtggtgccgcatgggtcggggtgtgtgagttgtccggcagggacgctgctcagcttgctgaagaagctgggttcccggaagtggctaggatggtccgtgagagccacggcgaaaccagaagccctgagaaccgatctcctacccctagcttacagtactgcgaaaattgtgatacacactttcaggatagtaaccaccgaacatctacagcacatcttctgtctctttctcaggggccccagccccctaaccttcctctaggcgtgcccatctcgagccccggattcaaattgctcttaagaggcgggtgggaaccagggatggggctgggccctcggggggaaggtagggctaatcctatccctactgtcctgaagcgcgatcaggaggggctgggttatcgttcagccccccaaccaagggtgacccacttcccagcatgggacacaagggccgttgccggccgcgagcgcccaccaagggtggctaccctgagttggagagaggaacggagacgcgaagaaaaagatagagcttgggagagagaccttaggacatacatgaacttggaattctag

SEQ ID NO: 117707 - DNA, 1071 bp, synthetic construct
  misc_feature 1..1071: note = Description of Artificial Sequence: Synthetic coding sequence
  source 1..1071: mol_type = other DNA
atgagccgtccattgttaattacctttacgcccgcgaccgatccttcagatctttggaaggacggacaacaacagccccagcctgaaaagccggaaagcaccctcgacggagctgcagctcttgctttctatgaggcgctgattggcgacgaatctagcgcacctgactcgcaacgcagtcagactgagccagcaagagaacgtaaacgcaagaagcgccgaatcatgaaggcccctgctgccgaggccgtagctgagggcgcatcaggccgacacggccaaggtcgcagcttggaagctgaggataagatgacccatcgcatcctgcgcgccgcccaggagggagatctccccgagctgcgtagactgctggagccccacgaggctgggggggcagggggaaatatcaacgcacgcgatgccttttggtggactcccttgatgtgcgctgcccgtgctggccagggcgctgcagtctcttacctgttaggacggggcgctgcatgggttggtgtctgcgaattgtccggccgggatgctgctcagcttgccgaggaagcagggttcccagaagtagcccggatggtgcgagagtcccatggcgagactaggtcacccgagaacagaagccctaccccttcgcttcagtactgtgagaactgcgatacacacttccaagactccaaccaccgtacctcaaccgcacatctgctgagtttgagccagggcccccagccccccaacctgcctctcggagttcctatttcgagtccgggttttaaactgctcctgagaggagggtgggagcctgggatggggctcggtcctagaggcgagggccgtgccaaccccattcccacagtcctgaagagagatcaggaaggcctcgggtataggagcgctcctcagccccgtgttacccacttccccgcatgggacacccgcgcagtggcggggcgcgaacggcccccccgggtagccactttaagctggcgtgaggagaggaggcgggaagagaaagacagggcatgggagcgagacctcagaacgtacatgaacctcgaattctag

SEQ ID NO: 117708 - DNA, 498 bp, synthetic construct
  misc_feature 1..498: note = Description of Artificial Sequence: Synthetic coding sequence
  source 1..498: mol_type = other DNA
atgagccgtcccttgctgattaccttcacaccagccacagacccatccgacctttggaaggatggccagcagcagcctcagccagaaaagccagaaagtacccttgatggcgcggctgcacgcgccttttatgaggccctcattggagacgagtcaagtgccccagattctcagcgatcacagacggaaccggcaagggagcgcaagcgtaagaagaggcggatcatgaaagctcccgccgcggaggctgtagccgagggagccagtggtcgacacggccagggtcgaagcctcgaggcagaggacaaaatgacacatcgcatattaagagctgcgcaggaaggtgatttgcccgaactgagacgcctgcttgagcctcatgaggctgggggagctggaggaaacattaacgcccgggatgccttttggtggacaccactgatgtgcgccgctcgagccggacaaggggccgcagtatcctacctgctgggcagatag

SEQ ID NO: 117709 - DNA, 273 bp, synthetic construct
  misc_feature 1..273: note = Description of Artificial Sequence: Synthetic coding sequence
  source 1..273: mol_type = other DNA
atgtcccggcctcttctcatcaccttcactcctgcaactgatcctagcgacctgtggaaggatgggcagcagcaaccccagcctgaaaagccagaatccaccttggatggcgccgccgcactagcattctatgaggccttaattggggatgagtcctctgcccccgactcacagcgctcacagactgagcctgctagagagcgcaaaaggaaaaaaaggagaatcatgaaggctcctgcagctgaggccgttgctgaaggagctagtggttag

SEQ ID NO: 117710 - DNA, 1071 bp, synthetic construct
  misc_feature 1..1071: note = Description of Artificial Sequence: Synthetic coding sequence
  source 1..1071: mol_type = other DNA
atgagccgccctctgttgattacattcaccccggccaccgatccatcagatctctggaaggacggacaacaacagccacagcctgagaaacctgagtctactctcgatggagccgccgcgcgtgctttttacgaagccctgatcggtgatgagtcttccgccccagactctcaacgatcccagactgagccagctcgcgaacgaaaaaggaaaaaacgcaggatcatgaaggctcctgctgcagaggccgtcgccgagggggcctccggccgccacggccagggccgttctctggaagcagaggacaaaatgacccaccgcatactgcgcgccgcccaagaaggggacctcccagagctgcgccgtctgctggaaccccacgaggcaggaggcgccggaggcaacatcaatgccagggatgcattctggtggacccccctgatgtgtgccgcccgcgcaggccagggggcagcagtcagctacctgctgggcaggggcgccgcctgggtcggcgtctgtgagctctccggacgggatgcagctcagttggcggaagaggctggctttccggaggtggcccggatggtaagagagtctcatggggagacgaggagcccagaaaatcgatctccaacccctagcctacagtattgtgaaaactgcgatacacacttccaggactccaaccacaggacctctaccgctcatctcctgagtctttctcagggcccccagccgcctaacctaccactgggcgttccaatcagtagccctggcttcaaattgctgctcagaggcgggtgggagccgggaatgggactgggtcctcgcggcgaggggagagctaatcctattccaacagtactgaaacgagaccaggaaggtctcggctatcgcagcgcaccccagcccagggtgacgcacttccctgcctgggacaccagagcggtcgccggtagggagagaccaccccgcgtcgccacactcagctggagggaagagagacggcgcgaggagaaggacagggcatgggagagggatctgagaacttatatgaacctggagttttag

SEQ ID NO: 117711 - DNA, 273 bp, synthetic construct
  misc_feature 1..273: note = Description of Artificial Sequence: Synthetic coding sequence
  source 1..273: mol_type = other DNA
atgtcacgaccacttctcatcaccttcacccctgctacggatccatctgatctgtggaaggacggccaacagcagccacagcccgaaaagcctgagtctaccctggacggagcagctgctcttgctttctacgaggcgttaattggcgacgagagcagcgcgccagactctcaaaggagccaaactgagcctgcccgggagaggaaacgcaaaaaaaggagaattatgaaagcaccagccgcggaagcagttgccgagggtgcttcggggtag

SEQ ID NO: 117712 - DNA, 1071 bp, synthetic construct
  misc_feature 1..1071: note = Description of Artificial Sequence: Synthetic coding sequence
  source 1..1071: mol_type = other DNA
atgtcgcggccactgctcatcacatttacccccgcaaccgatcctagtgatttatggaaggacgggcagcagcagccgcagccagaaaaaccagagtccaccctggatggtgctgctgcccgtgcattttacgaggctttaataggggatgagtcatccgcacccgactcacagcgctcccagaccgagcctgcgagggagcgcaagcggaaaaagcggcgcattatgaaggcaccagcagccgaagccgttgcagagggtgcttcggggcggcatggacagggtagatcccttgaagcagaagataagatgacacatcgaatactgcgcgccgcccaggagggggacctgcccgagctgagacggctgctggagcctcatgaagctggtggcgccggaggaaatattaatgcgagggatgcattttggtggaccccccttatgtgtgccgctcgggctggtcagggagctgccgtgtcttatctgttaggacgcggcgctgcgtgggtgggcgtttgcgagctgagtggccgcgatgccgcgcaactggccgaagaagctggttttcccgaagtggccagaatggtgcgagaaagtcatggggagactcggagcccagagaaccgcagcccaacgcccagcttgcaatattgcgagaactgcgatacccatttccaggactccaatcatagaactagcacagcccatctgctgagtctcagccaggggcctcagccccctaaccttcctctcggggtgccgatttcttctcctggtttcaagctgctgctgagagggggatgggagcccgggatgggcttgggcccccgaggagaaggccgtgccaaccccatccctaccgtgctgaagcgagaccaggagggtctgggctacaggagcgcccctcagcctagggtcacacactttcctgcctgggacactcgggcggtggcgggacgcgagcgacctcctagagtcgctacccttagttggcgggaggagcgccgccgagaagagaaagatcgggcatgggaaagagacctgcgcacttacatgaacctggaattctag

SEQ ID NO: 117713 - DNA, 597 bp, synthetic construct
  misc_feature 1..597: note = Description of Artificial Sequence: Synthetic coding sequence
  source 1..597: mol_type = other DNA
atgtctcgccctctcctgatcactttcactcctgccaccgacccatcggacctttggaaggatggccagcagcagccacagcctgagaaaccggaaagcacacttgatggcgctgctgcacgcgccttctatgaggcgctcattggcgacgagagttctgcacctgactctcaaaggtcccagaccgagccagcaagagagcgtaaacgaaaaaagaggcgcattatgaaggcccccgccgcagaagccgtcgccgagggcgcaagtggaagacatgggcagggcaggtccctggaggcggaggataagatgacccatcgcatcctgcgcgcggcccaggagggcgacctcccagaacttaggcgtctccttgaacctcacgaagccggtggggctggtgggaatattaatgctcgggatgctttttggtggactcccctgatgtgcgctgcccgagccggccaaggggccgcggtgtcctacctgctcggacgtggggccgcgtgggtgggcgtttgcgagttaagtgggagggatgctgctcagcttgcggaggaagccggatttcctgaagtcgccagaatggtgcgtgaatag

SEQ ID NO: 117714 - DNA, 324 bp, synthetic construct
  misc_feature 1..324: note = Description of Artificial Sequence: Synthetic coding sequence
  source 1..324: mol_type = other DNA
atgtcgcggccactgctcattactttcacccccgctacagatccatccgatctgtggaaagacgggcagcagcaaccacagccggagaagcctgagtcaaccctcgacggcgccgccgcattggccttctacgaagcactgataggggacgaaagctctgccccggactcacaacggtcccagacagaacccgcacgcgaaaggaagagaaagaaaaggcggattatgaaggctcccgctgcggaggcggtggcagagggagcctcaggccgacacgggcaaggaaggagcttggaggccgaagacaagatgacgcaccgttag

SEQ ID NO: 117715 - DNA, 324 bp, synthetic construct
  misc_feature 1..324: note = Description of Artificial Sequence: Synthetic coding sequence
  source 1..324: mol_type = other DNA
atgagccgtcctctgttgattacctttacacccgccacggatccctccgatttgtggaaggatggccagcagcagcctcaacctgaaaagcccgagagcactctcgatggagccgctgctctggcgttttatgaggccctgatcggcgatgagtctagcgccccggattctcagagatctcagacggagccagcacgagagcgtaagcgcaaaaaaaggcggatcatgaaggcccctgcagccgaggcggtggccgaaggcgctagcggaaggcacgggcagggtaggtcgctggaagctgaggataaaatgacacacaggtag

SEQ ID NO: 117716 - DNA, 273 bp, synthetic construct
  misc_feature 1..273: note = Description of Artificial Sequence: Synthetic coding sequence
  source 1..273: mol_type = other DNA
atgtctcgccccctgcttataacgttcactcctgcaaccgacccgtccgacctctggaaagatggccagcagcagccacaacccgagaaacctgaaagcacgcttgacggggcagcagcccgggctttttacgaagccctgatcggcgacgaatctagcgcaccagactcccagaggagtcagacagagcctgctagagaaagaaaaaggaagaaacgcagaatcatgaaggcccctgccgctgaagccgttgcagaaggcgcttctgggtag

SEQ ID NO: 117717 - DNA, 273 bp, synthetic construct
  misc_feature 1..273: note = Description of Artificial Sequence: Synthetic coding sequence
  source 1..273: mol_type = other DNA
atgtcacgaccactcttgatcacttttacaccggctactgatccttccgacttgtggaaagacggacagcagcagcctcaaccagaaaaacccgaatccacattagacggagcagccgcccgggccttctatgaggctctgatcggagatgagagctccgccccagactctcagcgtagccagaccgagccagctcgggagaggaaacgtaagaagcgcaggatcatgaaagcaccagccgctgaagcagtggctgagggcgcctcgggttag

SEQ ID NO: 117718 - DNA, 459 bp, synthetic construct
  misc_feature 1..459: note = Description of Artificial Sequence: Synthetic coding sequence
  source 1..459: mol_type = other DNA
atgtcacggcccctcctaatcacattcacacccgcaaccgacccatccgacctgtggaaagacggacaacagcagccacagccggaaaaaccggagtccacactcgatggggctgctgcccgcgctttctatgaggccctgatcggggatgagagctccgcaccagattctcagaggtcgcagacagagccagcacgcgagaggaagaggaagaagagacgaatcatgaaggcccctgctgctgaagcagttgctgaaggcgcatccggccggcatggtcaaggaaggagcctggaggctgaggataaaatgacacaccgtatactgcgtgcagcacaggagggcgacctacccgagctacggaggctattagagccacatgaagccgggggagcaggtggaaacatcaacgcccgagatgctttctggtggaccccactcatgtgtgcggccagatag

SEQ ID NO: 117719 - DNA, 597 bp, synthetic construct
  misc_feature 1..597: note = Description of Artificial Sequence: Synthetic coding sequence
  source 1..597: mol_type = other DNA
atgtcacggccgctactcattacttttactcccgcaaccgatccttcagatctctggaaggatggccagcagcagccccagcccgagaaacccgagtccacactcgatggggccgccgcccgggccttctacgaagctctcatcggagatgagagttctgctcccgattcccagaggagtcagacagagccggcacgcgaacgcaagaggaaaaagagaagaatcatgaaggctccagccgccgaggccgttgcggaaggcgcctcgggaaggcacggccaggggcgaagcctcgaggcggaagacaaaatgacccaccggattctccgcgctgcccaggaaggagatctgcctgaactacgtaggctgctagagccacatgaagccggcggtgcaggcgggaacattaatgcacgcgatgctttctggtggaccccactcatgtgcgccgctagagctggccagggggctgcagtgtcataccttctgggccggggggccgcctgggtgggggtctgtgaactgagcggcagggatgcagctcaattggccgaagaggccgggtttcctgaagtggcgaggatggtcagggagtag

SEQ ID NO: 117720 - DNA, 1071 bp, synthetic construct
  misc_feature 1..1071: note = Description of Artificial Sequence: Synthetic coding sequence
  source 1..1071: mol_type = other DNA
atgtctaggcctctgctgattacctttaccccagcaaccgatccttccgacttgtggaaagatggccagcagcagccacaaccagagaaacccgagtccactttagacggagccgccgctctcgccttctatgaggctctgatcggagacgaatccagtgcacccgattcccagcgatcccagactgaaccggcacgcgagaggaaaaggaagaagaggaggataatgaaagcccccgctgccgaggccgtggccgagggagcttccggaagacacgggcagggccgcagcttggaagccgaggataaaatgactcatcggatcctgcgtgccgcacaggagggggacctccccgaactgcggcggttgctcgagccacatgaggccgggggcgcagggggaaacataaatgctagggatgcattctggtggactccactcatgtgcgctgcgagagccgggcagggagcagcggtgagctatctacttggaaggggcgcagcctgggtgggcgtctgcgaacttagcggacgagacgccgcccagctggccgaagaagccggctttcctgaagtggccaggatggtgagagaaagccatggagaaacacggagtcctgaaaacagatcccctactccatcattgcagtactgcgagaactgtgatacccactttcaggactcaaaccaccgcaccagcactgcacacctgttaagcttgtctcagggcccacagccccccaatctgcctcttggcgtgcctatatcctcaccggggttcaaactactgcttcggggcggttgggagcctggtatgggtttggggccccgcggcgagggacgggccaatcccatccccaccgtactcaaacgcgatcaggagggactggggtaccggtctgccccgcaaccccgggtgacacactttccagcttgggacacccgggccgtggccgggagggaaaggcctcctcgagttgctactttgagttggcgagaggaacggcgaagggaagaaaaagatagagcctgggagcgggatcttaggacttacatgaacttggagttctag

SEQ ID NO: 117721 - DNA, 1071 bp, synthetic construct
  misc_feature 1..1071: note = Description of Artificial Sequence: Synthetic coding sequence
  source 1..1071: mol_type = other DNA
atgtcccgaccgctccttataaccttcacacctgcgaccgaccctagtgacctttggaaagacggacagcagcagccccagcctgagaagccggaaagtaccctggatggagcagccgcacgtgctttctacgaggctctcatcggagatgaaagttcagctccagattctcaaagatcacagacagagcccgccagagaacgtaaacgaaagaaacgcagaattatgaaggctcccgctgcggaggctgttgcggaaggcgcaagtggaaggcacgggcagggtcggagcttagaggctgaggataagatgactcaccgcatccttcgcgccgcccaggagggggatctccccgaactgagacggcttctggaaccacacgaggccggcggagctggtggtaatattaacgccagggacgccttttggtggaccccacttatgtgtgcagctcgtgccggacaaggggccgccgtgagctatttactggggaggggcgccgcctgggtcggagtttgcgagctctcaggccgggacgccgcacagttggctgaggaagccggatttcccgaagttgctagaatggtgcgcgaatcacacggcgaaacacggagccccgagaacagatcccctacaccctccctgcagtactgcgaaaattgtgacacccatttccaggattcaaaccaccggactagtaccgctcacttgctcagcctcagccagggccctcagcctcctaacttgccactcggagtccccataagtagtcccggatttaaacttctgcttagggggggctgggagccagggatgggcctgggcccccgaggggagggcagagctaatcccatccctaccgtcctcaaacgcgaccaggaaggattaggatatcgctccgcccctcagccaagagtcacccattttccggcatgggacacccgggctgtagccggtcgcgagcgtcctcctagagtggccaccctgtcctggagggaggagagacggagggaggagaaagatagggcctgggagagagatctgagaacatatatgaatctggagttttag

SEQ ID NO: 117722 - DNA, 1071 bp, synthetic construct
  misc_feature 1..1071: note = Description of Artificial Sequence: Synthetic coding sequence
  source 1..1071: mol_type = other DNA
atgtctcggccactgctcatcaccttcactcctgcaaccgacccctcagatctgtggaaagatggacagcagcaacctcagcccgagaagcctgagtccacgctagatggggccgcagcccgcgcattttacgaagcgctgattggggacgagagttccgctcccgattcgcaacggagccagactgaacccgctcgcgaaagaaagagaaagaagcgccggatcatgaaggccccagccgctgaagctgtagccgagggtgcttccggacggcatggccagggccgcagccttgaagctgaggataagatgacccacagaatccttcgggctgcgcaggagggtgacctgcccgaactccgccgcttgttggagccacacgaggccggaggtgccggcggcaacatcaacgctcgggatgctttctggtggactccactcatgtgcgctgccagggccggacaaggcgcagctgtgtcttatttgctcggtcgcggcgcggcttgggtcggggtgtgtgaactctcagggcgggacgccgcccagctcgccgaggaggcaggctttcctgaagttgctcggatggttagggaaagccatggcgaaaccagatccccagaaaatagatcccctaccccctccctgcagtattgcgagaattgcgatacccatttccaagactctaatcatcggacttcaactgcccatcttctgtccttaagtcaggggccgcagcctccaaatctgcctttgggcgtcccgatctcctcaccaggttttaaactgctcttgagaggcgggtgggagccggggatgggcttaggcccccgaggcgaaggtagggccaaccctatcccgaccgtcctgaagcgcgatcaggagggactgggatatcggtccgcaccacagccgcgcgtgacccactttccagcatgggacacccgcgcagtggccggacgtgagcgtcctccgcgagtggccaccctgtcttggcgcgaagagcgtagaagggaagaaaaggacagggcctgggagagagacttgcgaacatacatgaatctggagttctag

SEQ ID NO: 117723 - DNA, 498 bp, synthetic construct
  misc_feature 1..498: note = Description of Artificial Sequence: Synthetic coding sequence
  source 1..498: mol_type = other DNA
atgagtaggccgctgctcataaccttcacccccgctacagacccaagtgacctgtggaaggacggccagcagcagccacagcctgagaagccagagtcaaccctggatggcgcggctgctctggcattttatgaagccctgatcggcgatgagtctagtgctcccgactctcagaggtcacagacagaacctgccagagagaggaagcgaaagaaaagacgcattatgaaagctcctgccgcagaggcggttgccgaaggcgccagcggccgacatggacagggaaggtctttggaggctgaggacaagatgacccaccgaattctgagagcagcccaagaaggagacctgccagagctgagacgtctcctggagccccacgaagccggaggggcaggaggtaatatcaatgccagagatgctttttggtggactcccctgatgtgcgcggctcgggccgggcagggagccgccgtgagctatctgttgggcaggtag

SEQ ID NO: 117724 - DNA, 273 bp, synthetic construct
  misc_feature 1..273: note = Description of Artificial Sequence: Synthetic coding sequence
  source 1..273: mol_type = other DNA
atgtcacggccgctgttgatcacctttacaccggcaactgatccgagcgacctgtggaaagacggtcaacagcagcctcagccggagaagccggaatccaccctcgatggggctgcagccagagccttttacgaagccctgataggggatgaatcgagcgctccagatagccagaggtcacagaccgagcctgcacgcgagcgaaagcgcaaaaagcggcgcatcatgaaagcacctgcggctgaggccgtggccgagggcgcttccggctag

SEQ ID NO: 117725 - DNA, 324 bp, synthetic construct
  misc_feature 1..324: note = Description of Artificial Sequence: Synthetic coding sequence
  source 1..324: mol_type = other DNA
atgagccgccctctgctgatcacttttacgcctgctactgatcccagcgatctatggaaggacggacagcagcaaccccaacctgagaagcccgagagcacgctagacggcgccgccgcgcgagcattctacgaggctctgataggtgatgagagtagtgcgccagatagtcagagatcccagacagaaccagctcgtgaaaggaagcgaaaaaagagacgcatcatgaaggctcctgccgccgaggccgtcgcagagggggcaagcggcagacacggacaggggagatcacttgaagccgaggataaaatgacacatcggtag

SEQ ID NO: 117726 - DNA, 1071 bp, synthetic construct
  misc_feature 1..1071: note = Description of Artificial Sequence: Synthetic coding sequence
  source 1..1071: mol_type = other DNA
atgagcagaccactactcataacatttacaccagccaccgatccgagtgacctgtggaaagacggacagcagcagcctcagcctgaaaaaccagagtctactctggacggcgctgccgccagggccttttacgaagcactgataggggacgagtcctccgccccagactcacagcggtctcaaactgagccagctcgggagagaaagcggaagaagaggcgtattatgaaggcgcctgcagccgaagcggtggccgagggtgcttctgggcggcatggacaagggcgctcgctggaggctgaggataagatgactcataggattcttagggctgcccaggaaggcgatctgccggagctgcgccgcttgctggaacctcatgaggcggggggcgcaggaggaaatatcaacgcccgggacgctttttggtggacccccctgatgtgtgcagcacgggctggccagggcgcagctgttagctaccttctcgggcgcggggcagcttgggtgggggtgtgcgagctgtctggacgtgacgctgctcagctggcggaagaggcggggttccctgaagtagcccgcatggtccgagaaagccacggtgaaacacgctcaccggaaaatagaagtccgaccccatctcttcagtattgcgaaaactgcgatacacactttcaagatagcaaccaccggacatccacggctcacctgctttctttatcccagggccctcaaccccccaatctgcctttgggcgttcccattagttcaccaggctttaaattattgctgagaggagggtgggagcctggaatggggctcgggccacgtggagaaggtagagctaatcctattccgacagtcctgaagcgcgatcaggagggcttgggctatagaagcgccccccagccacgggtgacccatttccccgcctgggatactagagccgtggctgggcgggaacgaccaccaagggtagcaaccctaagttggcgggaggaaaggagaagggaggagaaggaccgggcctgggagcgggatctgagaacctacatgaatctcgaattctag

SEQ ID NO: 117727 - DNA, 1071 bp, synthetic construct
  misc_feature 1..1071: note = Description of Artificial Sequence: Synthetic coding sequence
  source 1..1071: mol_type = other DNA
atgtcgcgccctctgctcatcacttttacgcctgctaccgatccttccgatctgtggaaggacggtcagcagcaaccacagccagaaaaaccggaatcaactctcgatggagccgctgccttggccttctatgaggccctgataggtgacgagagctctgcacccgatagccaaagaagccagaccgagcctgcaagagaacggaagcgaaagaaacgccgtatcatgaaggcgccagccgctgaggctgtggccgaaggggcaagtggccgtcatggacaggggcgttctctggaggctgaagacaagatgacccaccgcatcttgagggctgctcaggagggggatctacccgagctgcgacggctcctggaaccccatgaggctggcggcgctggcgggaacatcaacgcacgcgacgcattctggtggacacctttgatgtgcgcagcaagggccgggcaaggcgcagccgtctcatatctcctcggccgcggagcagcctgggtgggggtctgtgaacttagcggtcgggatgctgcgcagttggcagaggaggcaggtttccctgaggtggctcgtatggtgcgcgagtcacacggtgagacccgctctccagaaaaccgctcccccacaccatcactccagtactgtgaaaactgtgatacgcactttcaggactccaaccaccggacttccacggctcatcttttatccctgagccagggcccccagcctcctaacctccccctcggcgttccaatctcctcacccggatttaaactgctgttgcggggcggatgggagcctggcatggggctcggccctcgcggggaaggccgggccaaccctattccgaccgtactgaaacgagatcaggaggggctgggttacagaagcgctccacagccacgtgtgactcatttccctgcttgggacacgcgagcggtggctggacgagaaagaccccctagagtggccactctgtcatggcgcgaagaacgcaggcgggaggaaaaggatcgcgcctgggaaagggatcttcggacatacatgaacctcgagttctag

SEQ ID NO: 117728 - DNA, 1071 bp, synthetic construct
  misc_feature 1..1071: note = Description of Artificial Sequence: Synthetic coding sequence
  source 1..1071: mol_type = other DNA
atgagtcgcccactactcattacttttactccagccaccgacccctcagatctctggaaagacgggcagcagcaaccgcaacccgaaaagcctgagtcaacgttggatggtgcagccgcccttgctttttacgaagcactcattggggatgagtcctccgcccccgattcccagaggtcacaaacagagcctgctagggaaagaaagagaaagaaacgtcgaattatgaaggcacccgccgcggaagcagtcgctgagggggccagcggacgccacggacagggcagaagccttgaggctgaggataagatgacacaccggatcctccgcgctgcccaagagggagacctgccagagctgcgccgactgctcgagccacatgaggcaggaggagccggcgggaatattaacgcccgggacgccttttggtggacccctctgatgtgcgccgcacgagccggccagggcgccgccgtgtcttacctgctggggcgcggtgccgcctgggtgggggtgtgtgaactcagcggacgcgacgctgctcagctggccgaagaagcagggttcccggaggttgcacgaatggtccgtgaaagccacggagagactaggtcaccagagaatcgctcccctactccttcgctccagtactgtgaaaattgtgacactcactttcaggattccaaccatagaaccagtacagcccatttgctgtctctaagccagggcccccagcctccaaacctgccgctcggagttccaattagttcacctggttttaaactgttactacgggggggatgggagccgggcatgggacttgggcctagaggggagggcagggctaatccaatcccaacagtcttgaagagagaccaggaggggctggggtacagatcagcaccacaacccagagtgacacactttccagcgtgggacacgagggccgtggctggacgcgagcgcccaccacgcgttgccaccttaagctggagagaagagcgcagacgagaggaaaaagaccgagcctgggagagagacttgcgaacttacatgaatctcgaattttag

SEQ ID NO: 117729 - DNA, 273 bp, synthetic construct
  misc_feature 1..273: note = Description of Artificial Sequence: Synthetic coding sequence
  source 1..273: mol_type = other DNA
atgagcagaccccttctgatcactttcacacctgccacagacccctcagatttgtggaaggacggccagcagcagcctcagccagaaaaaccagagtctactcttgatggtgcagccgccagagccttttatgaagctttgatcggcgatgagtcaagcgcaccagacagccagcgatcccagacagagccagcacgggagcggaagcggaagaaaaggcggatcatgaaagctcccgccgccgaagccgtggccgaaggcgcatcgggatag

SEQ ID NO: 117730 - DNA, 1071 bp, synthetic construct
  misc_feature 1..1071: note = Description of Artificial Sequence: Synthetic coding sequence
  source 1..1071: mol_type = other DNA
atgtctcgacctttactgatcacctttacgcccgctaccgacccttccgacctatggaaagatggtcagcaacagcctcaacctgaaaaaccggaatccacactcgatggcgccgccgcgttagccttttatgaggccttaatcggagatgaatcttctgcacccgacagtcaaaggtcccaaactgagcctgcccgtgagcgaaaaaggaaaaagcggcggataatgaaagcacccgccgcagaggctgttgctgagggcgcatctggaagacatggccaaggtcggagtctcgaggcagaagacaagatgacacaccgcattctcagagctgctcaggaaggcgatctccccgagttaaggagactgctggagccccacgaggccggaggagcagggggcaatattaatgctagggacgccttctggtggacgcctctgatgtgtgctgcccgggcgggccaaggggccgccgtatcctatttgctaggtagaggggccgcctgggtgggcgtgtgtgagctgtccggcagagacgccgctcaattggcggaagaggcaggattccccgaagtggcccggatggtccgggaatcccacggggagacacgcagccccgaaaaccggagtccgacgcctagcctccagtactgcgagaactgtgatacccattttcaagacagtaatcatcggaccagtacagctcacttgttgtccctcagtcaaggacctcagccaccgaacttgccactgggggtgcccatttcttctcctggctttaagctgttactgcggggcggttgggaacccggcatgggactgggaccccgcggcgagggccgggccaacccgattccaacagtattgaaacgggaccaggaaggcctcgggtatcgatctgccccccagcccagagtgacccactttcccgcttgggatacccgggccgtagcagggagagaaagacctcccagagttgcaaccttatcctggcgcgaagaacgaagaagagaggagaaggatagagcctgggagagagaccttagaacctacatgaaccttgagttctag

SEQ ID NO: 117731 - DNA, 498 bp, synthetic construct
  misc_feature 1..498: note = Description of Artificial Sequence: Synthetic coding sequence
  source 1..498: mol_type = other DNA
atgtcgagaccacttctgattacttttacaccagccacggatccgtccgatctgtggaaagatggtcaacaacaaccgcaacccgaaaagcctgagtccaccctggacggggcagccgcacgggccttctacgaggctctgatcggagacgaatctagtgcaccagattcccagcgcagccagaccgagccagctcgagaacggaagcgaaaaaagcgccggatcatgaaagccccagccgccgaggcagtggctgaaggagcatctggacgtcatggccaaggtcggtcattggaggctgaggacaaaatgacccacaggatattgcgtgcggctcaggaaggagacctgccagagctccgccgcttactggagcctcacgaggctggcggagctggtgggaatatcaatgccagagatgccttctggtggaccccactgatgtgcgcagcaagagccgggcagggagctgccgtgtcttacctcctcggccggtag

SEQ ID NO: 117732 - DNA, 459 bp, synthetic construct
  misc_feature 1..459: note = Description of Artificial Sequence: Synthetic coding sequence
  source 1..459: mol_type = other DNA
atgtctcgccccctgctgatcactttcacgcccgcaactgaccctagtgacctgtggaaggacggccagcaacagcctcagcccgaaaagcctgaatctaccctggatggggcagcagctcgcgccttctatgaggctttaatcggagacgagtcgagtgcacccgacagtcagaggtctcagacagaacccgcccgtgagaggaagagaaagaagcggagaatcatgaaggcacccgctgcagaagccgtggcagagggtgcttccggaaggcatggacaagggaggtcattagaagcggaagacaagatgactcatcggatcctccgagccgctcaggaaggcgacctgcccgaactccgtaggctactcgagccacacgaggctggcggcgcgggcgggaatattaacgcgcgagatgccttttggtggactcctctgatgtgcgcagccagatag

SEQ ID NO: 117733 - DNA, 4509 bp, synthetic construct
  misc_feature 1..4509: note = Description of Artificial Sequence: Synthetic coding sequence
  source 1..4509: mol_type = other DNA
atggctgaccgtttttcacggtttaacgaggacagagacttccaggggaaccattttgaccagtatgaggaggggcacctggaaatcgaacaagctagtttggataagccgattgaaagcgataacattgggcaccggctgctgcaaaaacatggatggaagcttggccagggactggggaagtctctgcagggcagaactgatccgatccctatcgtggtgaaatacgacgtgatgggcatgggcaggatggaaatggagcttgattacgctgaagatgcaacagaacgccggcgagttctggaggtggagaaggaggatacagaagagctcagacagaagtacaaggattacgtggacaaggagaaggccatcgcgaaagccctcgaggatctccgtgccaacttttactgcgaattgtgtgataaacagtatcagaagcaccaggaatttgataaccatattaactcttatgatcacgcacataagcagcgcctgaaggacctgaaacaaagagaatttgctagaaatgtgtcttcccggtcacgaaaggatgagaaaaaacaggaaaaagcactgagacgtctccatgagttggctgaacaacgaaagcaggccgaatgtgcccccggatccggccctatgttcaaacccacgactgtggctgtggatgaggaagggggcgaggacgacaaggatgaatcagctactaactctgggaccggcgcaaccgcgtcctgtgggctcgggagcgaattctccacggacaaggggggcccctttactgctgttcaaatcactaacaccactgggctggcacaggcccccggattagcctcgcaggggatctccttcgggatcaaaaacaacctcggtactcccctgcagaagcttggcgtttcgttcagcttcgccaaaaaggctccagtgaaattggagagtatcgctagcgtcttcaaagatcacgcagaggagggcactagtgaggacggaactaagcctgacgaaaaaagtagtgatcaggggctgcagaaggtcggggacagcgatggatcatccaatttggatggaaagaaggaggacgaggacccccaggatggtggctcgctcgccagtacactttcaaaactcaaacgcatgaaacgcgaagaaggcgccggagccaccgagcccgaatactaccactatattcctcccgctcactgtaaagtaaaaccaaacttcccgttcctgttatttatgagagcatctgagcagatggacggcgataacactacccatcccaagaatgcgcctgagagtaagaaagggagcagtcccaagcccaagtcttgcattaaggccgcagcatctcaaggagcggagaaaaccgtaagcgaagtctcagagcaacctaaagaaacgtccatgacagagccatccgaacccgggtctaaagcagaagccaagaaggcactgggtggggacgtgtctgatcagagcctcgagagccactctcaaaaggtctctgaaacgcagatgtgtgaatctaattcttctaaagaaacctccctcgctacgccagccggtaaggagtcgcaggagggccccaagcacccaacaggaccattcttccccgtcctctcaaaggacgagagtactgctctgcagtggccttcagaacttctcattttcaccaaggccgagccttctattagctattcctgtaaccctctgtattttgacttcaagctttcacggaacaaggatgcaaggaccaaggggactgaaaagcccaaggatatcggctctagtagtaaggatcacctccaggggctggatccgggagagcctaacaagagtaaggaggtgggcggagaaaaaatagtaagaagctccggcggaagaatggacgccccagcttctggaagtgcctgctctggccttaacaagcaggaaccagggggctctcatggatcagaaactgaagacactggacggagcctgccatctaaaaaggaacgatccggtaagtctcacaggcacaagaagaagaagaaacataaaaagtcgagcaagcataagcggaagcacaaggcggataccgaagagaaaagcagcaaggctgaaagcggcgagaagtctaaaaagcgcaagaagagaaagagaaaaaaaaacaaatctagcgcacctgctgactcagagaggggaccgaagccagagccaccaggatccgggagtccagcccccccccggcgacggcgccgcgcacaggatgactcacagcggcggtctctgcccgccgaagaaggatcctccggtaaaaaggatgaaggcgggggaggtagcagcagtcaagaccacggcggccggaaacataagggcgagctgcctccgagttcctgccagcgccgcgccggcactaagaggtcctcccgctctagtcacaggtcccagccatccagcggcgacgaagattcagacgacgccagctcccataggttgcaccagaagagcccttcccagtatagcgaggaggaggaggaagaagacagtggtagtgaacactccagatcaagaagccggagtggacggcgtcactcctcacatcgctctagtcgtaggagctactccagtagttcggacgcttctagcgatcagtcttgttactctcgacagcgcagctattccgatgattcatacagcgactacagcgaccggagccggaggcactcaaagcggagccatgactcagacgactcggattatgcctctagcaaacatcgaagtaaacgccataaatattccagttctgacgatgactattccctatcctgttcgcagtcacggtcaagatcacgctctcatacaagagaaagatctaggtctcgcggccgctccagatcctccagttgttctaggtctagaagcaaacgtagaagtagaagcaccactgctcattcttggcagaggtctcggtcttactctcgcgacaggtcccggtccacacgcagtcccagccagcggagcggctcacgcaaaaggtcctggggacacgagtctccggaagagcgtcacagcggtagacgggatttcatccgatcaaaaatctatcgatcccagagcccacactatttccggtccggccggggggaaggtccaggtaagaaagatgatgggaggggcgatgactccaaggccacaggccccccatcgcagaatagcaatatcggaacaggccgaggaagtgaaggcgactgctcacccgaggacaagaacagcgttacagcaaagctgctgctcgagaaaatccagagcaggaaggtagagagaaagccaagtgttagcgaggaggtgcaagcaactcctaataaagcaggtcccaaattgaaggatcctccgcagggctacttcggaccaaagctgccgccgagcctgggaaacaagcctgttctaccgctgatcgggaagctgccagctacgaggaagcctaataagaaatgtgaggagtctggactggagcgcggtgaggagcaagagcagagtgagacagaggagggaccccctggcagctcagacgcgctcttcggccatcaatttccatctgaggagactacaggacccctgctggatcctccaccagaagagtctaaatcaggagaagctacggcagaccacccggtcgcaccattgggtacgccggcccacagtgactgctacccaggggacccaactatctcccacaactacctccctgatccctctgatggcgacactctggagtccctcgattcatcttcacaacctggaccggtggaatctagtttgctcccaattgcaccagatcttgaacacttcccaagttatgccccaccatccggagatcctagcatcgagtctacagacggagcggaggacgcctcacttgccccgcttgagagccagccaatcactttcacgcccgaagagatggaaaaatactccaagctccagcaggctgcccagcagcatatacaacagcagcttctcgctaagcaggtcaaggcattccccgcttctgcagctctggcaccagccacaccagctttgcagcctatccacatacagcagccagctaccgcatccgctacctcaatcaccaccgtgcaacatgctatcctgcagcatcacgctgccgcggcagccgcggcaatcggaattcacccccacccccaccctcagcctttggcccaagtgcatcacattcctcagccacatctcaccccaatttcactctcccaccttacacattccatcatccccggacaccccgcaacattcctcgcctcacacccaattcacataatcccggcttctgctatacatccaggacctttcaccttccatccagtgccacacgcagcattgtacccaaccctcctcgccccacgcccggctgctgccgctgctaccgccctccacctgcacccccttctgcacccaatttttagtggccaggacttacaacacccacctagccacgggacctag

SEQ ID NO: 117734 - DNA, 4275 bp, synthetic construct
  misc_feature 1..4275: note = Description of Artificial Sequence: Synthetic coding sequence
  source 1..4275: mol_type = other DNA
atgggaatgggccggatggagatggaactcgattacgcagaagatgcgaccgagcgtagacgcgtcctggaggttgaaaaggaagatactgaggaactgcgacaaaaatacaaagattatgtggataaggaaaaggcaattgcgaaagctttagaggatctgcgtgctaatttttactgcgaactttgtgacaagcagtaccagaagcatcaagagtttgataaccatataaactcttatgatcacgctcacaagcaacgcttaaaggatttgaagcagcgagagttcgcgcgcaacgtatcaagccgaagtcgtaaggatgagaaaaaacaggagaaggccctgagacgcttgcacgagcttgccgaacaaaggaagcaagccgaatgcgcccctgggtcagggccgatgttcaagccgaccaccgtggctgtcgatgaagaaggcggcgaagatgacaaggacgagtccgctaccaacagcggcaccggcgcgaccgctagctgcggcctcggttccgagttttcgacagacaaaggcggcccttttacagcagtgcagataacgaatacaactggactcgcccaggcgcccgggttggcctcccaggggatctccttcgggattaagaataatttaggaaccccgctccaaaaactcggagtatccttttcttttgcgaagaaagctcctgtcaagctggagagcatcgcctctgtcttcaaagatcatgctgaagagggaacgagcgaagacggtacgaaaccagatgaaaaatccagcgaccagggattgcagaaggttggagactccgacgggtcatctaacctggatggcaagaaagaggatgaggatccccaagacgggggctcactggccagcacgcttagtaagctcaagcgaatgaagagggaggagggggctggggcgacagagccggaatactaccattatattcctcccgcccactgcaaagtcaagccaaacttcccattcctactgtttatgagggcgtctgagcagatggatggcgataatacaacccatcccaaaaatgcccccgaatcaaaaaagggcagctcacctaagccaaaatcctgcatcaaggcagcagctagtcagggcgcagagaaaacagtttccgaagtgagcgaacagcccaaagaaacatccatgacagagccgtctgagccagggtccaaggcggaggctaagaaggcactggggggtgacgtctcagatcaatccctggaaagtcactcacaaaaagtgtcagagacacagatgtgcgagagcaactccagcaaggagacttccctggccaccccagccggcaaggagagccaggagggccccaaacacccgacgggcccattctttcccgtgctgagtaaggacgagtcaaccgctcttcaatggccctctgagctgcttatcttcaccaaagctgagcccagcatttcatactcatgtaatcccctctattttgatttcaaactcagtagaaacaaagacgctcggacgaagggcaccgagaagcctaaagacatcggatcatcatccaaagaccacctgcaggggctcgacccaggagagcccaacaagagcaaggaggtgggtggagagaagattgtcagatcgtctggaggccgaatggacgccccggcttcaggcagcgcatgttctgggttgaacaagcaagagccaggcgggagccacgggtccgaaacggaggacaccggtcgtagcctgcctagcaagaaggagaggtcaggtaaatctcacaggcataaaaagaagaagaagcataagaaaagcagtaaacataaaagaaagcacaaggccgataccgaggagaaatccagcaaagcggaaagcggagagaagtccaagaaaagaaagaagaggaaacggaagaagaacaagagttctgctccggccgatagcgaacgcggccctaagcccgagccgcccggatccgggtccccagccccacccaggagaaggaggagagcccaagatgattcacagaggcgttccctgccggcggaagaggggtcatctggcaagaaagatgagggcgggggcggtagcagcagccaagaccacgggggccgaaaacataagggcgaactcccaccctccagctgccagcgcagagctgggaccaaacgttcctccaggtcaagtcaccgctctcaaccaagctctggcgatgaagacagcgatgatgccagctcccatcgcttgcatcagaagtctccctcccagtattccgaggaagaagaagaagaggactctggcagtgagcacagcagaagtcggagcagatccggccgccggcactcatcccatagaagctcacgtaggtcctattcttcgagctccgacgcgtcgtcggaccagagttgttatagtcgccagagaagttactcagacgacagttactcagattacagcgaccggagccgtcgacattccaaacgctctcacgattcagacgatagtgattacgcctcctccaaacaccgcagcaagagacacaaatattcgtcatctgatgatgattattccttaagttgcagccagagtaggtctaggagcagatcacataccagagagcggagtcgtagtcgtggacggtcgagaagcagttcatgttccaggtcgaggtctaagcgccggtctagatctactactgcgcactcctggcaaagaagcaggagctattctcgtgaccggtcgagatccacacgttcaccctctcagaggtccgggtctaggaaacgttcatggggacacgagtcaccggaggagcggcactcaggccggagggatttcatccgctctaagatttaccgaagccagtcaccacactactttcggtcaggacggggcgagggaccaggcaagaaggacgacgggcggggagatgacagcaaggcaaccggacccccatctcagaacagtaacattggcactgggaggggttccgaaggggactgctcgccagaggacaaaaattccgtcaccgcgaagctgctgttggaaaagatccagtcccgaaaggtggaaaggaagccatctgtgagcgaggaagtgcaggccacgccaaataaagccggccccaaactgaaagatcccccacagggttactttgggcccaagctgcccccctcgctcggtaacaagccagtcctccctctgataggaaagttgcccgctactcgcaagccaaataaaaagtgtgaggagtccggcctagagcgcggggaggagcaggagcaatccgagactgaggaggggcctccgggttcctccgacgcattgtttggacatcagttcccctcggaggagaccacgggccccctgttggatcccccccctgaggaaagcaagagcggagaggccactgctgatcatcccgtggcccctctgggtacgccggctcattccgattgttaccccggtgaccctacaattagccataactatttaccagatccaagtgatggagacacactggaatctttagactcatcctctcagcctggcccggtggagtcctcactgttgccaattgcccccgacctggagcacttccccagttacgctccaccatccggggacccctcaattgaatccaccgatggggccgaggacgccagccttgccccacttgagagccagcccattacgtttactcccgaggaaatggaaaaatatagtaaattacagcaggctgctcagcaacatattcagcagcagcttctggccaagcaagtcaaagcattcccagctagtgcggcactggccccggccactcccgccctgcagcccattcacatccagcaacccgcaacagcctcagccacctccatcactacggtgcagcatgcgatacttcagcatcatgcggccgccgccgccgctgctattggtatccacccccacccccatccccagcccctggcgcaggtgcaccatattcctcaacctcacttgaccccaatttccttgtctcatttgactcactcaataatccccggccacccagccactttccttgccagtcacccgatccatatcatcccggcctctgcgattcaccccgggccatttacattccaccctgtcccccacgctgctttatatccaactcttttggccccccgacctgccgcggccgccgctacggccctgcacttacatccccttctgcatcccatcttctccggtcaggacctacaacacccccccagccatggcacatag

SEQ ID NO: 117735 - DNA, 132 bp, synthetic construct
  misc_feature 1..132: note = Description of Artificial Sequence: Synthetic coding sequence
  source 1..132: mol_type = other DNA
atggccgatcgcttcagtaggtttaatgaggacagggactttcaagggaaccactttgatcagtacgaagagggccatcttgagattgaacaggccagtctggataagccaattgaaagcagttgcttttag

SEQ ID NO: 117736 - DNA, 4509 bp, synthetic construct
  misc_feature 1..4509: note = Description of Artificial Sequence: Synthetic coding sequence
  source 1..4509: mol_type = other DNA
atggctgatcggttttccaggttcaacgaggatcgcgacttccagggcaaccattttgatcagtatgaggaaggccaccttgaaattgagcaagcctctctcgacaaaccaattgagtcagataacatcggacatcgacttttgcaaaaacacggttggaaattaggacaaggcctgggtaagagtcttcagggtcgaacggaccctatccccattgtagtgaaatatgatgttatggggatggggcggatggagatggagctggattacgctgaggacgccacggagcgtcggagagtgctagaagtggaaaaggaggacactgaggaactgaggcagaaatacaaagattacgtggataaagaaaaagcgatcgctaaggcattagaggacctgcgggcaaatttctactgcgaactatgtgacaaacagtaccagaagcatcaagagtttgataaccatattaattcttacgaccacgctcataaacagagactgaaagatctgaagcagagggagttcgcacgtaacgtttcatcaaggtcccgcaaagacgaaaagaagcaggagaaggcactacggcgcttacatgagttggccgagcagagaaaacaagctgaatgtgctcccggctcagggcctatgttcaagcccacaaccgtggccgttgatgaggaggggggagaggatgacaaagacgaaagcgccaccaactccggaacaggtgcaacagctagctgcggtctgggcagtgagttctcaacggacaaaggcggtccatttacagccgtgcaaataactaacactaccggcctagcccaggctccgggattagccagtcagggaatatccttcggaatcaagaataacctggggactcccctccaaaagctgggcgtgtctttttcatttgccaaaaaggccccggtgaagctggagtctatcgcttccgtgttcaaagatcacgccgaagaaggcaccagtgaagatgggaccaaacccgacgaaaagtcctccgatcaaggactgcagaaagtgggggacagcgacggaagttcaaacctcgacggcaagaaggaggatgaagaccctcaagacggtgggtccctcgctagtactctgtccaagcttaaaaggatgaagagagaagagggggctggcgccacggagccggaatattaccattatatccctcccgcacactgtaaagtgaagcccaatttcccttttctgctcttcatgcgggcctccgaacaaatggacggcgacaataccacgcaccccaagaatgcacccgaatcgaaaaaaggctcatccccaaaaccaaaatcctgcattaaggcagcagcctctcaaggagctgagaagacggtcagtgaagtgagcgaacaacccaaagagacctccatgacagagccaagcgaacctggttccaaagctgaggctaagaaggctttagggggggatgtgagcgaccagagcctggagagccactcacaaaaagtgagtgagacgcagatgtgcgaaagcaatagctccaaagaaacctctcttgccacccccgcaggaaaagagtcacaagaaggacctaagcatccaacggggcccttctttcctgttctgagtaaggatgaaagcactgccctgcagtggccctccgagcttctaatttttaccaaggcagaaccctccatttcctattcatgcaacccactgtacttcgatttcaaactctcacggaataaagacgctcgcactaagggaactgagaagccgaaagacataggttcttcaagtaaggaccacctgcagggactagatcctggcgaacctaacaagagtaaggaggtagggggagaaaagattgtgcgaagtagcggaggccgcatggatgcaccagcttctggcagcgcttgttccggactcaacaaacaggagccaggcggcagccacggtagtgaaactgaagacaccgggagaagcctgccctctaaaaaggaacgaagcggcaaatctcacaggcacaagaagaagaaaaaacacaaaaagtccagcaaacacaaaagaaaacacaaggctgacaccgaggaaaaaagttctaaagccgagagtggcgagaagtccaaaaagaggaaaaaaaggaagagaaagaaaaataaaagttcagctcccgcagattccgagagaggcccgaagccagaacctcctgggtctgggtctcccgccccaccccgcagaagaaggcgcgcacaagacgactcacagcgtcgttccctccccgcggaggaaggctcatcaggtaaaaaagatgaggggggtggcggaagcagtagccaggaccatggcggccgtaagcataagggtgagctcccaccctcctcttgccagaggcgtgccggcaccaagcgaagctccaggagtagccaccgttcccagcctagttccggcgatgaggacagcgatgatgcctcttcgcatcgcctccaccagaagagcccctcccagtattccgaagaggaggaagaagaagattctggatccgaacacagcagatctcggtctcgctctggcaggcgtcactcgtcacaccgatcatcacgtcggagctactctagtagttccgacgcgtcctccgaccagtcttgctatagccggcagcgatcgtacagcgacgattcttacagcgattatagtgaccgctctaggagacattcaaaaagatctcacgacagtgatgattctgattacgcctcctccaagcaccgctccaaacggcacaagtatagctcttcagatgatgactattcactcagttgctcacagagtaggtctagatcaagatcacatactcgagagcgtagcagaagtaggggccggtccaggtcatcctcatgctctagaagcaggagcaagcgcagatcccgctcaactactgcgcattcgtggcaaaggagtcggtcgtactcaagggatcgaagcaggtccactaggtcaccgtcccaacgatctggaagtcgaaaacgttcatggggccacgagtctccagaggagcgccattctgggcggagagactttatccggagtaagatatatcgcagccagtcaccacactacttccgctctggcaggggggagggaccaggtaaaaaagacgacggccgtggcgatgatagcaaggctactggacccccctcccaaaactccaacattggaaccgggcgagggtcagagggcgactgcagccccgaggacaaaaactccgtaactgccaaattgttactggagaaaatacagagtagaaaggtggaacggaagccatccgttagcgaggaagtccaggctaccccgaataaggcaggccctaaactcaaggacccgcctcaggggtatttcggccctaaactgcctcctagcctgggaaacaagccagtgcttcccctgattggcaaactcccagcaacacgtaaacccaacaagaaatgtgaggaatcagggcttgaacgaggggaagaacaggaacaatccgaaacagaggagggtcccccagggtccagcgacgccctgttcgggcatcaattcccaagtgaggaaaccaccggacccctattagacccacccccagaagaaagtaaatccggtgaagccaccgccgaccacccagtggctccccttggcacccctgcacatagcgactgttaccccggggatccgaccatttcccataattacctccctgacccctcggacggcgacaccctggagtctctcgattcttccagccaaccaggcccggtcgagtcatcactgctccctatcgcccccgacctggaacactttccatcttacgctcctcccagcggggatcccagtatcgaatccaccgatggcgctgaggatgcatctctggctcctctggaatcccagccgattacttttacccctgaagagatggagaaatatagcaagctgcagcaggccgctcagcagcacatccagcagcaactattggcgaaacaggtgaaggcttttccagcaagtgcagctctggcaccggctacgcccgcgttgcagccaattcacattcagcagccagctaccgcttctgctaccagtatcactacagtccagcatgctatcctgcaacaccatgcagctgcagctgccgcggccattggcattcaccctcacccacaccctcagcccttggcgcaggtacatcatataccgcaacctcacttgacaccaatcagtttaagccacctgacccacagtatcatcccagggcaccctgccaccttcctggcctctcaccccatccatatcatacccgcatccgccattcacccgggacccttcacctttcaccccgtgccgcatgccgccctctacccgaccctcctggcaccccgccctgccgccgctgcagccaccgccttgcatcttcaccccttgttgcatcctatattctcaggccaagacctgcagcacccgcccagtcacgggacgtag

SEQ ID NO: 117737 - DNA, 1476 bp, synthetic construct
  misc_feature 1..1476: note = Description of Artificial Sequence: Synthetic coding sequence
  source 1..1476: mol_type = other DNA
atgccattacctgtgcaggtctttaacctgcaaggtgccgtggaacccatgcagatcgatgtggatccacaagaagaccctcagaatgcacccgatgtcaactatgtggtggagaacccctccctggacctggaacagtatgctgcaagttactctgggctgatgaggatcgagcggctgcagttcattgccgatcactgccctactctgagagtcgaagccctgaaaatggcgttatcatttgtgcagagaacatttaacgtggatatgtacgaagagatccatcgcaagctttctgaggcaacaagatcatccctaagagaattgcaaaacgccccagacgctatccctgagtcaggcgtcgagccacctgctctggatacagcgtgggtcgaggccactcgaaaaaaagccctcttgaaactggagaaattggatactgacctcaagaactataaaggcaattctataaaagagtctatccggagaggccacgatgaccttggcgaccattacttggattgtggcgatttgagtaatgctctcaagtgctactctcgcgccagggactattgtacatccgccaaacacgtgattaatatgtgcttgaatgttattaaagtgtcagtctacctccagaactggtcccacgttctgtcgtacgtctcgaaggctgagagcactcccgagattgctgagcagaggggtgaacgcgattctcaaacccaggccatcctgaccaaactgaagtgcgcggccggacttgccgaactggccgcacggaagtataagcaggccgccaagtgcctcctcttagccagctttgaccactgcgatttcccagaactgctctccccgagtaacgtcgccatctatggagggttgtgcgccctggctacctttgatagacaggaactacagagaaatgttatcagttccagttcatttaagcttttcctggaacttgagccccaggttcgcgacattattttcaaattctacgagagtaaatatgcctcatgtctgaaaatgctagacgaaatgaaggacaacctcctcctcgatatgtatctggccccccatgtgaggactctgtacactcagatacggaatagggccttgattcagtacttctccccttacgtaagtgcagacatgcacagaatggctgctgcctttaacactaccgtggctgctcttgaggatgaactgacccaactaatcctcgaaggcttaatatccgcccgagtcgacagccacagcaagatcttatacgccagggatgtcgatcagcgtagtaccacgttcgagaagagcttgctgatggggaaggaatttcagagaagagctaaagccatgatgttgagagctgccgtcctcaggaaccaaatccatgtcaaatccccgcccagagagggctcccagggcgagttaacccccgcaaacagtcagtcacgcatgtccaccaacatgtag

SEQ ID NO: 117738 - DNA, 1653 bp, synthetic construct
  misc_feature 1..1653: note = Description of Artificial Sequence: Synthetic coding sequence
  source 1..1653: mol_type = other DNA
atgcccctgcccgtgcaggtgtttaatctacagcagccggcgtccagcgttagcggatccggcggagctgagtctcaggatcggatgcgggatagctctgcgcctagctcggcgagctcatcggtcacagatctgtactgcacaccacatagctcacggagcgacctcgttctgccaggcaccgccggagatttctcattatccgctagcctttccgcctgcacgctgctgtacgagggcgcagtcgagcctatgcagattgacgtagacccacaggaagaccctcagaacgcccccgatgccattcccgagagcggcgtagagccccccgcactggatactgcatgggtggaagccaccaggaagaaagccctgctcaaacttgaaaaattggacactgatcttaagaattacaagggcaacagtatcaaagagtcaatcagacgaggacacgacgatctcggcgatcattaccttgactgtggagacctgtctaacgctctcaagtgttactcacgtgctcgcgactactgcactagcgcgaaacatgtcattaacatgtgcctcaatgtcattaaggtgagcgtctatctgcagaactggtcccatgtacttagctacgtgagtaaggcagagtccacccctgaaatcgctgaacagcggggtgagagagatagccagacccaggctatcctgaccaagcttaaatgcgctgcaggcttggcggagcttgcggcgaggaaatacaaacaggctgccaagtgtctccttctggcaagcttcgaccactgtgactttcccgaactgctcagcccaagcaacgtggctatatacggcgggctgtgtgctctcgccacctttgatcggcaggaacttcagagaaacgtcatctcatcctcatcctttaaactgttcctcgaattggaacctcaggtcagagatatcatatttaaattttatgagagtaaatatgcctcctgccttaaaatgctagatgaaatgaaggataatctattgctcgacatgtatctcgccccccatgtacgcaccttgtacacgcaaatacggaacagggctctcatccaatacttcagcccctacgtcagcgccgatatgcaccggatggccgctgcattcaataccacggtggcggcacttgaagatgaacttacgcagcttattctggaaggactcatctctgcccgtgtggacagccactccaaaatcctgtatgcccgggatgttgatcagcgcagcacaacttttgaaaagtcacttttgatgggcaaggagttccagagacgcgctaaagccatgatgctgcgggcggcggtgctgcggaaccagatccacgttaaacccttgcccacgtcgacagacctggggccccccggaggttccgtgttgccagcagctcagctgagagggctggcaacgggttgtcacccggcctgcgtgccctccctggggcttaggcgacaggcagcagcctcctgtggtccttcttggaaggagcgccctgccggtctagatcccgtgggattttgcccacagggcgccgactgtgccgcgccacgcccttccggcaccataagtcagactccgccagtcccagcttcagtgagatgtagacaggtcggaggagtccattag

SEQ ID NO: 117739 - DNA, 1584 bp, synthetic construct
  misc_feature 1..1584: note = Description of Artificial Sequence: Synthetic coding sequence
  source 1..1584: mol_type = other DNA
atgcgtgacagtagtgctcctagttcagcctccagctccgttaccgatctgtattgtacccctcattcctcaagaagcgacctggtgttgcctggaacagccggggatttctccttgagcgcaagcctgagcgcttgcactctgttgtacgagggtgccgtggaacccatgcagatcgacgttgacccccaggaagacccacagaatgcccccgacgtgaattacgtggtcgagaacccatctcttgatctcgagcaatacgctgcatcctacagtggactgatgaggattgaaaggttacagtttattgcggaccactgccccactctccgcgtggaggctctgaaaatggcactctctttcgttcaacgcacctttaacgtggatatgtatgaggagattcaccgaaagctctccgaggccactagagagctacagaacgcccctgatgccattcccgaatccggagtggagccccctgcccttgacacagcctgggtcgaggcaacaagaaagaaggcactgcttaaacttgagaagctggatacagatctgaaaaactacaagggcaactcaatcaaagagtcaattcgacgcggccacgacgatctgggcgaccactatctggactgcggtgacctttctaacgcgctgaaatgctacagccgggccagggactactgtacgagcgctaagcacgtcataaatatgtgcttgaatgtgattaaagtgtcggtgtacctgcaaaactggtctcatgtgctatcgtatgtgagtaaggcagagtccactcccgagatcgcagagcagcgcggggaaagggatagccagacccaggccattctcacaaaactgaaatgtgcagccggtttagcggagctcgcagctcgaaaatataagcaggcagctaagtgtctacttttggcttcctttgatcactgcgacttccccgagttgctgtctccaagcaatgttgccatttacggaggcctgtgtgccctagccacttttgacagacaggaactccagagaaatgtcatttccagttcatcattcaaactgtttcttgaactggagccgcaggtgcgggacattatcttcaagttttacgagagcaagtatgccagctgtctcaagatgcttgatgaaatgaaggataacctcttgctggatatgtatttagctccccatgtacggacgctgtatactcagattaggaatcgcgctttgattcagtactttagtccttatgtatcagccgacatgcatagaatggcagctgcgttcaacaccacagtggccgccttggaagacgaattgacccagctgattctggagggtctcatatccgcaagggtggacagccattcaaaaattttgtacgcccgggacgtcgatcagcgatctactacatttgaaaagagcctcctgatgggcaaagaattccagcgtcgagccaaagctatgatgctgcgagcagcggtgttaagaaaccagatccacgttaaaagcccccccagagagggtagtcagggagagctgacccctgccaacagccaatctaggatgtctaccaacatgtag

SEQ ID NO: 117740 - DNA, 855 bp, synthetic construct
  misc_feature 1..855: note = Description of Artificial Sequence: Synthetic coding sequence
  source 1..855: mol_type = other DNA
ggccagccagaaataggaggctttctgccttcgtccctagctcccgttaccgctgcaatcctgatggcacgcagttctttacgtgagctgcagaatgccccagacgcgatccccgaatccggagttgaacctcccgccctggacaccgcatgggttgaggccacacggaagaaagccctgctgaagcttgaaaaacttgataccgatttgaagaactacaaaggtaactccattaaggaatctatccgaaggggtcatgatgacttgggggaccactacctggactgcggcgacctttctaatgccctcaaatgctactcacgtgccagggattactgcacgagtgccaaacacgtgatcaacatgtgcctcaacgtcataaaggtcagcgtataccttcagaattggagccatgtgctctcctacgtctccaaagccgaatcgaccccagaaatcgctgaggtgagagccacttctagtgagaccctgccccctggattcctgacgaccgccggccccagctgccccccgccgccgcacagcccacctgatctgaacctgccttcatctccactgagtctaggagctgggcatagggctttgggaaatgtcgagcatggccctcacgcttgtgggttcctcctgcagcaacggggagagagagactctcagacgcaagctatcctgaccaaactgaaatgtgccgccggagaaggtctcggccatgcccaactgacacccagatcccccgttgccaagagcagtcagcctcgcgccgtcggctggtccctgccacagcccggaaagacatcattagcggggcgtcgtatgctgtgggctcatgtccaggtgtag

SEQ ID NO: 117741 - DNA, 1584 bp, synthetic construct
  misc_feature 1..1584: note = Description of Artificial Sequence: Synthetic coding sequence
  source 1..1584: mol_type = other DNA
atgagggattcctcggctcccagctcagcctcctctagtgtgactgatctttactgcactcctcattcgtcaagatctgacctagtgctgcctggaaccgctggcgatttctctctctcagcaagcctcagcgcgtgcaccctgctgtacgaaggtgctgtggagcctatgcaaatcgatgtagatcctcaagaagatccacagaatgctccagacgtgaattacgtggtggagaacccatcactcgacttagaacagtatgccgccagttacagcgggctgatgcgcatcgagcggcttcagtttattgccgaccactgcccaaccctccgagtagaagccctaaagatggctctgtcttttgtgcaacggacatttaatgtggacatgtacgaagagatccatcgtaaattgtccgaggccacgagggaacttcagaacgctccagacgctatcccagagtcaggagttgagccgcctgccctggatacagcctgggttgaggccaccagaaagaaagccttattaaaattagagaagctggacacggatctgaaaaattacaaaggcaacagcatcaaggaaagcattcgccggggccatgacgatctcggagaccattatctagactgtggcgacctgtccaacgcacttaaatgctatagccgtgcccgagactattgcacttcagcgaagcacgtaattaatatgtgcttgaacgtgattaaagtgtctgtctacctgcaaaattggtctcacgtgttgagctatgtctcgaaggctgagagcactcctgagattgctgaacagcggggggaacgcgattcgcagacacaggccatcctgaccaagcttaagtgtgccgcaggactcgccgagttggctgccagaaaatataaacaggcggcaaaatgtctgcttctggctagcttcgaccactgtgatttccctgagctgttgtccccaagcaacgttgcaatctatggagggctgtgtgccctagctacatttgataggcaggaactccaaagaaatgtcatctcctcctcgtccttcaagctttttctcgagctcgagcctcaggtaagggacatcatctttaagttctatgagagcaagtacgcctcatgcctgaaaatgttagatgagatgaaggacaaccttctgctggacatgtatttggccccccacgtcaggacattgtacacacagataaggaatcgagccctgatccagtatttttcaccctatgtgtccgcagacatgcatagaatggcagcagcctttaacactacggtggcagcgctggaggacgaactaacacaactcatcctcgagggattgatttccgccagagtcgatagccactcaaaaattctctatgctagagatgtggaccagagatctaccaccttcgaaaaatcgcttctcatgggaaaggaattccagaggcgggccaaggcgatgatgttacgcgcggctgtcctgagaaatcagatacatgtaaaatccccaccacgggaaggatcccagggagagcttacccccgccaacagccagtctcgcatgtcaactaacatgtag

SEQ ID NO: 117742 - DNA, 993 bp, synthetic construct
  misc_feature 1..993: note = Description of Artificial Sequence: Synthetic coding sequence
  source 1..993: mol_type = other DNA
atgactcccaactcaacaggcgaagtcccgtcccccataccaaaaggggccctgggactgtcgcttgctttggcctccctgattatcacggctaatctccttcttgctctgggaattgcctgggatcgaagactacggtccccccccgcaggatgcttcttcctgagtttgctgctggctggcctcctgaccggcttggcccttcctacgttacccggtctttggaaccagtcacggagaggttactggtcttgtctactcgtgtacttagccccgaacttctccttcctctcactgttggcaaatcttctgctggtgcatggtgaaagatatatggccgttctacgtccactccagccccccgggagtatcagattggccttgctgctgacttgggcaggtcctctattgttcgcctctctccccgcacttggatggaaccattggacacccggcgcgaattgcagttctcaggcgatctttcctgctccttacctgtacctggaggtgtatggcctgctcttaccagccgtcggcgccgccgccttcctgtctgtgcgggttctggccacagcgcataggcagttgcaggatatatgtagactggagcgagccgtgtgtagagacgaaccgagcgcattggccagggcccttacctggcgacaggcccgcgctcaggcaggcgccatgctgctcttcggcctttgctggggaccgtatgtggcaacactgctgctttccgttttggcttacgaacagaggccaccactagggcccgggaccctcctgtccctgctttcgctgggaagcgcctccgccgccgcagtacccgttgccatgggactgggggatcagcgatatactgcaccctggcgggctgccgcacaaaggtgccttcaggggctctgggggagagccagtcgcgacagcccagggcccagcatcgcctatcatcctagctcgcagtcttccgtggacttggaccttaactag

SEQ ID NO: 117743 - DNA, 993 bp, synthetic construct
  misc_feature 1..993: note = Description of Artificial Sequence: Synthetic coding sequence
  source 1..993: mol_type = other DNA
atgaccccgaattccacgggggaggtgccatctccaatcccaaagggcgccctggggctcagcttggccttggcgagcttgatcataactgctaacctcctgcttgcattgggcattgcttgggaccggaggctgagaagccctcctgccgggtgcttctttctatccctgctcctggctggcctactcacaggtcttgccctgcccaccttacctggcctgtggaaccaatccaggaggggttactggagctgccttctcgtgtatttagctcctaacttctcttttctgtcattgctcgcaaaccttctcctagtgcacggggaaaggtacatggcagtcctacggcctctccagcctccaggctccatacgacttgccctcctgctcacctgggctggccctctcttgtttgcttcccttcccgctttaggatggaatcactggacacctggtgccaattgctcgagccaggcaatatttcccgctccgtacctgtacctggaagtgtacggtctgttactccctgctgtgggcgctgcagcctttcttagtgtgagggtgctagcgaccgctcatcgacagcttcaggacatctgccgccttgaaagagcagtttgtcgggatgagccctctgctctcgcccgcgcccttacgtggcgacaggctagagctcaagccggggcgatgctgctgtttggattatgctgggggccctatgtggccactcttctgctcagcgtcttggcttacgagcagcggcctccactcggcccaggaactttacttagccttctctcactaggcagtgcgtccgctgctgcagtgccagtggcaatgggccttggggaccagcggtataccgcaccatggagggccgctgctcagcgctgcctccaagggctttggggtcgggcaagtagagactcccctggaccctcaatcgcttatcaccctagctctcaatcttctgtggatctggatttgaactag

SEQ ID NO: 117744 - DNA, 993 bp, synthetic construct
  misc_feature 1..993: note = Description of Artificial Sequence: Synthetic coding sequence
  source 1..993: mol_type = other DNA
atgactcccaactccaccggcgaggtgcccagtcctatccctaaaggcgccctgggcttatctctcgccctagcttccctcattatcacagctaacttactgctggcactagggatagcctgggacaggcggctaagatcccctccagcaggttgtttcttcctgtcactgctgcttgcaggactgctgactgggttagctttgcctacgctgccaggactttggaatcagtcgagacgcggctattggtcatgcctgttggtatacttggccccaaatttctctttcctgtccctgttggcaaatctattgctggttcatggtgagcggtacatggctgtgctccgccccttacagccaccaggctctatcagactggccctcttactcacatgggctggacccctgctgtttgcctcacttcccgctctgggctggaaccattggaccccgggagcgaactgttcaagccaggctatcttcccagctccatacctctaccttgaggtctatggtctcctcttgccggccgtcggagctgcagcattcctgtctgtgagggttctcgcaacagctcaccgccagctgcaagacatttgtcgcctcgagagagccgtgtgccgggacgagcccagtgccctggctcgagctctgacctggaggcaagcaagagcgcaggcaggcgcaatgctgttgttcggcctgtgctggggcccctatgtcgcgacccttctccttagcgtactggcatacgagcagaggcctcccctgggtccgggcaccctcctgtccctgttaagcttgggctcagcatcagccgccgccgttccagtcgccatgggccttggagatcagagatatactgcaccctggcgcgcagctgcacaaagatgtctccaaggtctgtggggcagggcttcgcgagactcccctggcccgtctatcgcctaccaccctagttcacagtcttctgtggatttggatctaaactag

SEQ ID NO: 117745 - DNA, 993 bp, synthetic construct
  misc_feature 1..993: note = Description of Artificial Sequence: Synthetic coding sequence
  source 1..993: mol_type = other DNA
atgacgcctaacagcaccggagaggttccaagtcctatcccaaaaggggctctagggctctcactggccctggcgtccttgatcatcacagccaacctgttgctggccctcggtatagcttgggatcggcgccttagaagcccccctgcaggatgcttttttctgtccctgctcttggccggtcttctcaccggattagctttaccaacattacccggactttggaatcaatctcggcgcggttactggtcatgtctactagtctaccttgcccccaatttttccttcctgagcctcctagccaatctactgctagtgcatggtgagcgatacatggcggtcctgcgccccctacaaccgccaggatcaattcgactggccttattgctgacgtgggcagggccgctgctctttgctagtctgcccgctctcggatggaaccactggaccccgggggccaattgctcaagtcaggccatattcccagccccctacctttacctggaggtgtacgggctgctcctgcccgctgtaggcgccgcggcgtttctgtccgttagagttctcgctaccgcccaccgccagctgcaggatatctgtcgactcgagagggccgtctgtagagacgagcctagcgcccttgcaagagctcttacttggcgccaggcacgcgcacaggctggagccatgctcctgttcggactctgttggggcccttatgttgctactctccttctgtcggtgctggcttatgagcaacgaccacctctgggccctgggactttgctctccttgctttctctgggatccgccagcgcagcagcggtgcccgtggctatgggcttgggcgaccagcgatacactgcgccttggcgagcggctgcccaaagatgcctccagggactctggggtagggcgagcagagatagtcctgggccttctatcgcatatcatccaagttcacagtcttcggtggaccttgacctgaactag

SEQ ID NO: 117746 - DNA, 1128 bp, synthetic construct
  misc_feature 1..1128: note = Description of Artificial Sequence: Synthetic coding sequence
  source 1..1128: mol_type = other DNA
atggacgtgacttctcaagctcggggagtcggcctggagatgtaccctgggacagcccaacccgccgcccccaataccacctcaccagaactaaacttatcccatcccttactcgggaccgccctggcgaatgggactggggagctctccgaacaccaacagtacgtgatcggactctttctcagttgtctttatacaattttcctcttccccatcgggttcgtgggcaacatcctgattctggtcgtgaacatctcattcagagagaaaatgaccattccagatttgtattttataaaccttgccgtcgcagatttgatactggtggccgacagtctcatcgaagtgttcaatctgcacgagaggtattatgatatcgcggtgctgtgcacattcatgagtttatttctgcaagtgaacatgtatagcagtgtttttttccttacctggatgtcttttgacaggtacattgccctggcaagagccatgaggtgctccctgttccgaactaaacaccatgctcgactctcttgcggcctgatatggatggcctcagtcagtgcgaccctggtgccttttacagccgtccatctgcagcacactgacgaggcttgcttttgttttgccgatgtcagagaggtgcagtggctagaagtcactttgggttttattgttccatttgctatcattggactctgttattccctgatcgtccgcgtgcttgtgagagcacatcgccatcgtggcctgagaccacgccgccagaaggctctcagaatgatactggccgtcgtgttggtctttttcgtctgctggctgccggaaaatgtatttatctctgtgcatttattgcaaaggacccagcctggtgccgcaccatgtaaacagtccttcagacacgcgcacccgttgactgggcacatagtgaatctggctgctttcagtaacagttgcctcaatccactgatttactcttttcttggagaaaccttccgggataaacttcgcctatacatcgagcagaagacgaatttaccagccctaaatcggttttgccatgcagcattgaaggccgtcattcccgattcaactgagcaatctgatgtgcgcttctctagtgctgtgtag

SEQ ID NO: 117747 - DNA, 531 bp, synthetic construct
  misc_feature 1..531: note = Description of Artificial Sequence: Synthetic coding sequence
  source 1..531: mol_type = other DNA
atgtccttaaactgcgggcaaatgtggctcctggccccccggggcctggccagagtgacgcttgcatggtcaccatggggatgtctcggcaatctgacaacggggcatttggccctcttgacacaaaattgttacaacccaaaggctctcgcgccacaaggccccaaggcctcaggcgaccagcctgtaacccagttgctaccagcaaacccagcctgccggtgtacctgcctccccctgcaagaaacgttcctctctgttctgcaccttcctgggtggcaacagtggcggtgtgcggcttcaccggggcccagaggagctgcagctctagggcccgagcagcaagaggggccatctgttgaacgcccaccctccgcacctggctggttttctcattgcctgctaacatccacttggcagcttcacagctgcggtcttgggccctgcgagcttccttgtggactagtgggatgtcaggacaatgaaatcttacagcatttgtggttgacaaatctgttcctccaaaagtag

SEQ ID NO: 117748 - DNA, 1128 bp, synthetic construct
  misc_feature 1..1128: note = Description of Artificial Sequence: Synthetic coding sequence
  source 1..1128: mol_type = other DNA
atggatgttacatcccaggccaggggagtgggcctggaaatgtatccaggtacagcccagcctgcagcccctaatactacatctcccgagctgaatctctcacacccactcctcggaactgctttagcaaacggcactggggaattgtctgaacaccagcagtacgttatcgggttgtttctgtcctgtctgtataccatttttctgttccccatcgggtttgttgggaatatcctgatcctggtagtgaacatctcatttagagaaaagatgactatcccagacctgtattttatcaatttggccgtcgctgaccttattctcgttgccgactcacttatcgaggtatttaatctgcatgaaagatattatgacatcgccgtgctttgcacctttatgagcctgtttctgcaggtcaacatgtactcctcggttttctttttaacatggatgagcttcgatagatatattgccctcgcacgcgccatgcgatgctcactgttcaggacgaagcaccacgcccggctgtcttgtggcctaatctggatggccagtgttagcgccaccctggtaccatttacggctgtacacttgcaacacacagatgaagcttgcttttgcttcgctgatgtgcgagaggtacagtggcttgaggtcactctgggtttcattgtgccgtttgccatcatcgggctgtgttatagccttatagtccgagtgttggtcagagcccaccgacatcggggtcttcgaccccgcagacagaaggcactgaggatgattctggccgtggttcttgtcttcttcgtctgttggttgcccgaaaacgtatttatctccgtacatttgctgcagaggacccagcccggggctgccccttgcaagcagtctttccgccacgctcacccactgacggggcacatcgtcaatttggctgcattttccaacagctgtctgaaccccctgatttactcctttctgggagaaacctttagagacaaattgcggctgtacatagaacagaagaccaacctccccgcacttaatcggttctgccacgctgcacttaaggcggtaatcccggatagcaccgagcagagtgacgtcaggttctcatccgctgtctag

SEQ ID NO: 117749 - DNA, 1128 bp, synthetic construct
  misc_feature 1..1128: note = Description of Artificial Sequence: Synthetic coding sequence
  source 1..1128: mol_type = other DNA
atggatgtgacaagccaggccaggggtgtcggccttgaaatgtacccgggcacagcacaacccgccgcccctaataccacctctcctgagttaaatctgagccaccctttgctggggacagcactcgcgaacggtaccggggagctatctgagcaccagcagtatgtgattgggctttttctgtcttgtctgtatactatctttctgtttcctatcggcttcgtgggcaacatcctgatcttggtggtgaatatttctttccgggaaaagatgacaatccccgatttatattttataaatctggctgttgctgacctgattctggtcgcagattcactcatagaggtgtttaacctccacgagcgctattacgacatagctgtcctgtgcacgttcatgagcctattcctgcaggtgaacatgtatagtagtgtgttctttttgacctggatgtctttcgaccggtacattgccctcgcacgcgccatgaggtgctcgctcttcagaacgaagcatcatgctaggttgagctgcggtttaatttggatggcgagcgtgtcagctaccttagttccattcacagccgtgcacctgcagcataccgacgaagcctgcttttgtttcgcagacgtgcgggaagtccagtggctggaagtgacgctgggctttatcgtgccttttgcaattatcggcttgtgctattcactgatcgttcgcgtcctggtgagagctcacagacatcggggactacgaccacggcggcaaaaggccctgcgtatgattctagctgtcgtgcttgtattctttgtgtgctggctgccagaaaacgtgtttatttctgttcacctgctgcagcgcacacagcccggagccgcaccctgcaaacagagctttaggcacgcccatccacttactgggcacattgtgaacctggctgcattttccaatagctgcctgaatccgttgatatacagctttttaggtgaaaccttcagggacaaactccgactgtatattgaacaaaaaaccaatttgcctgctctgaatcggttctgtcatgccgcactcaaggccgtgattcctgactcaactgaacagagtgatgtacgcttctcttcggctgtatag

SEQ ID NO: 117750 - DNA, 1128 bp, synthetic construct
  misc_feature 1..1128: note = Description of Artificial Sequence: Synthetic coding sequence
  source 1..1128: mol_type = other DNA
atggacgtaacatcacaggccaggggggtcggcctggagatgtatcctggaactgcccagccggcggcccctaatacaacatccccggagctgaatctctctcaccccttgttgggcacagcgctggccaacggcacaggtgagctgagcgaacaccagcagtatgtcattgggctgttcctgagttgcttatacacaatcttcttattccccattggatttgtgggaaacatcttgattttggtcgtgaatatatctttcagggagaagatgactatcccagacctgtacttcatcaacctggcagttgctgacctaattctcgtagcagacagcctcatagaagtgtttaacctccatgagcgctattacgatattgcggtgctctgcactttcatgagcctctttttacaagtgaacatgtactcctccgtatttttcttgacttggatgagcttcgatagatatattgccctcgcaagggcgatgagatgtagcctgttccggaccaaacatcatgcaaggctgagctgtgggctaatctggatggcctcagtctctgctactctcgttccttttactgctgttcacttgcaacacacagatgaagcctgtttttgttttgccgatgtgcgggaggtgcaatggttggaggttaccttagggtttatcgtgccgtttgccataatcgggctctgctattctctgattgtgagagtgcttgtgcgagcgcaccgccatcgagggctgaggcctaggcgacagaaggcgctgcgaatgattctcgccgttgttctggttttctttgtatgttggctgccagagaatgtattcatttctgtccatctccttcaaagaactcagccaggtgctgccccatgcaaacaatcgtttagacacgcacatcccttgacaggacacatcgtaaatctggccgccttttcaaactcttgcctaaaccccctgatctacagctttctgggagagacctttagagacaaactcaggctgtatattgagcagaaaacaaatctgccagccctgaatagattctgccacgctgccctgaaggctgtgatcccggattcaactgaacagtctgatgtcaggtttagctcagcagtgtag

SEQ ID NO: 117751 - DNA, 222 bp, synthetic construct
  misc_feature 1..222: note = Description of Artificial Sequence: Synthetic coding sequence
  source 1..222: mol_type = other DNA
atggacgtgacttcccaggcacggggggtggggttagagatgtaccctggaaccgcccagcccgcggcacccaacaccacctctccagaactcaatctctcacatccgttactggggacagctctggccaacggtacaggagagctctcagaacaccaacagtatgtcattggcctgttcctttcctgcctttatactatcttcctgttcccaattgggtag

SEQ ID NO: 117752 - DNA, 1227 bp, synthetic construct
  misc_feature 1..1227: note = Description of Artificial Sequence: Synthetic coding sequence
  source 1..1227: mol_type = other DNA
atggacgtgaccagtcaagctcggggagtgggcctcgaaatgtatccgggaaccgcccagcccgccgccccaaataccacctctcccgagctgaacctgtcccaccctctcttagggactgcacttgccaatggcactggggagctgagtgagcaccagcagtatgtgattggcctcttcctgagctgtctctataccatcttccttttcccaataggtttcgtcggcaacatcctgattctggtcgttaacatatcttttagagaaaagatgaccatcccagacctgtatttcatcaacttggccgtcgcagatctcatcctggtggccgatagcctaatcgaggtcttcaatctgcacgaacgctactatgacatagctgttctctgtaccttcatgtccctgttcttacaggtgaacatgtattctagcgtcttcttcctcacttggatgtcattcgacagatacatcgcactggcacgggccatgaggtgctccctgtttcgaactaaacaccacgcccgtttgtcttgcggactaatctggatggccagtgtatcagctaccctggtaccctttacagcagtacacttgcagcacactgacgaagcttgcttttgtttcgctgacgtcagagaagttcaatggcttgaagtcacacttggtttcatcgtcccattcgccattatcgggctgtgctacagcctgatcgtcagggtcttggtacgggctcaccggcatcgcggtctcagaccacgacgacagaaagccttgagaatgatactggcggtcgtgctagttttctttgtttgctggctgcccgaaaacgtgtttatctccgttcatcttttacagagaacccaaccaggcgcagctccatgtaagcaatcttttcgtcatgctcaccctttgacacatggccacgtgatgtcgttgaactgtggtcagatgtggctcctggctcccaggggactggcacgcgtgaccctcgcctggagcccatggggatgtcttggtaacctgactaccggacacctagcactactcacccaaaattgttacaaccctaaagcactggctccacagggccccaaagccagcggcgaccagccagtcacacaattgcttccagccaacccagcgtgtaggtgtacgtgtctgcccttgcaggagacattcctgactccttccacgcggaaggcaacacggcgaggacattgtgggtag

SEQ ID NO: 117753 - DNA, 1068 bp, synthetic construct
  misc_feature 1..1068: note = Description of Artificial Sequence: Synthetic coding sequence
  source 1..1068: mol_type = other DNA
atggaagacttggaggagacgttgtttgaggaatttgaaaactatagttacgatctggattactacagtttggagagcgatctggaggaaaaagtacaattgggggtcgtgcattgggtctcgctggtcctgtattgtctggcattcgttctgggcatcccaggaaacgcaattgtcatatggtttactgggtttaagtggaaaaaaaccgtgacaacactgtggttcctaaatctggcaatcgccgattttatcttcctgttatttctacctctgtacatttcatatgtagccatgaatttccactggcccttcggcatctggctatgcaaggcaaactctttcactgcccagcttaatatgttcgcatcggtgtttttcttgaccgtgatttcactagatcactatatccacttaatccacccagtccttagccatcgccatagaacccttaagaactccctgatcgtaatcatcttcatttggctgctggcctctcttattggcggtccagccctctacttcagggacaccgtggaattcaataatcataccctgtgttacaacaattttcaaaagcacgatcccgatctgaccctgatacgccatcacgtccttacatgggtgaagttcataatcggatatctttttccattgttgacaatgtccatctgctacctgtgcctgatatttaaggtgaagaaaagatctatcttgatctctagcagacatttttggactatcctggtcgtggtggtcgcattcgtcgtgtgctggaccccatatcacctgttcagcatctgggagctgacaattcaccacaactcttactcccaccacgtgatgcaggctgggatcccactgagcacgggacttgcttttctgaactcttgtcttaacccgatactttacgtgttaatttccaagaagttccaggctagattccgctcctctgtcgcggaaatcctcaaatacactctttgggaggtgagctgctcggggacagtgtctgagcaattgcggaatagtgagacaaagaatctgtgtcttttagagaccgcgcagtag

SEQ ID NO: 117754 - DNA, 225 bp, synthetic construct
  misc_feature 1..225: note = Description of Artificial Sequence: Synthetic coding sequence
  source 1..225: mol_type = other DNA
atggaggatttggaggaaactctcttcgaagagttcgagaactactcttatgacctggactactactcattagagtctgatctcgaagagaaggtacagctgggcgtcgtccactgggttagtttagtcttgtattgtctggctttcgtgctgggaatcccagggaacgccattgtgatctggtttacaggatttaagtggaagaaaacagtaacaacactgtag

SEQ ID NO: 117755 - DNA, 1068 bp, synthetic construct
  misc_feature 1..1068: note = Description of Artificial Sequence: Synthetic coding sequence
  source 1..1068: mol_type = other DNA
atggaagacctggaggagaccctcttcgaggagtttgaaaactactcctatgatttagactattattcgttggagtctgacctggaggaaaaggttcagttgggcgtggtccactgggtgagcctggtgctctattgcctcgcatttgttctcggtattcctggtaatgcaattgtcatatggttcaccgggtttaaatggaaaaaaaccgtgactacattatggtttctgaacctcgccattgccgatttcatcttcttgctgtttctccccctgtacattagctacgtcgctatgaacttccactggccctttgggatttggctctgcaaggccaactcttttaccgcccagctaaatatgttcgccagcgtcttctttctgactgtgatcagtttggatcactacatccatctcatccatcctgtcctgtcccacagacatcgcacattgaaaaatagtctgatcgttatcattttcatctggctcctcgcctctctgatcggcggcccggctctgtacttcagggatacagtggaattcaacaaccacaccctctgctataacaatttccagaagcatgacccagacctgacccttatccggcaccacgtgctgacttgggtcaagtttatcatagggtatttgtttcccctcctgacaatgagtatctgttacctgtgtctcattttcaaggttaagaaaaggagtattctgatttctagtcggcacttttggacaattttggtggttgtggtggcgtttgttgtgtgttggactccttaccacttgttttccatctgggaattaaccattcatcacaactcctactctcatcacgttatgcaggccggaatccccttgagcacgggtctcgcttttctcaactcatgcctcaacccaatcctctatgtcctgatctcaaaaaaattccaggcacgttttcggagctcagtggccgagatactgaaatacacgctgtgggaagtgagttgctccggcaccgtcagcgagcagctcagaaatagcgaaacaaagaatttgtgcctactcgagacagcccagtag

SEQ ID NO: 117756 - DNA, 249 bp, synthetic construct
  misc_feature 1..249: note = Description of Artificial Sequence: Synthetic coding sequence
  source 1..249: mol_type = other DNA
atggaagatctggaagagacgctgttcgaggaattcgagaattattcctatgatctcgattattacagtcttgaatccgacttagaggaaaaggtccagctaggcgtcgtgcattgggtgagtctcgttctctactgccttgcttttgtgctagggattcctggcaatgctattgttatttggtttacagggttcaagtggaagaagacagtcactacattgtggtttctaaatcttgctatcgcatag

SEQ ID NO: 117757 - DNA, 684 bp, synthetic construct
  misc_feature 1..684: note = Description of Artificial Sequence: Synthetic coding sequence
  source 1..684: mol_type = other DNA
atggaggacctggaagagactttatttgaagagttcgagaattattcgtacgaccttgattactacagtttagaatccgaccttgaggaaaaggttcagctgggggtggtgcactgggtgagtctagtcctgtattgcctcgccttcgtcctgggaatccctggaaatgcgattgtgatctggtttactggtttcaagtggaaaaagacagtcactactctgtggtttcttaatttggccattgccgactttattttccttctgtttctgcctctgtacatctcctacgtggctatgaacttccactggcctttcggtatttggctatgcaaggcaaatagttttactgcccagctcaacatgtttgcctcagtgttctttctgacagtgatctcactcgaccactacattcacctgatccaccccgtactcagccaccgtcaccggacattgaagaattctctgattgtaatcatcttcatctggcttttggctagtctcataggagggcccgcactgtattttcgagataccgtagagttcaataaccatacgctctgttataataattttcaaaagcatgacccagatttaactcttattcggcatcacgtcctgacgtgggttaaattcataatcggataccttttcccattgctgaccatgagcatctgctacctgtag

SEQ ID NO: 117758 - DNA, 414 bp, synthetic construct
  misc_feature 1..414: note = Description of Artificial Sequence: Synthetic coding sequence
  source 1..414: mol_type = other DNA
atggaggatcttgaagagacccttttcgaagaattcgagaattactcctacgatctcgactactacagcctagaaagtgatctggaggagaaggtacaactcggggtagttcactgggtgagcctggtgctctactgtctagccttcgtccttggcattcccgggaacgcaatcgttatctggttcacagggtttaagtggaagaagaccgtgacgactctctggttcctgaatttggcaatagctgacttcatcttccttctgttcctgcctctctatatttcgtacgtggccatgaacttccactggcctttcggaatctggttgtgtaaagctaattcatttaccgcccaactgaacatgttcgctagcgtgttcttcttgactgtcatctcacttgaccattacatctag

SEQ ID NO: 117759 - DNA, 537 bp, synthetic construct
  misc_feature 1..537: note = Description of Artificial Sequence: Synthetic coding sequence
  source 1..537: mol_type = other DNA
atggaggatctagaagaaacgcttttcgaagaattcgagaattactcttacgatctggactactactctttagagtccgacctggaagaaaaggtacagctgggggtggtgcactgggtgagcctggtgctgtattgcttggcttttgtgctaggcatcccaggcaacgccatcgtgatctggtttaccggctttaaatggaaaaagacagtgacaaccctgtggttcctcaacctggccatcgcggattttatttttctgctgtttctccccctatatatcagctacgtggccatgaacttccactggccattcgggatttggctttgtaaagcaaacagctttactgctcagctcaatatgttcgcgagtgtcttctttttaactgtgattagccttgatcactacattcatctaattcatcccgttttgagtcatcggcaccgcaccctcaagaactctttgattgtaataatctttatctggctgctggcaagccttatcggcggtcctgcattgtacttccgggatacctag

SEQ ID NO: 117760 - DNA, 60 bp, synthetic construct
  misc_feature 1..60: note = Description of Artificial Sequence: Synthetic coding sequence
  source 1..60: mol_type = other DNA
atggaagatttggaggaaaccttattcgaagagtttgaaaactatagctatgatttgtag

SEQ ID NO: 117761 - DNA, 1527 bp, synthetic construct
  misc_feature 1..1527: note = Description of Artificial Sequence: Synthetic coding sequence
  source 1..1527: mol_type = other DNA
atgacctctacctgcaccaacagcacaagagagtccaacagtagccatacatgtatgcctctctcaaagatgccaatcagcctggcccacggtattatacggagtacagttttggtaatatttttggctgcctcctttgtggggaatattgtcctggcgcttgtcttgcagcgaaagccccagctgttgcaggttactaatcgcttcatttttaatctgcttgttaccgaccttctgcagatcagccttgtggccccttgggtggtcgccactagcgttcccctgttctggccactcaatagccacttctgtacagctcttgttagcctcacgcatctcttcgcattcgccagcgtgaatacaattgtcgtggtgagcgtcgatcgctatttatcaataattcaccctctgtcctacccaagtaaaatgacccagcgccggggctacctcctcctgtatggaacctggattgtggcaatcttgcagtccacccccccgctgtatggctggggtcaggcagcatttgacgaacggaatgccctgtgctctatgatttggggggcctctccctcttatactatcctcagcgtcgtgtcttttattgttataccattaatagtaatgattgcatgttacagtgtcgtgttttgcgctgcccggcggcaacacgccctgttatacaatgttaagaggcattctttggaggtcagagtaaaagactgcgtggagaacgaagatgaggagggagccgagaagaaggaagagttccaggatgagtccgaattccgcaggcagcatgagggtgaggtgaaggccaaggagggccgcatggaggcaaaagatgggtctttgaaggcgaaagaggggagtaccggtacttcagagagttctgtcgaggcccgcggttctgaggaagtgcgggaaagcagcaccgtagccagtgacggctctatggaagggaaggaaggctcgaccaaggtggaggaaaacagcatgaaagccgacaagggcaggacggaggtgaatcagtgttctatcgatctgggcgaagacgacatggaattcggggaagacgacatcaatttctctgaagacgatgtggaggccgtgaatatcccagagtctttgccaccttcccggcgtaatagtaatagcaacccccccctgcctcgctgctaccaatgcaaggcagctaaggtaatcttcattatcatcttctcttacgtgctaagcctaggaccttattgctttttagctgtattggcggtgtgggtggatgtggaaacgcaagtgccccagtgggtgattaccattattatttggcttttctttctgcagtgctgcattcatccatatgtctatggatacatgcacaagactatcaagaaagagatacaggatatgctcaagaaatttttttgtaaggaaaagcctccgaaggaagacagccatccagacctacctgggaccgagggcggaacagaaggaaaaattgtgcccagctatgactctgccacttttccgtag

SEQ ID NO: 117762 - DNA, 2088 bp, synthetic construct
  misc_feature 1..2088: note = Description of Artificial Sequence: Synthetic coding sequence
  source 1..2088: mol_type = other DNA
atgaagatgaaaagtcaggccaccatgatctgctgtcttgtgtttttcctctcgactgagtgctcccactacaggtctaagatccaccttaaggccggcgacaaactgcagtcaccggagggcaagccaaagactggacgaatccaggaaaaatgcgaaggcccctgtatttcttccagcaactgttctcagccctgtgccaaggactttcacggagaaatcggctttacgtgtaaccagaaaaaatggcagaaatcagcagagacatgcactagcttaagtgttgaaaagctgtttaaggattcaacaggtgcaagcaggctttccgttgcagctccttctatcccattgcacatactggacttcagggcgccagagaccattgaatcagtggcgcagggcatcagaaaaaactgcccgtttgattacgcttgcatcactgacatggtgaaaagcagtgagactacttcaggcaatatcgcgtttattgtggagctattgaaaaacattagtaccgatctgtccgataatgtcactcgggagaaaatgaaatcctactccgaagtggccaaccatatcctggacaccgcagcgatttccaattgggcctttataccaaataaaaacgcctcttccgacctgctgcagagcgttaacctgtttgctcgtcagctccatatccataacaacagtgagaacatcgtaaacgagctgtttattcagacaaagggtttccacattaatcataacacttctgagaaatccctaaacttctccatgtctatgaataacacaacagaggacatactgggaatggtccagattcctcgccaagagctgcgaaagctgtggcctaacgccagtcaggcaataagcatcgcgtttcctacactcggtgccatcctgagagaagctcatcttcagaacgtctctctgcccagacaggtaaacgggctggttttgagcgttgtgcttccggaacgcctgcaagagatcatcttgacattcgagaagattaataaaacgcgaaacgcccgagcccagtgcgttggatggcacagcaagaaacgcagatgggatgagaaggcctgccagatgatgcttgatataagaaatgaggtcaagtgtcgatgtaactatacttccgtggtgatgagcttctctatactcatgagctctaagagtatgactgacaaagttctggactatattacctgtattggcctgtcagtctccatcctctctctcgtgctctgtctcatcatagaggccaccgtctggagtcgggtggtggtgaccgaaattagctatatgcgtcatgtttgtatcgtcaacattgcagtgtcactcttgaccgccaacgtatggttcatcattggctcacatttcaacattaaggcccaggattataacatgtgcgtcgctgtaacatttttctcacactttttttatctttcactttttttttggatgttgttcaaagccttgcttatcatatatggcattttggtgattttcagacgtatgatgaaatccagaatgatggtgatcggattcgcgatagggtatggatgtccattgattattgcggtgaccactgtggccatcactgagcctgagaaggggtatatgcgccccgaggcctgttggctcaactgggacaacacaaaggcactgttggcttttgcaattccagcattcgttattgtggccgtgaacttgatagtggtgcttgtagttgctgttaacacccagcggccatctatcggctccagtaaatcccaggacgtggtcattattatgcgcatatctaagaatgttgcaatactgacgccattgctggggttgacttgggggtttggcatcgctacactgatcgaaggcacctctttgactttccacatcatcttcgctctcttgaacgcatttcaaggattttttatcctgctcttcggcaccattatggatcacaagatcagggatgctcttcgtatgaggatgtctagccttaaaggaaaatccagggccgccgaaaatgcgagtctgggccccacaaacggcagcaagctgatgaacagacaaggctag

SEQ ID NO: 117763 - DNA, 2088 bp, synthetic construct
  misc_feature 1..2088: note = Description of Artificial Sequence: Synthetic coding sequence
  source 1..2088: mol_type = other DNA
atgaaaatgaaatcacaggccactatgatctgttgccttgtttttttcctctctacggagtgcagtcattacagatccaagatccacctcaaggctggagacaaattacaatccccggagggcaagcctaaaacaggccggatccaggaaaaatgtgagggtccctgcatttcttcttccaattgctcgcagccctgcgctaaggattttcacggggaaatcggtttcacatgcaaccagaagaagtggcagaaatccgccgaaacatgcacatctctttcggttgaaaagctgtttaaagacagcaccggagcctctcgtctctctgtggccgcaccttccatccccctccacatcctggacttccgcgccccagagactatcgagtctgtcgctcagggcattcgcaagaactgcccttttgactacgcttgtatcactgacatggtcaagtcttccgaaaccacatcaggaaatatcgccttcatagtggaactgcttaagaacatcagcacagacctttcagacaatgttaccagggagaaaatgaaatcatacagcgaggtggccaaccatattctagataccgccgccatctctaactgggctttcatcccaaacaaaaacgcctcttcggatttgctgcagagtgtcaacttatttgcccgtcagttgcacatccataacaatagcgagaacatcgtgaatgagctctttatccagacaaaaggcttccatattaatcataacacatctgaaaagtcactaaatttctctatgtcaatgaataatacaacggaggacattttagggatggtccagatcccccggcaagagctgcgcaagctgtggccgaacgcctctcaggctattagcatagctttcccaaccctcggggccattctccgagaggctcacctgcaaaatgtctccctgccccggcaggtcaacggtttagtgctctcagtggttctgcctgaacgactgcaggagattatcctgacctttgaaaagatcaacaaaactcgaaacgctcgggcccagtgcgtagggtggcactcaaagaaacgtcgttgggacgaaaaggcatgccagatgatgctcgacattcgcaacgaagttaagtgtcgctgtaactacacaagcgtggttatgtccttctctatcctgatgtcttccaagtcaatgaccgacaaggtcctggattacatcacctgcatcggcttgagtgtttctattctctctctcgttttgtgcctgatcattgaggcgactgtttggagtcgagtggtggtgaccgaaatttcctatatgcgacacgtctgcatagttaacatcgccgtgtcactcctaacggcaaacgtctggtttattatcggctcacactttaacatcaaagcccaggactacaacatgtgtgttgccgttacttttttttcccactttttctaccttagcctctttttctggatgctgtttaaggccttactcatcatttatgggatcttggtcatttttcgcaggatgatgaagagccgcatgatggtgatcgggttcgcaatagggtacggctgccccctaattatcgccgttacgacagtggcgattacagagccggaaaagggatacatgcgaccagaggcgtgctggttgaattgggacaacaccaaagctttactcgccttcgctatccctgcatttgtcattgtggcggtaaatctcattgtagtgctcgtggtggctgtgaacacacagcgcccttccataggatcctctaaatctcaggacgtagtcattatcatgcggattagtaagaacgttgccattctaactccactacttgggcttacctggggattcggcattgcgactttgatcgaaggcacctcactgaccttccatatcatttttgctctcctgaatgccttccagggcttttttatcctactgttcggcactattatggaccataaaattagggacgcactgagaatgcgcatgtcatcccttaaaggaaaatcaagagccgcagagaacgcttcactcgggcccaccaacggtagcaaactgatgaatcgacaagggtag

SEQ ID NO: 117764 - DNA, 2259 bp, synthetic construct
  misc_feature 1..2259: note = Description of Artificial Sequence: Synthetic coding sequence
  source 1..2259: mol_type = other DNA
atgtacaccggaccatgcaaggtgctgcacctgagttccgggctgctgcccaattccggccgcttcggtattgtgctttcagacgaatatcaggtcgtcacctcactttggtgtcagctatacacaactcacgctccccagcaagctagtggtatgcttctactgaattacctggttattccatcgaaggcacaggttaacaagccaggctatattcccaatctcggcgagtgcagtcattatcggagcaagattcatctgaaagccggagataaactacaatcacctgaaggaaagcccaaaaccggaaggattcaggagaaatgcgaagggccatgcatatcttctagcaactgcagtcagccctgcgccaaggacttccacggtgaaataggatttacatgcaatcagaagaaatggcaaaagagcgcggagacctgcacttcattgagcgtggagaaactgttcaaggactcgacaggggcttccagactgtcggttgcagccccttccatccccctgcacatacttgactttagggccccagaaaccatcgagtctgtggcccaaggaatcagaaaaaattgcccctttgactatgcttgcatcacagacatggtgaaaagtagtgaaaccaccagtggaaatatcgccttcattgtcgagctactaaagaacattagcacagatctgtcggacaatgtgacgcgggagaaaatgaagtcatattccgaagttgctaaccatatccttgacacagcagctatcagcaactgggcatttattcccaacaagaatgcgtcttctgatcttcttcagagcgtcaatctgttcgcccgccaactgcatattcacaacaattccgaaaacatcgtgaatgaactgtttattcagacaaagggtttccatatcaatcataacactagcgagaaatcgctgaatttttctatgtccatgaacaacacaaccgaagatattctgggcatggtgcagattccgagacaagagctgaggaagctttggcctaatgccagccaagccataagtatcgcatttccgactctgggcgcaatcttgcgtgaagctcacctgcagaatgtctcactcccgaggcaagttaatgggctggtgcttagcgtagtgctacctgagcggctgcaggagattattctgacattcgaaaaaatcaataagactagaaatgctagagcccaatgtgtgggctggcacagcaagaagcggcgatgggatgagaaagcatgccagatgatgctcgatatccggaatgaggttaaatgtagatgcaattacacctcagtggtcatgagcttctctatcttaatgtcctccaagtccatgaccgataaagtgctagattacattacctgtattgggctcagtgtgtctattctgagcctcgtactgtgcctgattattgaggctactgtttggtcaagggtagtcgttacagagatttcctatatgcggcatgtatgcatcgtgaatatcgctgtctctctgctgactgccaacgtgtggttcatcatcgggtcacactttaacataaaagcgcaggactacaacatgtgtgtcgcggtaacctttttctcacatttcttctacctcagtctctttttctggatgttgtttaaggctctactaataatctatggcattctcgttatctttcgacggatgatgaagtctaggatgatggtgatcggattcgcgatcggttatggttgccctctcattatcgccgtcaccacagtggccataacagaacccgaaaaggggtatatgaggcctgaggcgtgctggctgaattgggacaatactaaagcattgctggcattcgcgattcctgcatttgtcatagttgcagtcaatctcatcgtcgtgcttgtagtagctgtcaatacccagaggccctcaataggaagttcaaagtcccaagacgttgtgatcattatgcgtatcagcaagaacgtggccatacttacaccactactgggactgacctgggggtttgggattgccacccttattgaggggactagcctcaccttccacattatttttgcacttctgaatgccttccaaggcttctttatccttttgttcgggaccatcatggatcataaaatccgcgatgcactccgaatgagaatgtcctctctgaagggaaagagtcgcgcagccgagaacgcaagcctggggcccactaatggaagcaaactgatgaatcggcagggttag

SEQ ID NO: 117765 - DNA, 1005 bp, synthetic construct
  misc_feature 1..1005: note = Description of Artificial Sequence: Synthetic coding sequence
  source 1..1005: mol_type = other DNA
atgaacgaggatctgaaggtcaatctctccggactgcccagagactatttggacgctgccgccgcagagaacatatccgctgccgtcagttcccgagtgcccgccgtcgagcccgagccagaactcgtggtgaacccttgggatattgttctgtgcactagtggcactctgatttcttgtgagaacgctattgtcgtcctgatcatctttcacaatccttcgctacgcgcacctatgtttctgctgatcggtagcctggcgcttgccgaccttctggcagggatcggtttgatcactaatttcgtattcgcctatctgttacaatcagaggccacaaagctggtgaccatcgggctcatagtcgcaagtttcagtgcgtctgtatgtagcctgctggcaataacagtggatcggtatctcagcctttattatgcactcacctaccactccgagcgaactgtgaccttcacttacgtgatgctggttatgctgtggggcacttcaatatgtttagggctgttgccagttatgggttggaattgcctcagagatgagtcaacctgttccgtggtgcggcccctaacgaaaaacaatgcagctatactgtccgtatcattcctgtttatgttcgccctgatgctgcagctgtacatccagatctgcaaaatagtaatgcgccatgcacaccagattgcactccagcaccatttcctggctacctcccactatgtcactactcgcaaaggcgtaagtactctcgctattattctaggtacgtttgctgcatgttggatgccctttactctgtactccctcatcgctgactatacatatcctagtatttacacatacgctacacttctgcccgcgacttataatagcatcatcaacccagtgatctacgccttcagaaatcaggagattcagaaagcactgtgtctgatctgctgtggttgcatcccctcctcacttgcccagcgcgcccggtcgccctcggatgtctag

SEQ ID NO: 117766 - DNA, 1005 bp, synthetic construct
  misc_feature 1..1005: note = Description of Artificial Sequence: Synthetic coding sequence
  source 1..1005: mol_type = other DNA
atgaacgaagatcttaaagtcaacctttccggtttgccacgtgattacctggatgccgcagctgctgaaaatataagtgccgctgtttcctcaagagtacctgccgtcgagcccgagccagaactggttgtaaatccctgggacattgtgctgtgcacatccggtacactaatcagttgcgagaacgctatcgtggtcctgatcattttccataatcccagccttcgggccccaatgtttcttcttatcggtagtctcgctctcgccgatctgttggcagggatcggccttattaccaacttcgtgtttgcatatttactccagtctgaggccacaaaactagtgacgattggactgatcgtggctagtttctccgccagcgtgtgttctctcttggcaattaccgtcgatcgctatctgtcgctatattacgctttgacctaccactcagaacgtacagtaacgttcacatacgtgatgctagttatgctgtggggaacctctatctgcctgggacttttgccggtgatgggctggaattgcttgagagacgaatctacgtgttccgtcgttaggcctctgaccaagaacaacgctgcgattctcagcgtatccttcttgtttatgtttgcactcatgctgcaactgtatatccagatttgcaagattgtaatgcggcatgcccaccagatcgctctccaacatcactttctcgccacctcccactacgtaacaaccagaaagggggtgtccaccctggctattattctcggtacattcgcagcttgctggatgccgtttactctctactctttgatcgccgactacacatacccttccatatacacatacgccaccctcctccctgctacatacaactcaataatcaatccagtgatttatgctttcaggaaccaggagatccagaaggccctatgtcttatctgctgtggatgcatcccgtcttctttggcccaacgagcccgcagcccctcagatgtctag

SEQ ID NO: 117767 - DNA, 3840 bp, synthetic construct
  misc_feature 1..3840: note = Description of Artificial Sequence: Synthetic coding sequence
  source 1..3840: mol_type = other DNA
atgaggggccatggcaaccacagccgactaaagtcacggtgtgcatcactcggaaatgtgcaccatcaccaggcgcagatggcccacggggcccactgtcggggaggcaggacacctcaatccccagatagcagaggcccaaccgctggcggtcatacaagggggcgatggacctacaggcccattgaagcgctgatcaacgtttcatttcctggcgccaaaggaggacgcacagcggagggggagcctagctgggcctgggtttttagaagcggctacctgcagagacaagccttgcctggactccccgtgagcacgcgggttgctgcatgctggtggcagcaccatccagggcgcgacagcggattccttggccctggttttattgatctgctacgagaagagccctctggtagagcggatggtaaagccgccgctcaaaagactggcaggctctatctcttcccaacctttctggggaacaagctccccgaggctgcagacagttttggggaaatcgccagtggcaattctgtgatcttcacaagtgtcctgcagagcagccacccacccgggaccccaccaccaagcgcccgtaaacccagccccggcgccgctatgctagtctgcgaggagaccctcgagttaggagcccagggatgttggggaagtacttctcctaggggccaggcggttagtctggttggcggcccaacagcaggagggtctaggctagggggcgctgggtgcacaatgggcctcctcatggcgctgcaggccaggagaccacgggacgggacatgggctgatcctagacggtgtagcagagccgtggaaggctccggtctaaccagagccgctctggtgagtcccgggccaagtggtgtcgaagaagacacaaggcgcgagggatgtgtgctcgtcgggagttggcggtcaagtacccatcgatcccgtgtgcttattatcaatactccgtctggtagaacgccatggtcacagggatctctgggttctactggacgctataaccaaacccgggctcccggttcacagcaacagggtctgtgctctgacgctgcgctacatgaggattttgtaccagaaccaacccccgcattttttcagtaccccccacaagccttctccaaaaccaaggtgagggacctgggcaggggaggattgtacgcctttagcaaagaggagaaggtttctgaagcccagagagtggaggcctacgagacccatgggcttggcttatccacgggtagacagaatcctgtcccatcaccttgcaaaccagggtgcgtctgccagggactggctttggacgccgaggcatggccacggcaccctgggcgccggccatgcgcagccaaagaagcctgtttaggtcccccaggatgctcaggcgaactgtccctgcccgaggaggagggcattgcacctggcgcggccaccgccgctccagcttgggtgcctcacggacgtgtgtccagattcctcactgtgaaactgtttacttacgttacgatgtatcaatgcaagcaggagcgcatccttagactgtgtatctcaggtgaatcggggaggtatgtccgccgctccagattcagaaacttcgccgccctgatggtaagtaccggggtcccaggagtgctgcagctgggtgccagacccttaaggggggggggccatccttacggcgactctcaggccggaaaagtcgtggagtggcgcgcaggcgatagagcatcaggtctgagcgccggcgagagacgcttcctttctcagtcagaactccagacctggccccgcactccccattgtgtcggaaagaaggtgcctcagccagttggcgcggctgacttggcccccgacacatccttgtgcagaaaggaaggaagctctgctagcaggtcttgtcggcccgggcctggtcacctaaccagaagagaagaagacagttttaggcaactggcctttccacgcttcgaagaggtgaccttcccacccttgaccgctgccgagcgagccccctcagtgcacggcgggcacagtctcgcctcacaaggcttggtgcttgcaggccggacccgctcagttgcgtccgggggaaaacaggaactgtccggccccctggctgcctgcattcctactcaagacctcaaaacagtgttgtccctcccacgatatccaggggaatttttacaccccgttgtgtatgcttgcacagccgttatgctgctgtgtttgctcgcatcctttgttacgtacatagtacaccagtccgcgatacggatctcacggaaaggccggcatactttgctgaacttctgctttcacgccgctctgacgttcaccgtgttcgccggcgggataaacaggacaaagtaccccatcctatgccaagcagttggaattgtcctccattatagcaccctttctactatgttgtggattggagtaacagcacgcaacatctacaaacaagtgacaaagaaagccccactgtgtctggatactgaccagcctccatatccccgtcagcctctccttaggttttatttggtcagcgggggagtcccctttataatctgtggagtaactgcggcaaccaacattcgcaactacgggactgaagatgaggacaccgcgtgctggatggcttgggagcccagtctcggggccttctatggacctgccgctatcatcacacttgtcacttgtgtctacttcctcggtacctatgttcagctgcgcaggcaccctgggcgtagatacgaactgagaacacagccagaagagcaacgaagactcgcaactcctgaaggcggtagggggatccggccagggacgccgccagcgcacgatgctccgggcgcaagtgtcctccagaatgagcatagttttcaggctcagcttagagctgcggccttcacgctcttcctctttaccgccacctgggctttcggtgcacttgccgtctctcagggtcactttctggatatggtgtttagttgcctgtacggagctttttgtgttacacttggccttttcgtcctgattcaccactgtgccaagagggaagatgtatggcagtgctggtgggcctgctgtccgccccgtaaagatgctcatcctgcactcgatgccaacggcgcagctctaggccgtgcggcgtgtctgcactcccctggacttggccagccaaggggattcgcccatcctcctggtccttgtaaaatgacgaatctacaagccgcgcagggtcatgcgagctgtctaagccccgcaacaccctgttgtgccaagatgcattgcgaacctctaaccgcagacgaagcccacgtccatctgcaggaagaaggggctttcgggcatgatccccacctgcacgggtgtcttcagggccgaaccaagcccccttatttttcacggcaccccgccgaagagcccgaatatgcctatcatatcccatcctccttagacggatcaccacgttcctccaggacagacagcccacctagcagcttggatgggcccgctggcactcatactctcgcttgctgtacgcaaggtgacccgtttcccatggtgacccagcctgaaggcagtgatggctcccccgcattatattcatgccctacccagccaggccgagaggctgcccttgggcctgggcatctggaaatgctgagacggactcagagcctgcctttcggtggtccttctcagaacgggcttcctaaaggaaagctgttggagggtctgccattcgggacggatggcactggaaatattcgcaccgggccatggaagaacgagactaccgtgtag

SEQ ID NO: 117768 - DNA, 1395 bp, synthetic construct
  misc_feature 1..1395: note = Description of Artificial Sequence: Synthetic coding sequence
  source 1..1395: mol_type = other DNA
atgttgtggattggagttaccgcgaggaacatatacaaacaggtgacgaagaaagcacccctttgtcttgataccgaccagcccccatacccaagacagcccctgctgagtcgtttttacctggtaagcgggggcgtgcctttcattatttgtggggtgaccgccgcgactaacattcggaattatggcaccgaagacgaggatacagcgtactgttggatggcttgggaacctagtctgggagccttctatggccccgccgcaataatcactctggtgacttgtgtctactttcttggcacctacgttcagctcagacggcaccccggacggagatatgagttgcgcacccagccggaagagcaacggcgattggctactccagaaggtggcagaggcattcgcccgggcacaccaccagcgcacgacgctcctggggcatcggtcctgcagaatgaacactcctttcaggcccagctgagagctgccgcctttactctgttcctcttcactgcaacatgggctttcggtgcattggcagtctcccaggggcatttcttagatatggtcttctcatgtctgtatggggccttttgcgttactctgggactgttcgttctgatacatcattgcgccaagcgtgaagacgtttggcagtgttggtgggcttgctgccctccacgaaaggacgcgcaccccgctctcgacgccaacggagcagctctgggccgggctgcctgcctgcactctccagggctgggtcaaccgcgcggctttgctcaccccccagggccctgcaagatgacaaacttacaagctgcccagggacatgcgtcatgcctgagtcccgcaacgccctgctgcgccaaaatgcactgcgaacctttgactgctgacgaagcccatgtccacctgcaggaagagggcgctttcgggcacgatccccacctccacgggtgcctgcaagggcgcaccaaaccaccttatttcagccgtcaccccgccgaagaaccggagtatgcttaccacatcccttcaagcctggacggctcgcctaggtcctcacggactgattcaccaccgagtagcctggatggacccgccgggacgcacacacttgcctgctgcacacagggggatccatttcctatggtaacccaacctgaggggtcagatggcagccctgctttgtattcttgtcccactcagcctggccgggaggctgccctcgggcccggacacctcgagatgctgagaagaactcagtccctgcccttcgggggccccagccagaatggcctgccaaaggggaaattacttgaaggcctgccatttgggactgacggtaccggaaacatcaggacgggaccttggaaaaatgaaactactgtttag

SEQ ID NO: 117769 - DNA, 1683 bp, synthetic construct
  misc_feature 1..1683: note = Description of Artificial Sequence: Synthetic coding sequence
  source 1..1683: mol_type = other DNA
atggatctgaaaactgttttgtccctccccagatacccgggtgagttcctgcacccagtggtatacgcctgtacagccgtaatgctgctgtgtctgctagcatcattcgtgacttatatagtacatcagtctgcaatccgcatcagcagaaaggggagacacaccctgctaaatttttgttttcacgcagcgctcacatttactgtgttcgctggagggattaaccgcacaaagtacccaattctctgtcaggccgttggcatagttctgcactattccaccctgagcaccatgctgtggattggtgtcacagccaggaatatctataagcaagtgacaaagaaagctccactatgtcttgatactgatcagcccccatacccaaggcagcccctgttgcgcttctatctggtgtccggcggagttccattcattatctgcggtgtgactgccgctactaatatccggaactacggaacggaagatgaggataccgcatattgttggatggcctgggagccttctctaggagcattttatggccccgcagccatcattaccctggttacttgcgtttatttcctgggaacgtatgtacagctccggaggcatcccggccgccgctacgagctgagaactcaacccgaggagcaaaggcgattggcaactcccgaaggcggccgtggaattaggcccggcacccctcccgcccatgacgcccctggtgcctcagtattacagaatgaacactctttccaagctcagcttcgtgcagccgccttcactctgtttctgttcaccgcgacctgggcgtttggagcgctcgccgtgtcacagggacattttttggacatggtgtttagctgcctgtatggagctttctgtgtgacactgggcctgttcgtcctcatacatcactgtgccaagcgggaagatgtctggcagtgctggtgggcctgttgccctccaaggaaagacgctcaccctgctctggatgcaaatggggcagcactgggcagagccgcctgcctccactcccccggcctgggtcagcctcgaggattcgcccacccccccggaccttgtaagatgacaaatctacaggccgcacaggggcatgcctcttgcctgtcgcccgcaactccttgctgcgccaagatgcattgcgagccactgacagccgacgaggcccatgtgcacctgcaggaagaaggcgctttcgggcacgacccccacctgcatggatgcttgcaagggcgaactaagccgccctacttttccaggcacccagcggaagaacctgagtacgcctatcacataccaagttctctagatggcagtcctagaagctcaaggaccgatagtccgcccagctccttggacggcccagctggcacacacacattggcctgctgcactcagggggatcctttccctatggttacacagccagaaggtagtgatgggtcccctgccctgtacagttgccctacgcaacccggccgagaagcagcattgggccctggccacctggaaatgctgcggagaacacaatcactgcctttcggcggaccgtcccagaatggtttacccaaaggtaaactgctggagggcctacccttcggaaccgatggaactgggaacattagaactggcccctggaaaaacgagacaactgtgtag

SEQ ID NO: 117770 - DNA, 2562 bp, synthetic construct
  misc_feature 1..2562: note = Description of Artificial Sequence: Synthetic coding sequence
  source 1..2562: mol_type = other DNA
atgagaggacacggaaatcattcaagattgaagtcccgatgtgcgagcctgggtaacgtgcatcatcatcaggctcagatggcccacggagctcattgccgcgggggacggacaccgcagagtccggacagccggggccctaccgccggaggccatacccgcggtagatggacgtaccggcccattgaagcattgatcaatgtgtcttttcctggggccaagggaggccgcaccgcagagggagaacccagttgggcatgggtctttcgatcgggttacctgcaaaggcaggccctccccggtctaccagtgtctaccagagtggccgcttgctggtggcaacaccacccagggagggatagtgggttcctgggacccggctttattgatctgctaagggaggaaccttctggaagagcggatggcaaggccgccgcacaaaaaacggggcgcctctatctatttccaacctttttgggcaataagttgcccgaagctgccgattctttcggggaaatcgccagtgggaacagtgtgatttttacctctgtgttacagagcagccatccccccggtactcccccacccagcgcacgtaaacctagcccaggagccgccatgttagtctgcgaggagacgcttgagctgggagcccaggggtgctgggggtccactagtccacggggccaagctgtgtctcttgtcggaggtccaacagcaggggggagccggttgggcggtgccggctgtacaatgggcctccttatggccctgcaggctagaaggccccgggacggaacttgggccgacccgaggcggtgctcaagggccgttgaagggagcgggctgactagggccgctttagtatcacctggaccctctggtgttgaggaggacacacggcgtgaaggatgtgtgctggtgggttcctggaggtcaagcacccatagatctcgcgtgctcatcatcaatactcctagcggacgaaccccctggagtcagggaagcctcggaagtacaggccggtacaaccagacaagggccccggggagtcagcagcagggactctgtagtgacgctgccttgcatgaggattttgtgccagaacccacacctgctttctttcagtacccaccccaggccttctccaagacaaaagtacgggatcttggacggggaggtctctacgccttttccaaagaagagaaggtaagcgaagcacagcgagtcgaagcctacgaaacgcacggactcggactcagcaccggccgacagaacccagtcccaagcccatgtaaacctgggtgcgtctgccagggcttagctctggacgccgaggcctggccacgccacccagggagacgtccctgtgccgccaaggaggcctgccttggaccacccggttgcagcggcgaactctcactgcctgaggaggagggcatcgcaccaggagccgcgaccgctgccccagcctgggtccctcacgggcgcgttagtcggtttctgacggtgaagctcttcacctatgttacgatgtatcagtgtaaacaggagcgtattctgcggctttgcatcagcggcgagtctggcagatacgttagacgttctcgctttcgtaattttgccgctttaatggtcagtaccggggtccctggggtgctgcaattgggagccaggcccctcagagggggtggacacccctatggtgacagtcaggccgggaaggtggttgaatggcgggcgggagacagagcttccggcctgtcagccggcgagagacgattcttgtctcaatccgaactccagacatggcccagaactccacactgcgtcgggaagaaggtcccccagcctgtcggcgccgcagatctagctcctgacacctctctttgccgaaaggagggaagcagcgcctcaaggtcatgcaggccgggacctggacaccttacacgaagagaggaggactcttttcggcaactggcattccccagatttgaagaggtcacgtttcctcccctgactgccgcagagcgcgccccttcagtgcacggcggtcatagcctggctagccagggcctggtcctcgccggtcggactcgtagcgtcgcctcggggggtaagcaggagctgtctgggcctctcgccgcctgcattcctactcaggatcttaaaacagtactgagcttaccccgctatcctggtgagttcctgcaccccgtggtatacgcctgcaccgccgtcatgctcctatgcctgctggctagctttgtcacatatatcgtacatcaaagcgccatccggatcagccggaaaggtcgccacaccttactcaacttttgctttcatgctgctgagcatcccggtgtcaccccactgagaaccagtcctcctctgccttggtggacgccaattcaggtgggaatcgtacttcattactccacactgagcacgatgctctggatcggcgtcactgcaaggaacatctataaacaagttaccaagaaggcccctttgtgtttggacaccgaccagcctccttatcccaggcagcccctgctatag

SEQ ID NO: 117771 - DNA, 3366 bp, synthetic construct
  misc_feature 1..3366: note = Description of Artificial Sequence: Synthetic coding sequence
  source 1..3366: mol_type = other DNA
atgggggccggcgggcggcgaatgcgtggtgccccagctcgcctgcttttgcccttactgccatggctcttactcctgcttgcgcccgaggcccgtggagcccccgggtgcccactgagtattaggtcatgcaagtgcagcggggagcgtcctaagggccttagcggcggagtgcctggaccagctaggaggagagtggtgtgctcaggtggtgacctacctgaacctcctgagccggggctgctgccaaacgggacagtgaccctgctcctgtctaataataaaattacaggcctgagaaacggaagttttctcgggctgtctctacttgagaagctcgacttgcggaacaacattatctcgacagtgcagccaggcgcctttctcgggctgggcgagctaaaaaggctcgacctctccaacaacagaatcggttgtcttactagcgaaacattccagggtttgccacggttactgagactgaatatctcaggaaacattttcagttccctacagccaggcgtgttcgacgagctcccagctttgaaagtagtggatctcggcactgagttcttgacatgtgattgccaccttcggtggctgcttccatgggcccaaaacagaagtttacaactgagtgagcacacactgtgtgcttacccaagtgcactgcatgcacaagctttgggtagtttacaggaggctcaactctgctgcgaaggtgcacttgagctgcacacccaccacctaatcccctctttgcgacaagtggtcttccagggcgaccgcctgcctttccagtgcagtgcctcttatttggggaacgatacgagaattcgttggtaccacaacagggcacctgtggagggcgacgaacaggcaggcatcctgcttgcagaaagtttgatacacgactgcaccttcattacaagtgagcttaccctgtcgcacataggggtctgggctagcggcgagtgggaatgtactgtatccatggcccaaggtaacgccagcaagaaggttgaaattgtggtcctggagacgagcgcctcctattgtccagcagaaagagtagctaacaatagaggcgattttcgctggcctcgcacgctggccgggataacagcttaccaaagctgcctgcagtacccatttacaagtgtcccactaggcggaggcgcgcctgggacgagggcttctcgacgctgcgatcgcgccggtagatgggagcccggggattacagccactgtctttatactaacgatataacccgggtgctgtacactttcgtgttgatgcccatcaatgcttccaatgctctgacactggcccaccaattgagagtatacaccgccgaagctgcgagtttttctgacatgatggatgttgtgtacgtggctcaaatgatccaaaagttcctgggctacgtcgatcagatcaaggaactggtggaggtgatggtggatatggcaagcaatttgatgctcgtggatgaacacttgctgtggctggcccagcgagaggacaaggcttgctctaggatagtcggtgctctagaaagaatcggcggcgcggctttgtccccccatgcacagcacataagtgtggaactgtcagcctttccccgtgaagtggggggagcaggtgctggcctgcatcctgttgtttatccatgcactgcacttctgctcttatgtcttttcgcaacaattattacatacatcttaaaccactcatccatacgcgtgtcacggaagggctggcatatgctgctgaacctttgctttcacatagctatgacatcagccgtctttgcgggaggcattaccttgaccaactaccagatggtctgtcaagccgtgggtatcactctccactattcttccctgagtacccttctgtggatgggggtgaaggccagagtgctccacaaggagcttacctggagagcccccccaccccaagagggggacccagccctgccaactccctccccaatgctgagattctacctgatagctggagggattcccctaattatttgcgggatcactgctgccgtgaacatccataactatagggatcatagtccctactgctggttagtttggcgccctagccttggggctttctacattcctgtggcgctcatcctgctcattacatggatttatttcctgtgtgccggactcaggctgcgcggccccctggctcagaatccgaaggccggcaattctcgcgcaagtctcgaggcaggggaggagctgagggggtctacccgattgcgaggctcagggcctttgttgtccgacagcggaagcctgctcgctacaggatcggcccgagtgggaactccaggcccacctgaggacggcgattccctttactctccaggagtgcagctaggtgcccttgtcacaacccattttctgtacttggcgatgtgggcctgtggcgccctggcggtgagtcagagatggctgccccgcgtcgtgtgcagctgtctttacggagtggccgcatcagccctcggtttgttcgtgttcactcatcactgtgcccgccgcagagacgttcgggctagctggcgggcatgttgccccccagcctctccagcagcaccgcacgctccacctagagctttaccagctgctgcagaggatggctccccagtgttcggtgagggccctcctagccttaagagcagcccaagcggatcaagcggtcatccgctggctcttgggccctgcaaactcaccaatctgcagctcgcgcagtcccaggtatgcgaggctggggctgccgccggaggggagggcgagcctgaacctgccggaacacgtggaaatctggcacacagacatcctaacaatgtgcatcacggccgccgggctcataaatcacgcgccaagggccaccgtgccggggaggcctgtgggaaaaaccgtctgaaggcgcttcgagggggagctgccggagccctggagttactaagcagtgagtcaggctctcttcacaatagccctaccgattcttatctaggcagctctcggaactctcctggcgccggactacagctggagggcgagcccatgctgaccccctcagaaggttctgatacctctgctgcccccctgagtgaggcaggccgggctggtcagcggcgtagcgcctcaagagatagcctcaagggggggggggcgttagagaaggagtcccatcgccgaagttatccccttaatgcagcatctctcaatggcgccccaaagggggggaaatacgacgatgtgaccctcatgggcgcggaagtggcgtccggagggtgtatgaaaaccggactttggaaatccgagaccaccgtgtag

SEQ ID NO: 117772 - DNA, 4017 bp, synthetic construct
  misc_feature 1..4017: note = Description of Artificial Sequence: Synthetic coding sequence
  source 1..4017: mol_type = other DNA
atgggtgctgggggtcgtagaatgcggggcgcacccgccaggcttcttctgccgctcctgccttggttgcttctcctcctggcacccgaagcaaggggggcgccaggttgtcccctgtccatccgatcttgtaagtgcagcggcgaaaggccaaagggcctcagcgggggagtgcctggaccagcccgaaggcgcgttgtttgcagtggcggggacctaccagaaccaccagaacccgggctcctacctaatggcactgttacactcctcctttcaaataataaaatcactggtctccgaaatggctccttcctcggactctccttactcgaaaagctggacttacgcaataatataatcagcactgttcaaccaggtgcctttttgggattaggggaattgaagcgcttggacctgtctaacaaccgcatcggatgcctcacctcagagaccttccaaggccttcctcgtctgttgaggctcaatatcagcggaaatatcttttcatcgctgcagcccggggtgtttgatgagctgccagctcttaaggtggtagacctcgggaccgaattcctaacttgcgattgccacctaaggtggctgctcccttgggcacaaaatcgctccctgcagctcagtgaacacaccctgtgtgcttatccttctgccctgcacgcccaggccttgggaagtctccaggaggcacagctgtgctgtgagggcgccttggaactgcacacacatcacctcatacccagcttgaggcaggtggtgttccagggcgaccgcctgcctttccagtgctcagcatcctatttaggaaacgataccagaatacgctggtatcataatcgtgcccctgtcgagggggacgaacaagcaggaattcttctggccgaaagtctcatccacgattgcactttcataacctcagaactgactctgtctcacatcggcgtgtgggctagtggcgaatgggaatgcactgtcagtatggcacagggcaacgcgagcaaaaaggtcgagattgttgttctggagacttcagcttcatactgtcccgccgagagagtggcaaacaatcggggggattttcgctggccacggacacttgccgggatcaccgcttatcagagctgccttcagtatccatttacttctgttcctctgggcgggggagcacctggcactagggcttcacgcaggtgcgaccgggcaggacgttgggaaccaggtgactatagccactgcctatatacaaatgacataacaagggttctttatacctttgtactgatgcctatcaatgcttctaacgcgctgactctggcccaccagttgcgagtgtatacagccgaggctgctagcttcagcgacatgatggatgtggtgtacgtagcacagatgatccagaaatttctgggctatgttgatcagatcaaagaattggttgaagttatggtggatatggcctcgaacctgatgctggtggacgaacacttactgtggctcgctcagcgggaagataaggcatgctccaggatagttggggctctagaacggattggcggggccgccctctcacctcatgcacaacacatctccgtgaatgctcggaacgtagccctagaagcctatctgataaaacctcattcctatgtaggccttacgtgcacagctttccagcggcgtgagggaggcgtcccagggactcgccccgggtctccaggacaaaacccccccccggagcctgaaccccctgccgatcaacagctgcgtttccggtgcactacagggcgccctaatgtttccctttcaagttttcacatcaagaactcagtcgcgttagccagcattcagctgcccccctccctattcagctctttgcccgcggcactggcgccacccgttcctcccgattgtaccctccaactcctggtattcagaaatggtcggctctttcatagtcattccaacacttcccggcccggcgctgccggccccggtaaacggcgcggggtggcaacacccgttattttcgcaggcacctcaggctgtggcgtcggcaatctgactgagccagtggccgtaagtctcagacactgggcggagggagcagagccagtggccgcgtggtggtcacaggaaggcccaggagaggccggcggatggacctctgagggctgccaactgagatcgagtcagcctaacgtgagtgccctacactgtcagcacctggggaatgttgctgtcctgatggaactctctgcattccctcgtgaagttggtggcgcaggtgccgggcttcatccggtggtgtacccctgtaccgctttactgctactctgtctttttgcaaccatcattacctatattcttaaccatagttccatccgagtctcacgtaagggttggcacatgctgttgaacttgtgctttcacattgcaatgactagtgcagtgttcgccggcgggatcacgctgaccaattaccagatggtttgccaggccgtgggcataactctacactacagttcccttagcaccctgctgtggatgggagtgaaagccagggtgcttcataaggagctcacttggcgcgcgccccccccacaggagggggaccccgcattgccgactcctagccctatgctccgtttctatctcatcgcgggcggtattcctttgataatttgcggtatcactgctgccgttaacatccacaactatagagaccacagtccctactgttggctggtctggcgccctagcctgggcgcgttttacattcctgtcgccctgatcttgcttattacctggatttactttctctgtgctggcctgagacttcgcggtcccttagctcagaaccccaaggctggcaactctagagcatctttagaagctggagaagaactgaggggatccacccggctgaggggtagcggacccctgctgagcgacagtggaagcttgttggctacaggctctgcacgggtcggcacacccggacccccggaggatggcgattctctttacagtcccggtgtccagcttggagctctggtcactacccatttcctgtatttagccatgtgggcttgcggggcccttgcagtttcccagagatggctccctagggtcgtttgttcctgtctatatggcgtggcggcatccgcattgggcctttttgtgttcacccaccattgtgcacggcgccgggatgtcagagcttcttggcgcgcctgctgccctccggccagtcccgctgctccacacgccccccctcgagccctcccggcagccgcagaagatggttcacctgtatttggagaaggccctcccagtctgaaaagtagcccatcagggtccagtgggcacccattggcgttggggccctgcaaattgaccaatttgcagctcgcgcagagccaggtatgcgaagctggcgcagccgctgggggagagggcgaacctgagcccgctgggacccgggggaatctcgctcatcggcatccaaataacgttcatcacggaaggagagcacataagtctcgcgcaaagggtcaccgggcgggggaagcttgcggcaagaatagactgaaggccctaagaggcggagccgccggcgccttggagcttctctcctcagagagtggaagcctccacaatagccccaccgattcctacctcgggagtagcaggaatagtcctggcgccggtctgcaactggagggcgagcctatgctcactccttcagaggggtctgatacctcagctgcacctctcagcgaagcgggtcgtgctgggcagcggaggtccgcctccagggatagtctaaagggcggtggggccctggaaaaggagagccacaggaggtcttaccctctaaacgccgcttccttgaacggcgccccaaagggcgggaagtacgacgatgtgaccctgatgggtgcagaggttgctagtggcggatgtatgaagacaggcctgtggaagtctgagacaaccgtatag

SEQ ID NO: 117773 - DNA, 3771 bp, synthetic construct
  misc_feature 1..3771: note = Description of Artificial Sequence: Synthetic coding sequence
  source 1..3771: mol_type = other DNA
atgcggggtgcccctgcgcgtttactgttaccccttcttccctggctgttactgttgctcgcgcccgaggcccggggcgcccctggttgccccctgagcatccgtagttgcaaatgttctggcgaaaggcccaaaggcctgtcaggcggagtgcccggccccgcccgacgacgtgtcgtgtgtagtggcggggacctccccgagccgcccgaacccggcctcctgcctaacggaaccgtaaccctgttgctgtctaacaataaaatcaccggacttcgcaacggtagctttcttggcctatcgctgctggagaaattggaccttaggaataatataatctccacggtgcagccaggggccttcttggggctcggtgaattaaagagattggacctgtctaacaaccgtattggatgcttaacatccgagacctttcagggcctgcccagactgctcagactaaatatctccggtaacatcttttcttccctccagcccggcgtttttgatgaactgccagctcttaaggtggtagacctgggcaccgagtttctgacgtgcgactgccatctcagatggctgcttccatgggctcagaatagaagcttgcagctctctgagcacacgctctgcgcgtacccttccgccttacacgcgcaggctttgggctctttgcaggaagctcagctgtgttgcgaaggagcccttgagttgcacacacaccatttaatcccctcactgaggcaggtggtctttcaaggggacagacttccatttcagtgtagcgcgtcatacctgggtaatgatacaaggattagatggtatcacaaccgcgcacccgttgagggggatgagcaagcaggtatcctacttgcagagtctctaatacatgactgtactttcattacttcagaactgacactttctcatatcggcgtctgggccagtggcgagtgggaatgtacggtgtccatggctcagggcaatgcaagcaagaaagtggaaatagtggtcctggagacaagtgcttcttactgtcccgctgaacgcgttgcaaacaacagaggagattttcggtggcccagaacactggctggaatcaccgcctatcagtcatgcctgcagtacccatttacctccgtacccctagggggcggggccccgggtaccagggcctcacgccggtgtgatagagcagggcggtgggagcccggcgattactcacattgtttgtacactaacgatattacgagagtcctgtataccttcgtgcttatgcctatcaatgcatctaatgccctcaccttggcacaccagttgcgagtctatacagccgaggcagcttccttttccgacatgatggatgtggtgtacgtcgcccaaatgatccagaagttcttggggtatgtcgatcaaattaaggagttggtcgaggtgatggtagatatggcttccaacctgatgctggtagacgagcatctgctgtggcttgcacagagggaggacaaggcgtgctctcgcatcgtgggagccctggaacgaattggcggggctgcactaagcccacacgcccaacatatcagcgtgaacgctagaaacgtcgccctggaggcttacctgattaaacctcatagctatgttggactcacgtgcacggcctttcagagacgtgagggcggggttcccggaactaggccaggcagcccgggtcagaacccccccccagagccagagcccccggcagatcagcaactgcgattccgctgcaccaccgggaggccaaacgtttccttgtcaagttttcatattaagaattcggtagcactggcaagcatccagctgcctccctccctatttagttccttgcctgccgctttagcccccccagtccccccagactgtactctgcagctcctcgtattcaggaacggccgcctgttccactcacatagcaacacttcaagaccaggggcggccggcccgggcaaaaggcggggagtcgcaacgccagtcattttcgccggtacctccggatgcggcgtcgggaatctaactgaaccagttgccgtatcgctgcgtcactgggccgaaggcgcagagcctgttgcggcctggtggtctcaggaaggccctggcgaagctggcgggtggacatcggagggatgccagttgcgtagctcacaaccaaacgttagcgcgctgcattgtcagcacctgggtaatgtggcggtgctcatggaactaagtgctttccctcgcgaggtcggaggggcgggtgcaggcctccatcctgtggtgtacccttgcacagccctcctgctcctgtgcctctttgccactattataacttacattctcaaccattccagtatcagggtgtccagaaaggggtggcacatgttattgaatctgtgtttccacatcgccatgacctctgcggtctttgccggcgggattactttgacaaattaccagatggtgtgtcaggcggtgggaattacactccattactcaagcttgtctacattgctgtggatgggagtaaaagccagagtcttgcacaaggaactgacgtggcgcgctccccctccacaggaaggcgacccagcgttacccactccctcaccgatgttacgcttctatctgatcgccggcggcatccccttgatcatttgcggaattaccgccgcagtgaacatacacaactatcgagaccactctccttactgctggctggtttggcggccaagtctgggcgctttttacatcccagtagcgctgatccttctgataacctggatctactttctgtgtgccgggctgaggctgaggggcccgctggcacagaatccaaaagccggcaattcacgggcaagcttggaggccggggaggagctgaggggttcaacacgtctgagggggagtgggccactgctttccgactctggctcgctgttagccaccggtagtgctagggtaggaacgccagggcctcctgaggatggggacagcctatatagtcctggagtgcagcgtggtgcgggcgaccacgctctccccgtgctcggccatgtgggcctgcgcgggagcggtagcgtccctgccctggcggccccaggaggagtacagctcttggtgcggggtggtagtctgcgccccgggcccctccgattgcactcccctctgtgtcaggccgagggacgagagagcctggtggcacgcttactgcctccatgtctctcacggggaccaccatgccccgcccccggccccgcgcgtcgtagacgaggaagattccctggcgtgaggggcgggcctccactgccccaggtgctgccaaagagacagcaacgcccttcagctggcagtggtcccttacaggcacaccagcctgcagccggtccagagtctggtgtccgcggaggcggagggggcaggagagggcggcgtgcgggggcaggcggccatcctggaaagcctcgcccaccccctccccaacagcgggctcctcgggcttcaggagcacaggagcccggtcagggaacaccacgaggtggaggtttgcgccaggagcctgcccaagggcccgcccgaggacgtgggggaggagctggcgccgcagtgcagcgcgagcgccaatccgcccaacagccacacagacagttgccaggacagcagcctcagcaacctggccgccgccctgcagctggacgtagagcccacgcccatgcggttagggggcagcgccaccagagacgagctgcattttag

SEQ ID NO: 117774 - DNA, 3966 bp, synthetic construct
  misc_feature 1..3966: note = Description of Artificial Sequence: Synthetic coding sequence
  source 1..3966: mol_type = other DNA
atggagcctcccggtcgtagacggggacgcgcccaaccccccctcctgctgcctctgtctctgctggctctgcttgccctgttggggggaggagggggaggcggcgctgcagcccttccagctggctgtaagcatgacggcagacccaggggcgccggcagagcagctggcgcagctgagggaaaagtggtctgcagcagcctggagcttgctcaggtcctccctcctgacacactccctaatcgtacggtcaccctgatactgagtaacaacaagatctccgagctcaaaaacggatcattctcaggcctttcactcctcgagaggctggacctgcgcaataatctcatctcgtcaatcgatccgggtgccttttggggcctgtcttcactgaagcgactggatttgacaaacaataggatcggctgtctgaatgccgatatttttcgcggccttactaatctcgtcagactgaatctctccggaaatctcttttcctcgcttagtcaggggaccttcgactacctggcgtctctaagatcattggaattccagaccgagtatttgctgtgtgactgcaatattctctggatgcaccgctgggtcaaagaaaaaaacattaccgtgcgcgacacacgctgtgtgtatccaaagagcctccaggcacagccggtgaccggcgttaagcaagaactgctcacgtgcgatccaccgttggagctaccatctttctacatgactccgagtcaccgacaggtcgtctttgaaggcgattcactccccttccagtgcatggcatcatatatcgatcaggacatgcaggttctgtggtaccaggacgggcgcatcgtcgagaccgacgaatctcaaggcatattcgtcgagaaaaacatgatccacaattgttcactcattgcttctgccctgactatatcaaacatacaggctggcagcaccggcaactggggctgccacgtccagaccaaaagggggaacaatacgaggactgttgacatcgtggtgcttgagtcctcagcacagtactgccccccagagcgggtggttaacaacaagggcgacttcagatggccgaggactctggcggggattacagcatacctgcagtgcaccagaaacacacatggatcaggaatttatccaggcaaccctcaggacgaacgaaaggcctggcgaaggtgcgatcgtggcggtttctgggcagatgatgactatagcaggtgccagtatgccaacgacgtcacacgagttctctacatgttcaatcagatgcccctgaacctgaccaacgccgttgccactgctcgtcagctgctggcctacacggtggaggccgcaaacttcagtgataaaatggacgtcatctttgtggctgaaatgatcgagaagtttggcaggttcaccaaagaggaaaaaagcaaagagctcggcgacgtgatggttgatatagctagtaatattatgctcgcagatgagcgcgtgctgtggctcgcccagagggaagccaaggcttgcagccggatcgtgcagtgtttacagcgcattgccacatacaggctggctggcggagcccacgtgtactctacgtattctcccaacattgcgctggaagcatacgtcatcaagagcactggcttcaccgggatgacctgtaccgtgttccagaaagtcgctgcgtcagacagaaccggcttgtctgactatgggagaagggacccagagggcaatctggataagcagttgagctttaaatgcaatgtatccaacaccttctcgagcctagctcttaaaaataccattgttgaggccagcatccagttgcccccaagcctgttttctcccaaacagaaacgggaattaaggcccaccgacgacagtttgtacaaactgcagctcatcgcatttcgcaacggcaagctgttccctgcaacgggaaactctaccaacctcgcagacgacggcaagaggagaaccgttgttacccctgttattttaacgaaaatcgacggcgtgaacgtggatacccatcacatccccgtgaacgtgacattaagacgtattgcccatggtgctgatgctgttgccgcaagatgggacttcgatctgctgaatgggcaagggggatggaaaagcgatgggtgccacatcctgtactcagatgagaatatcaccacaattcagtgctatagcctgtcaaattacgccgtgctgatggacctgacaggatcggagctctatacgcaggccgctagtcttctgcacccggtggtttataccacggccatcattttgctgttgtgtcttctcgccgtcatcgtgagttatatctaccaccattctctgatcagaatatctctgaagagctggcatatgctggtgaatctttgtttccacatcttcctgacttgcgtggtgttcgttggcggcatcacacagacccggaatgcttcaatctgccaggcagtgggtattatattgcattactccaccttagcaaccgtgctgtgggtgggcgtgacggcacggaacatttataagcaggtcacaaaaaaagcgaagaggtgtcaagacccggacgaacctccgccccccccaagacccatgttgaggttctaccttattggtggaggaatacctatcatagtctgcggaatcaccgcagccgccaatattaaaaactatggatcccgccctaatgcaccatattgttggatggcatgggagccatctctcggcgcattttatggaccggcctcctttatcacgttcgttaactgcatgtatttcctgtctatattcatccaactgaaacgacatccagaacgtaagtatgagctcaaagaaccaacagaggaacagcaaaggctggccgctaatgaaaacggtgagatcaaccaccaggactccatgagtctttctctcatctccacatccgcgctagagaatgagcacacattccattcacagctcttgggggcctcattgacattgctcctgtacgtcgccctttggatgttcggcgctctcgcggtttccctctactacccactcgatctcgtcttctcattcgtgtttggtgcaacgagtcttagtttttctgctttcttcgttgttcatcactgtgtcaatcgcgaagacgtgagactcgcgtggattatgacctgctgtcccggtaggtccagttacagcgtgcaggtcaacgtgcagcccccgaattccaatgggactaatggtgaggccccaaaatgtccgaacagctccgccgagagttcctgcaccaacaagtccgcatcaagctttaagaacagctcccagggatgcaaactcactaacttgcaggcagccgccgcccagtgtcatgccaattctctaccactgaatagcaccccccagctggacaatagtctgactgagcactccatggataacgatatcaaaatgcacgtcgcccctctggaagtgcagtttagaaccaacgtgcatagcagccgccatcacaagaataggagtaaaggccacagggcttccagacttaccgtgctgcgggagtacgcttacgacgtcccgactagcgtcgaagggtccgtgcagaatggactccctaaatctcgcctaggaaataacgagggccactctagaagccgaagggcctacctcgcctacagagagaggcagtacaatccccctcaacaggatagttctgacgcatgctcaaccctgcccaagtcatcaaggaactttgagaagcccgttagtactacatctaagaaagacgctctgaggaaaccagccgttgtggagctcgaaaaccaacagaaaagttacggcctgaaccttgcaattcagaacgggccaatcaaatccaacggtcaggagggtcctctgctcggcacggacagtaccgggaacgtgcgcaccggcctttggaaacatgaaaccacagtgtag

SEQ ID NO: 117775 - DNA, 1851 bp, synthetic construct
  misc_feature 1..1851: note = Description of Artificial Sequence: Synthetic coding sequence
  source 1..1851: mol_type = other DNA
atggaacctcccggccgaaggaggggccgcgcccagccacccctgttattgcccctgtctctactcgctctacttgcactcttgggaggtgggggagggggaggggctgcagccctgcctgccgggtgcaagcacgatgggagacctagaggcgccggcagagctgcgggcgcagccgaagggaaagtggtgtgtagctccttggaactcgctcaggtgttaccccccgacactctccccaaccgcacagtgaccctcatcttgtcaaacaataaaatctcagagctgaaaaacgggtcattctctggcctgagtctgttggagagactcgacctccggaataacctgatcagctcaattgaccccggagctttctgggggctgagttcactcaagaggttggatctgaccaataataggattgggtgccttaatgccgacatattccgtggacttaccaatctggtgcgtctcaatctgtcaggcaatctattttccagcctgtcacagggaaccttcgactatctggcttcactgaggtcactggaattccagactgaatatctgctgtgcgattgtaatattctctggatgcatagatgggttaaggaaaagaatattaccgttcgcgacactcgatgcgtttatcccaaatctctacaggcacagcccgttacaggagttaaacaggaactcctgacgtgtgatccacctctggaactcccctccttttacatgacgccttcccacagacaggtcgtgtttgagggtgactcgctgcctttccaatgtatggccagctacattgaccaagatatgcaggtgctgtggtatcaggacgggcgtatcgtcgaaaccgatgaatcccaggggatctttgtagaaaaaaatatgatacacaattgttcactgattgcaagtgccctcaccatctccaacatacaggccggatccacgggaaactggggctgccatgtccagacaaagcgaggaaacaatacaaggacggtagacatcgtagtcctcgagagctctgcccaatattgcccacccgagcgcgtggtcaacaataaaggagactttaggtggccacgaacactcgccgggatcactgcctatctacagtgtacccggaacacgcacggcagcggcatttacccaggcaacccacaggacgagcgcaaggcctggcggcgctgcgaccggggcggattctgggcagacgacgactactcacgctgccagtatgctaacgatgtcacaagggttctctatatgtttaaccagatgccacttaatctgaccaatgccgtggctacagctaggcagctgctggcctacacagttgaggctgccaactttagcgacaaaatggacgtgatcttcgtggccgagatgatcgagaagttcggtagattcaccaaggaggagaagtctaaggagcttggtgacgtcatggttgatatcgcctctaatatcatgctggcggacgagcgcgtgctctggctggcccagagagaggctaaggcctgcagcagaatagttcagtgcttgcaaaggatcgcaacttatcggctcgccggtggtgcccacgtgtactcaacatatagcccgaacattgcacttgaggcttatgtgatcaagtcaactggcttcaccggcatgacatgcactgtcttccagaaagtggccgctagtgatcggaccgggctctccgattatggacggagagatcccgagggaaacctggataagcagcttagtttcaagtgcaatgtgtcaaacacttttagctcactggcactgaaagtgtgctatatactgcagtcctttaagaccatatatagctag

SEQ ID NO: 117776 - DNA, 1146 bp, synthetic construct
  misc_feature 1..1146: note = Description of Artificial Sequence: Synthetic coding sequence
  source 1..1146: mol_type = other DNA
atgccactcaagagaaataactcaaaatacccccccctggagcttccatccttctatatgacgccgtcccacaggcaggtagtgttcgagggggattctctgccttttcagtgcatggcaagctacattgatcaggacatgcaggtgctttggtaccaggacgggcgcatcgtggagacggacgaaagtcaaggtatattcgtggagaagaatatgatccacaactgttcactcatcgcaagcgccctgaccattagcaacatacaagccggcagcacaggtaattggggctgccatgttcaaaccaagcgcggtaacaacacgcgcaccgtcgatatagtagtccttgaatcctcagctcagtattgcccccccgaacgggtggtgaataacaagggggatttcagatggcctagaacgctagcaggcattacggcctacctccagtgtacgagaaatactcacgggagcggcatctaccccgggaacccacaggacgagagaaaggcatggagaagatgcgatcgaggcgggttctgggctgatgacgactatagccgttgtcaatacgcaaacgacgtgacaagggttctgtacatgttcaaccaaatgcctctaaacctaaccaacgctgtggcaaccgcaagacagctgctggcttacacggtcgaggctgccaacttctctgataaaatggatgttatttttgtggccgagatgatcgaaaaattcggccggttcaccaaggaggagaagagcaaggaacttggggacgtcatggtggacatcgccagcaatataatgttggccgatgagagagtgctctggctcgcccaaagggaagcaaaagcttgttcgcgaatagtacagtgtttacaacgaattgccacataccgcctggccggtggagcccacgtttatagcacatacagtccaaacatcgctctggaggcctatgtgatcaagagtacaggcttcacaggcatgacctgcaccgttttccaaaaggttgctgcttccgataggaccggtctctccgattatgggagacgggatcccgagggcaacctggacaagcagctgtcttttaagtgtaatgtgtccaatactttcagttctctggctctcaagggaaaattccgttag

SEQ ID NO: 117777 - DNA, 2724 bp, synthetic construct
  misc_feature 1..2724: note = Description of Artificial Sequence: Synthetic coding sequence
  source 1..2724: mol_type = other DNA
atgccaactgcagctgcccctataattagtagcgtccagaagctcgtcctgtatgagacaagggctagatatttcctcgtcgggagtaataatgctgagactaagtatagagttctcaagattgacaggacagaacccaaggacctggtaattatcgatgaccggcacgtgtacacacaacaagaggtgcgggagctactgggccgtctggatctgggcaaccgaaccaaaatgggtcagaaagggtcctctgggctgtttcgcgctgtctccgcgttcggcgtcgtgggcttcgtccgcttcttagagggttattacattgttctcatcacaaagcgtcggaaaatggccgacattggtgggcatgccatctacaaggtggaggacactaatatgatctacatcccaaatgattctgtgagggtgacccacccagacgaggcccggtacttgaggattttccaaaatgtcgatctttctagcaacttttatttttcctattcatacgacctatcgcatagtctgcaatataaccttactgtcttaaggatgcctctggaaatgctaaagagcgagatgacccagaaccgccaggaaagtttcgacattttcgaagatgaaggcctgatcacacagggggggagcggggtatttgggatctgtagtgagccctacatgaagtatgtctggaatggcgagcttctggatatcatcaagagcactgtgcaccgtgactggctgctgtacataatccacgggttctgcggacagagtaagctcctcatttatgggcgccctgtgtatgtcaccttgatcgcccggcgatcaagcaagtttgcagggacacgcttcctgaagcggggtgctaattgcgaaggggatgtcgccaatgaagtcgaaaccgagcagatcctctgcgacgcaagcgtcatgtcattcacagccggctcctattcctcttatgtccaggtgcgcggctctgtgcccctctactggtcacaagatattagtacaatgatgcctaaacccccgataaccttagaccaggccgacccattcgcccacgtggcagctctccacttcgatcagatgtttcaacgctttggctctccaatcattatactgaacctggtgaaggagcgagagaagagaaaacatgaacggattttgtctgaagaactcgtggccgctgtgacctacctcaatcagttcctgcctcctgaacatacaatagtgtacataccatgggacatggctaaatatacaaagagcaaactctgcaacgtgctggacaggttgaatgtcattgccgaatccgttgtgaaaaagaccggattctttgtgaaccgccctgattcatactgttctatacttcgccctgatgagaagtggaacgaactgggaggatgcgtgattccaacaggtcggctgcagaccggtatactgcgcactaattgcgtggactgtctggatcgcactaacacagcccaatttatggtgggaaagtgcgctttggcgtaccagctgtacagtctggggctcatcgacaaacccaacctgcagtttgataccgacgccgtacggttgttcgaggaattgtacgaggaccatggagacacactgtctctgcaatacggtggctcacaactcgttcatagagtgaagacatacagaaagatcgcgccttggactcagcattctaaggacatcatgcaaaccctgagtagatactatagcaacgccttttctgacgcagaccgtcaggatagcatcaacttgtttctcggggtgtttcaccccaccgagggtaaaccacacctgtgggagctgcccaccgacttttatttgcatcacaaaaataccatgaggctcctgcccacccgccggtcgtatacatactggtggaccccagaagttattaagcatctccctctgccatatgacgaggttatctgtgcagtcaatctcaaaaaacttatcgtgaagaagttccacaagtacgaggaggaaatcgacattcacaatgagttcttccgcccctacgaattgtcgtcttttgatgataccttctgtcttgcgatgacctcatccgcccgagattttatgcccaagaccgtgggtatcgatccctccccatttaccgtccgcaagcctgacgaaaccggcaagagcgttttaggcaacaaatcgaatcgcgaggaagccgtgcttcagcggaaaaccgccgctagtgccccccctcccccctccgaggaggcggtgagctcctcctccgaagacgattccggcactgaccgggaggaagagggctccgtgagtcagaggtctacaccggtgaagatgaccgacgccggagattcagcaaaggtaacggaaaacgtggtgcagcccatgaaagaactgtatggtattaacctctctgacggcttgagtgaggaggacttttcaatctacagtcgtttcgtacagctcgggcaatcacaacacaagcaggacaagaatagtcagcagccatgttcccgttgttccgacggagtgatcaagctgacaccaattagcgcctttagtcaggataatatctatgaagtgcagcctccccgagttgaccggaagtcgactgagatttttcaggcccacattcaggcgagccaggggataatgcaaccactggggaaggaggactccagtatgtaccgggagtacatcaggaaccggtacctgtag

SEQ ID NO: 117778 - DNA, 3582 bp, synthetic construct
  misc_feature 1..3582: note = Description of Artificial Sequence: Synthetic coding sequence
  source 1..3582: mol_type = other DNA
atgatgttccgtagtgatagaatgtggtcctgtcattggaaatggaaacccagccccctgctttttctgttcgcactctacatcatgtgtgtgccacactccgtttggggatgtgcaaactgccgagttgttctcagcaatccatccggtacattcacatcaccgtgttatccaaacgactatcccaatagccaggcttgtatgtggacccttcgggctcccaccgggtatataatacagatcaccttcaacgacttcgatatcgaggaagcaccgaactgtatctatgatagcctgagcctagataacggggaaagtcagacaaaattctgtggggctacagctaagggtttgagtttcaatagttcagcaaatgagatgcatgttagcttcagctctgactttagtatccagaaaaaaggatttaacgccagttacatcagggttgctgtcagtctgaggaaccaaaaagtcatcctgccgcagacatcagacgcttaccaagtaagcgtagccaaatccatttctatacccgagctctctgcgtttactctgtgtttcgaggccacaaaggtaggccacgaggactcagattggactgccttttcatatagcaacgcaagcttcacacaactgctgtcatttggcaaggcgaaaagtggctatttcctctccatttcagacagtaagtgtctattaaacaacgccttacctgtaaaagaaaaagaggacattttcgcagagtcctttgagcagctgtgcctggtctggaacaattcgctagggtcaataggagtaaactttaaacggaactatgagactgtcccgtgtgattccacaataagcaaagttatcccgggcaacgggaagctcttgcttgggtccaatcagaacgagatcgtatcactgaagggagacatctacaacttcagactgtggaacttcacaatgaatgctaagattttgtccaacttgagttgcaacgttaaaggcaacgtggtggattggcagaacgacttctggaatatccccaatttggccttgaaggccgagtctaacctgagttgtggcagttacctgatacctcttcctgccgccgaattagccagctgcgccgacttgggcaccctgtgtcaggatgggatcatctaccggatctccgtggtcatacaaaacattctgaggcaccctgaagtcaaagtccagagcaaggtggccgaatggctgaatagtacatttcaaaattggaactatacagtgtacgttgtgaatatttcgttccacttgagcgctggggaggataagattaaggtcaaaagatccctcgaggatgagccacgcctggttctgtgggccctcctggtttataatgctaccaacaataccaatctggaaggtaagatcatccagcaaaagctgttaaaaaataacgagagtctggatgaaggtctgcggctccatacagtaaatgttcggcagctgggtcactgcctcgctatggaggagccaaagggttattactggccgagtatacagccatcagagtacgttttgccttgtcccgataagccaggcttttcagcatccagaatatgcttctacaacgcgacaaaccctctggtgacttattggggccccgtagatatctctaattgtctcaaagaagccaatgaggtggccaaccaaattctcaatctgacagcggacggccaaaaccttaccagcgctaacataaccaacatcgtcgagcaggtgaaacggattgtgaacaaggaggagaatatcgatattacactgggaagcacgttgatgaacatattctcaaatatcttaagcagctctgacagcgatttgctggagtcgagctcagaggcccttaaaaccattgacgaactcgcattcaagatcgacctgaattcgacctcccatgtgaacataaccactagaaatctggccttgtccgtcagtagcctgctccctggcacaaacgccatctcaaatttctctattgggttaccatcaaacaatgagtcatatttccaaatggatttcgagtctggacaagtcgaccccctcgcctctgtaatcctgccccccaatcttcttgagaatttgtcgccagaggattccgtactagtgaggcgggctcagttcactttctttaataaaaccggattatttcaggacgtaggccctcaacgcaaaactctcgtcagctacgtgatggcatgctccataggaaatataaccattcagaaccttaaggacccagtgcagattaagattaaacatacaagaacccaagaagttcatcaccctatttgtgctttttgggatctaaacaaaaacaaatcctttggcggctggaacacttctgggtgcgtggctcacagagactcagacgcctccgagaccgtgtgtctttgtaatcatttcacccactttggcgtgcttatggacctccctcggtccgcatctcaactagatgcccgaaacaccaaagtgttgacgtttatcagctacatcgggtgcggaatctccgctatcttttccgccgcaacattgctcacatacgtagcttttgagaaacttcgccgcgactaccccagcaaaatcctgatgaatctcagcacggcactactgttcttgaacctccttttccttctggacggctggataacatccttcaacgttgatggcctgtgcatcgccgtcgccgttctgctgcacttttttttattggccactttcacctggatgggcctcgaagctattcatatgtacatcgcattggtcaaagtattcaatacctacattcgcaggtatatcctcaaattttgcatcatcggctggggattgcctgcgttagttgtgtctgtggtgctcgcctcaaggaataataacgaggtatacggtaaagagtcttatggtaaagagaaaggtgacgagttctgttggatccaggatcccgtgattttctacgttacatgtgctggctactttggggtgatgttcttcttaaacatcgctatgtttattgtcgtcatggttcagatctgcggacggaacggtaagcgatcaaatcgtacattgagagaggaggtgttgaggaatttgcggagcgtggtctctctgactttcctacttggcatgacatggggttttgccttcttcgcctgggggcccctaaatatcccattcatgtatctgttttcaatctttaacagcttacaggggctgtttatctttatcttccactgtgccatgaaggaaaatgtgcagaagcaatggagacagcatttatgttgtggaaggtttaggctggcggacaattctgactggagcaaaaccgccaccaacatcatcaaaaaatcttcagataatttgggtaagtcattgtcatcatcaagcattggatcaaatagcacatacctgacgtctaaaagtaaaagctcctcaacgacgtattttaaacgaaacagccacaccgacaatgtttcctacgaacatagctttaacaagagtggtagcctacggcaatgtttccacgggcaggttttggtgaaaacaggaccctgctag

SEQ ID NO: 117779 - DNA, 3669 bp, synthetic construct
  misc_feature 1..3669: note = Description of Artificial Sequence: Synthetic coding sequence
  source 1..3669: mol_type = other DNA
atgatgttcaggtctgatagaatgtggagttgtcattggaaatggaaaccatctccactccttttcttatttgcgctctatatcatgtgcgtccctcattccgtgtgggggtgcgccaactgtcgagtcgtgctctccaatccaagtgggacatttacatcgccttgctatcccaacgactaccctaatagtcaggcctgtatgtggaccttgcgcgcccccactggttacatcatccaaattaccttcaacgactttgatatcgaagaagcccctaactgtatttatgatagtctgagcctggacaacggcgaatcccagactaagttttgtggagccacagcgaaaggactgtctttcaactccagcgccaacgaaatgcatgtgagtttctctagtgactttagtattcaaaaaaagggcttcaatgcatcctatatccgcgtggccgtgagcctgcgaaatcaaaaggttatcctgccccaaacatctgatgcctaccaggtgagcgttgcaaaatctatatctatacctgagctgtcagcatttacgctgtgttttgaggccaccaaggtcggacatgaggattccgattggacagctttcagttactctaatgcctcatttacccagctgttaagttttggaaaggccaagtccggctatttcctgtctatcagtgacagcaagtgtcttctgaataacgcactgccagttaaggagaaagaggacatctttgctgagtcattcgagcagctgtgcttggtctggaataactccctaggatccattggcgttaactttaaaaggaactacgaaacggttccttgtgatagcactatcagcaaagtgatccctggtaatggcaaactgctcctcggcagtaatcagaacgagattgtgagcctgaagggcgacatctacaacttcagattatggaacttcacaatgaacgctaagatcttgtctaacctatcctgtaacgtgaaagggaacgtggtggattggcagaacgacttctggaatatacctaacctggctctgaaagctgaatcaaacctctcttgcggttcttatttgattccactccctgccgccgagcttgcctcctgtgcagatctggggaccctgtgccaggacggcataatatatagaatatccgtcgtgatccaaaacatactccgccaccctgaagtgaaagttcagagcaaggtggcggaatggctgaatagcacatttcagaattggaactacactgtctacgtggtgaatataagcttccatctatccgctggggaggacaaaattaaggtcaaacgctctctggaagatgaaccacggctggttctgtgggctctgctggtatacaatgctactaataatacaaatctggaaggcaagatcattcagcagaagcttctgaaaaacaacgagtcgcttgatgagggactcaggctccatacagtaaacgtccggcagttgggccactgccttgccatggaggagcctaagggatattactggccatctattcagccctcggagtatgtcctcccttgtcccgataaacccggtttcagcgcatcacggatctgcttctacaatgcaactaatcctttggtcacatactggggtcctgtggatatttccaactgtcttaaggaggccaacgaggtggcgaatcagatcttgaacctgaccgctgacgggcagaatctgacgtctgccaacataacaaatatcgttgagcaagtaaagcggatcgtcaacaaagaggagaacatcgacataacgctgggcagcaccctgatgaacatctttagcaacattctgagcagttccgacagcgatctgctcgaatcttcaagtgaggctctgaagaccattgacgaactggcttttaagattgacctgaactccacgtctcatgttaacataactactcggaatctagccctgagcgtgagtagcctcctgccagggacaaatgccatcagtaacttctcaatcggactgccttccaataatgagagctacttccagatggattttgaaagtggtcaagtcgacccacttgcctccgttattttacctccaaatctcctggaaaacttgtccccggaagacagcgtgctggtgcgacgcgctcagtttacattctttaacaagaccggattgtttcaggatgttggacctcagagaaagactctggtgagttatgtgatggcttgtagtatcgggaatataaccattcagaacctcaaggacccagtccagataaaaattaagcacacccgaactcaagaggtccaccaccctatctgcgccttttgggatctcaacaaaaacaagagttttggcggttggaacacttccgggtgcgtcgcgcatagggatagtgacgcatcagaaacagtgtgcctatgcaatcactttacccactttggcgtgctaatggacctgcctcgtagtgcatcccaactggacgctagaaatacgaaggtgctcacatttatctcatatataggctgcgggatcagcgccatcttttccgcagccaccctgctgacttatgtggcctttgagaagctgaggagggattatccaagtaagattctgatgaacctgtccacggccctgttgttcctgaatctgctgttcctcttggacgggtggattacatcctttaacgttgatggcctgtgcattgcagtcgccgttctgctccacttcttcctgcttgctacatttacttggatggggttggaggccatacacatgtacattgccctggtaaaagtcttcaacacatatatccgtcgttacattctcaagttctgcataattgggtggggactgcctgcactagttgtttctgttgttttggcttcacggaataataacgaggtgtatgggaaggagtcttacggcaaagagaagggcgacgaattctgttggatacaggatcccgtgattttttatgtgacttgtgccggctatttcggggtaatgttctttctcaacatcgccatgtttatcgtggtgatggtgcagatttgtggccgaaacggcaaacgtagcaaccgaaccttgagggaagaggtgttgcgcaacctgcgcagtgtggtttctttaaccttcctcttaggcatgacctggggcttcgcattttttgcctgggggcctctgaacatcccattcatgtatcttttttctatcttcaactcattgcaaggactgttcattttcattttccattgcgctatgaaagaaaacgtccagaagcaatggcgccaacatttgtgctgtgggcgatttaggctcgcagataactctgactggtctaaaaccgctacaaacattatcaaaaaatccagcgacaacctggggaaaagcttatcctcaagcagcattggttccaacagtacatatttgacatccaagtcgaaatcctcttccacgacgtacttcaaaaggaacagtcatacagattcagcctccatggataagtcactgtctaagctggcacacgctgatggtgatcagacttcgataattcccgtccaccaggtgatcgataaagtcaagggatattgtaacgcgcatagcgacaacttttataagaatatcataatgtcagatacattcagtcatagtaccaagttctag

SEQ ID NO: 117780 - DNA, 3753 bp, synthetic construct
  misc_feature 1..3753: note = Description of Artificial Sequence: Synthetic coding sequence
  source 1..3753: mol_type = other DNA
atgatgttcagaagtgatcgaatgtggagttgtcactggaagtggaagccatcgcctttgctatttcttttcgccctatatattatgtgtgtgcctcactcagtgtggggatgtgccaattgccgggttgtcctgtccaatcccagtggcacatttaccagtccatgttaccccaacgactatcccaactctcaggcctgcatgtggaccctccgcgcgcccaccggctacattatccagatcacgttcaatgacttcgatatcgaggaggccccaaattgcatttatgattccctgtccctggacaatggcgagtctcaaaccaagttctgtggcgcaaccgccaaagggctgagctttaactcatctgctaatgagatgcatgtgtctttcagtagcgatttctccatccagaagaagggattcaatgcctcatatatccgcgtcgcagtgtcactgcgcaatcagaaggtgatcctgcctcaaacaagcgatgcttaccaggtatcagtggcaaaaagcatctcaatcccggaattgtccgcgttcactctctgtttcgaggctactaaggtgggccacgaggatagtgactggactgcattctcctactctaacgcctctttcacccagctgttgtccttcggcaaagccaagtccgggtactttctgagcatctcggacagtaagtgtttactaaataacgccttgcccgtgaaagagaaggaagacatatttgccgagtcttttgagcagctgtgcctggtatggaataacagtttaggtagtataggcgtgaatttcaagaggaactacgaaactgtgccttgcgatagtactatttcaaaggttatccccggaaatgggaagttgctcctgggaagcaaccagaacgaaattgtgtcactcaaaggagatatttataatttccggctctggaactttactatgaatgcgaagattttatcgaatcttagttgtaacgtgaaagggaatgtggtggactggcagaatgatttctggaacatcccgaacctggcactgaaggcagaatccaatctatcctgcggttcctatctcatcccactaccagccgctgagctggcaagctgtgctgacctgggaaccctatgtcaggccacagtgaattctccatcaaccaccccaccgacagttaccaccaatatgccagtcaccaatcgaatcgataagcagcggaatgatggcatcatctacaggatatcagtggttattcagaatatcctgcgacacccagaggtaaaggtccaatcaaaggtggcggagtggttgaattcgacttttcagaactggaattacaccgtgtacgttgtcaacatctcattccatttatccgcaggggaggataagataaaagtgaaaagatctctggaagatgaaccacgcttggtcctctgggcactgctcgtatataacgccacgaacaacactaatctagagggcaaaattattcagcaaaaactgctgaaaaacaacgaaagcctggacgaggggttaagactgcacaccgttaacgttcggcagctaggccattgcttggctatggaagaacccaagggctattattggccttcaatccaaccctcagagtacgttctgccatgtccagacaagcctggtttttccgctagtagaatttgtttctataacgcaacaaaccctctcgttacatattggggccccgttgatatcagtaactgtctaaaggaagccaacgaggtcgcaaatcagatcctgaatctaaccgctgatgggcagaacctcacgtccgctaacattaccaacattgtagaacaggtcaagcggattgttaacaaagaagaaaacatcgacattacgcttggatccacactgatgaacattttctctaatatcttgagttctagcgacagcgatctgctcgagagctctagcgaggcacttaagaccatcgacgagctcgccttcaagattgacctgaactctactagccacgtcaacattacaacaagaaacttggcactgagtgtaagctctctcctgcctggcaccaacgctatctccaatttctctatcggactgccctccaacaatgagtcatacttccagatggatttcgagtccgggcaagtagaccccctcgccagtgttatcctcccacccaatctcctggaaaaccttagcccagaggacagcgtcctggtgcgcagagcccaattcaccttttttaataaaactggcctgttccaggacgttggcccacagcgaaagacgctcgtctcttacgtgatggcgtgtagcattgggaacatcacgatccagaacctgaaggacccagtgcagattaaaatcaagcacacacggacacaggaggttcaccatccgatctgcgcgttctgggacttgaataaaaataagagcttcggaggctggaacacgagcggatgcgtcgcacaccgcgactccgacgcctctgaaactgtgtgtctttgtaatcatttcacacacttcggcgttctaatggacctgcctcgaagcgcctcccagctggatgcaagaaacaccaaggtgcttaccttcatttcttatatcgggtgcggcatctcagcaattttcagtgcagctactctgctgacttatgtggcctttgaaaagctgcggcgcgattaccccagtaagatcctaatgaacctgtctactgcgctgttatttctcaacttgttgtttcttctggatgggtggataacaagcttcaatgtagacggcctttgtattgcagtagctgtgctgctccatttcttcctcctagcaactttcacttggatggggctggaggcgatccacatgtatatcgcgcttgtaaaggtttttaacacatacatcaggaggtatatcttgaagttttgcattataggctggggcttgccggctctcgtcgttagtgtcgtgctagcaagtagaaataataacgaagtgtacgggaaagaatcatacggcaaagagaaaggcgatgagttctgctggatccaggatcctgtaatcttctacgtgacttgtgcaggatacttcggtgtgatgtttttcttgaacatcgcaatgtttatcgtggtcatggtccaaatatgtgggcggaacggcaaacggtccaatcgcacgctccgggaggaagtcctgaggaacctgcggagtgtcgtgagcctgaccttcttactcggaatgacatggggcttcgccttctttgcctggggaccacttaacataccattcatgtatctgttcagcatcttcaactcgttgcaaggcctgttcatctttattttccactgcgctatgaaagaaaatgttcagaagcaatggaggcaacacttgtgctgcggaagattcagactagccgataattccgattggtccaaaacagccacaaacatcattaagaaatcgtctgacaatttaggtaagagcttgtcttccagctccatcggcagtaactcaacctacctgacaagcaagtcaaagtctagtagtaccacatactttaaacgaaattctcataccgactcagcctccatggataaatcactatccaaactggctcatgccgatggtgaccaaacaagtattattcctgtccatcaagtgatagataaggtgaagggttattgcaacgcgcattccgacaacttctataaaaatataatcatgagcgatactttttcccattcgacgaagttttag

SEQ ID NO: 117781 - DNA, 2394 bp, synthetic construct
  misc_feature 1..2394: note = Description of Artificial Sequence: Synthetic coding sequence
  source 1..2394: mol_type = other DNA
atggcatcctgtcgggcttggaacttgcgggtacttgtagctgtcgtatgtggactgcttactggaattattcttggtcttggcatctggaggatagtcatcagaatccagaggggtaaatctacttcttcatcctcaactcctaccgaattttgcaggaacggaggcacctgggagaatgggcgctgcatctgcacagaagagtggaaaggactccgatgcactatcgctaatttctgcgaaaattctacctacatgggttttacattcgctcgaattcccgtcggccggtacggccctagtcttcaaacatgcgggaaagatacccctaatgccggaaatcctatggcagtgcgtttgtgctccttgagcttatatggggagattgagttgcagaaggtcacgatcggcaattgcaatgaaaacctagaaactcttgagaagcaggtcaaggatgtaacagctccactgaataacataagctctgaggttcagatcctgactagcgacgctaacaagttgaccgccgagaacattacatctgccacgcgggtggtgggccaaatcttcaacacgtctaggaacgccagccctgaagctaagaaggtagcaatagtaacagtttcgcagctcctcgacgccagcgaagatgcttttcagagggtggccgccaccgccaatgacgacgccctgacaacgttaatcgaacagatggagacttatagcctgtccctgggaaaccagtcagtggttgaaccgaatattgccatccaatccgcaaatttttcctcagaaaacgctgtcggcccatctaacgttagattttccgtccagaagggcgccagctcctcattggtgtcatcatcgacgttcattcacactaacgttgatggactgaatcctgacgcccagacagagctgcaggtgctccttaacatgaccaaaaactacaccaaaacatgtggattcgtcgtgtaccagaacgataagctgtttcagtcaaaaactttcaccgccaagagtgacttctcccagaaaattattagcagcaaaaccgacgaaaacgagcaggatcagtcagcaagcgtggacatggtgttcagtccaaagtataaccagaaggagttccagctctactcctatgcctgcgtttattggaacctgagtgcaaaagattgggacacatacggctgtcagaaagacaaggggacagacggtttcctgcgctgtaggtgcaatcatacaaccaattttgcagtcctcatgaccttcaagaaagactaccaataccccaagagtttagacatcctcagcaatgtcggctgtgcgctctccgtgacgggtctggcgttgacggtgatattccagattgttacacgcaaagtgaggaaaacaagcgtaacctgggtcctggttaatctgtgcatctctatgctcatctttaatttactgttcgtatttgggattgagaactccaacaagaaccttcagacctcggacggtgacattaataatatcgacttcgacaacaacgacattccacgcaccgatactattaatattcccaaccccatgtgcactgctatagcagctttgctgcactatttcctcctggttacttttacttggaatgcactgtctgccgcccaactgtactatctgttgatccgaacaatgaagcccctcccacgccacttcatactcttcattagtcttattgggtggggtgttcctgccatcgtggtggcgatcaccgtgggggtaatctattctcagaatggcaataatccccagtgggagctggactaccgccaagaaaagatctgctggcttgcaatcccggaacctaatggagtcatcaaaagccctcttctctggtcctttattgtgcctgttacgattattttgatttctaacgtggtgatgttcatcacaatttcaatcaaagtgctgtggaagaataatcagaacctgactagcacaaagaaggtctctagtatgaagaagatcgtttcgacactgtccgtggcagtggtctttggcatcacttggatattagcctacctgatgttagtgaacgatgatagcatacgcattgttttctcatacattttctgtctgttcaacactacccagggcctccagatcttcatcctgtacactgttaggactaaagtgtttcagagcgaagctagcaaggtgttgatgctgctgtcttctattggacggagaaaatctctacccagtgtcaccagaccccgattgagggtgaagatgtacaactttttaagaagtttaccaactttacatgagagatttaggcttctcgaaacgagcccgtcgacagaagagattaccttatcagagagcgacaatgctaaggaatctatttag

SEQ ID NO: 117782 - DNA, 1509 bp, synthetic construct
  misc_feature 1..1509: note = Description of Artificial Sequence: Synthetic coding sequence
  source 1..1509: mol_type = other DNA
atgccggtgaaaatgctcttcaaggagctgctgctgctcctgatgatgatgcccctgcaacattacactaagacctgtgggttcgttgtctatcagaacgataagctcttccagtccaagacttttaccgccaagtccgacttctcacagaagatcatttcttctaagactgacgagaatgaacaggatcagtcagctagcgtggatatggtgttttcccctaagtacaaccaaaaggaatttcaactctatagttatgcctgtgtatactggaacctgtctgccaaggactgggacacatatgggtgtcaaaaagacaaaggaaccgatggcttcctgagatgccgttgtaatcatacaacaaatttcgcagttctcatgacatttaaaaaggattaccagtatcccaagagtctcgatattctttcaaatgtagggtgcgcactgtccgtgacaggcctcgcgctgacagtaattttccaaattgtgacacggaaggtgcggaagacttcggttacctgggttttggtcaatctctgcatctctatgctgatattcaacctgctgtttgttttcgggatcgaaaattctaacaaaaatctccagacaagcgacggagacatcaacaacatagactttgacaacaatgacatcccacggactgacacaatcaacatcccaaacccaatgtgcacagcaatcgctgccctcttgcattactttctcctggtgaccttcacgtggaacgctctgtccgcagcacagctgtattatttgctcatacgaacgatgaagcctctgccgcgccacttcatattgtttattagccttatcggttggggcgtgcctgcaatcgtcgtcgccatcacagtgggggttatctactctcaaaatggtaacaacccccagtgggagcttgactaccgtcaggagaaaatctgttggctggctatccccgaacccaatggagtaattaagtctccactcttgtggtcattcatagtgcctgttacaatcatattgatctctaacgtagtcatgtttattacaatcagcattaaggtgctgtggaaaaacaatcagaacctgacctcaactaaaaaagtgagctcaatgaagaaaatcgtcagcaccctgtctgtggcggtggtgttcggaattacctggattctggcgtacctcatgctcgtgaacgatgactccatccggattgtgttcagctacatcttttgcttatttaatacaacacagggtctccaaattttcatcctgtacaccgtgcgcaccaaggtctttcagtcagaggcttcgaaagtcctgatgctgcttagctccatcggacggagaaagtctctcccctctgtcactagaccgcgcctccgtgtcaaaatgtacaatttcctgaggtccctgcctactctacacgagcgattcagactgttggagaccagcccaagtaccgaggagatcaccctgagcgagtcagataacgccaaggagagtatttag

SEQ ID NO: 117783 - DNA, 1143 bp, synthetic construct
  misc_feature 1..1143: note = Description of Artificial Sequence: Synthetic coding sequence
  source 1..1143: mol_type = other DNA
atgtgtcccatgcttctcaaaaacggctacaatgggaatgcaacgcctgtcacgactaccgccccatgggcctccttaggccttagtgccaaaacttgcaataatgtctccttcgaggagtcccgcattgtcctggttgtcgtctactccgccgtgtgcacgctgggagtgcccgcaaattgcctgacagcttggttagctctgctacaggtccttcaaggtaacgtgctggctgtgtaccttctgtgcctcgcactgtgcgaactcctctacaccggaacgctccctctgtgggtgatatatataaggaatcagcataggtggacccttggtttactggcctgcaaggtgacagcatacatttttttttgcaacatttatgtgtctatacttttcctttgttgcataagctgtgataggttcgtcgcggtggtatacgccctcgaatcgcgcggaagacgtagacggcgaaccgccatcctgatctctgcatgtattttcattcttgtgggaatcgtgcattaccctgtgttccagaccgaagataaggaaacatgttttgacatgttgcagatggattcgcggatcgctggctactactatgcccggttcaccgtggggtttgccattcctttgagtatcatcgcgttcactaaccatagaatcttccgatctattaaacagagcatgggtctgtcagctgcccagaaagcaaaagtaaagcattctgctatcgctgtagtagtgattttcctggtttgttttgctccttatcatttagtactgttggtcaaagctgcagcgttctcctactaccgaggcgacaggaacgctatgtgcggcctggaggagagattgtacacagccagcgtggtgttcctgtgcttgagcactgttaacggcgtggctgatccaatcatctatgttctcgcaaccgatcactcacggcaggaggttagccgaattcacaagggctggaaggaatggagcatgaaaaccgacgtcacaagattaacccatagccgggacacagaggaactgcagtccccagtcgccctcgccgaccattatactttttcccggcccgtccatcccccaggctccccctgcccagccaagagactgatcgaggagtcatgctag

SEQ ID NO: 117784 - DNA, 1116 bp, synthetic construct
  misc_feature 1..1116: note = Description of Artificial Sequence: Synthetic coding sequence
  source 1..1116: mol_type = other DNA
atgccaggtaacgccactccggtaacaaccaccgcaccatgggcaagcctgggcttgtctgccaaaacgtgtaacaatgtgtccttcgaagagtccagaatagtgcttgtggtcgtctactcagcagtctgtaccctcggcgtcccagcaaattgccttaccgcatggctcgcccttctgcaggtgttgcagggcaacgtgttggcagtctatctgttatgcttagccctgtgtgaactcttatacacgggaaccctgccactttgggtcatatacatcagaaatcaacacaggtggacattgggtctcctggcttgtaaggtgacagcttacatctttttttgtaacatctatgtatccattttgttcctttgttgcatttcttgtgatcgcttcgtcgccgtggtttacgctctcgagtcccgtggcaggcgacggcgacgcaccgctatcctgatctctgcttgcatcttcatcctggtcggcatcgtccattatcctgtatttcagacggaagacaaagagacatgctttgacatgctgcagatggactctcggattgctggatattactatgctaggtttacggttgggtttgccatccccctcagcatcatagcttttaccaaccaccggatctttagatccatcaagcagtctatgggtctttcggccgctcagaaagccaaggtgaaacactccgccatcgctgtggtggtcatctttctggtctgtttcgctccataccacctggtgcttctcgtgaaggcggcagcgttttcttactatcggggtgatcgaaatgccatgtgtggtctggaagagagactttacactgcatctgttgtgtttctctgtctatccactgttaacggtgtggcggacccaataatttacgtgttagctactgaccattctagacaggaggtgagtcggatccacaagggctggaaggagtggtccatgaagactgacgtcacaagattaacccactcacgtgacacggaggagctgcagtcccccgtagctctggcggaccactatacattctctagacccgtgcaccctccaggctcgccttgtccggcaaagcgcctaattgaggaaagctgttag

SEQ ID NO: 117785 - DNA, 1143 bp, synthetic construct
  misc_feature 1..1143: note = Description of Artificial Sequence: Synthetic coding sequence
  source 1..1143: mol_type = other DNA
atgtgcccaatgcttttaaagaacggatataacggcaacgccacacctgtgacaaccactgcaccctgggccagccttggcctgtctgctaaaacgtgtaataatgtttctttcgaggagagcagaatcgtactggttgtcgtgtactcagccgtgtgtaccctgggggttccagcaaactgccttacagcgtggctcgcactgttgcaggtgctccagggaaatgttctcgcagtgtatctgctctgtttggctctgtgcgagctcctctacacagggacccttcccctgtgggtcatatacatccggaatcagcaccgttggacattaggtctcctggcttgtaaagtgaccgcctacatcttcttctgcaacatttatgtgagcattctttttctgtgctgcatctcttgtgaccggttcgtagccgtggtttacgccctggagagtcggggacgtaggcggagacgaacagccatcctgattagtgcgtgtattttcattcttgttggcatagtgcactatcctgtcttccaaactgaagataaagagacctgcttcgatatgctgcagatggattcacgtattgccggctattattatgcacgattcactgtgggcttcgccattcccctgtctattatcgcatttactaaccacagaatttttaggtctataaagcagtctatggggctctccgctgctcagaaggctaaggtgaaacactccgctatcgcagtggtagtcatcttcctggtgtgtttcgctccttatcacttggtgctccttgtgaaagcagctgccttttcttattataggggggatagaaatgccatgtgcggcttggaggaacgcctgtatacagctagcgtcgtttttttatgtctcagcacagtcaatggggtggccgatcccatcatttatgtcttggctacagaccacagtaggcaggaagtgtcccgtatacacaaggggtggaaggagtggagcatgaagacggatgtcacacggctcacacacagccgggacacagaggagctccagagccctgtcgcccttgccgatcactatacttttagtagacccgtgcatccccccggctctccatgtcccgcaaaaagactcatagaggagtcgtgttag

SEQ ID NO: 117786 - DNA, 33 bp, synthetic construct
  misc_feature 1..33: note = Description of Artificial Sequence: Synthetic coding sequence
  source 1..33: mol_type = other DNA
atgtgtccaatgttactgaagaatggttactag

SEQ ID NO: 117787 - DNA, 2625 bp, synthetic construct
  misc_feature 1..2625: note = Description of Artificial Sequence: Synthetic coding sequence
  source 1..2625: mol_type = other DNA
atggaaaagctgctgcgactttgttgttggtatagctggctgctactcttctattataactttcaggtgagaggggtgtatagcagaagccaggatcacccaggatttcaagtgctcgcttcagcttcccactattggcctctggagaatgtggacggaatccatgaattacaagacaccacaggagacatcgtggaaggtaaggtcaacaaaggcatctatctaaaggaggaaaagggcgtcacattactgtactatggccgctacaactctagctgcatttccaaaccagagcagtgcggacctgagggagtgactttctcttttttctggaagacccagggagagcagagcaggcccatcccatctgcttatggaggacaagtgatctccaatgggtttaaggtctgtagcagcgggggccgaggaagcgtagagctatacactcgcgacaatagcatgacgtgggaggctagcttcagcccacctggtccctattggactcatgtcctattcacttggaagagcaaagagggattgaaggtctacgtcaatggtacgttatctaccagtgatccaagcgggaaagtatcaagggactatggcgaaagtaacgtcaacctcgtaatcggaagtgagcaggaccaggccaagtgctacgagaatggagcattcgacgagttcatcatctgggaaagggccctgacgcccgatgaaatcgctatgtatttcactgctgcaataggtaagcacgcactgttgagttctacccttccctcactatttatgacctcaaccgcaagccctgtaatgccgaccgacgcctaccatccaataattaccaatctgaccgaggagaggaagaccttccagtctccaggagtcatcctgtcttatctacagaatgtcagcctcagtctcccttcaaagagcctgtccgaacaaacagcccttaatttaaccaagaccttcctgaaagctgtaggcgaaatcctgctgctccccggatggatcgccctcagcgaggactccgccgtggtgttgtccctgattgacaccatcgacacagtgatgggccacgtgtcatccaatctacatggcagtacaccccaggttacagtggaagggtcaagtgccatggcagagttctctgtggctaagattctgcctaaaaccgttaactcttcacactacagattccccgcacacggacagtcttttatccaaatcccgcacgaggccttccatcggcacgcctggagtaccgttgtgggactgctctatcattccatgcactattacctgaataacatctggcccgcccatacaaaaatagcggaggctatgcaccaccaagactgtcttcttttcgctacaagtcaccttatttccttagaggtttctccaccgccaacactgtcacaaaacctgtccgggtcacctctgattacagtgcatctcaagcaccggctgactcggaaacaacatagcgaagctacaaattccagtaacagggtgtttgtgtattgtgctttcctagatttctcctctggagaaggcgtctggagcaatcacggctgtgctctgaccaggggtaacctgacatacagcgtctgccgatgcacccatctgaccaatttcgccatcttgatgcaggtggtgcccctagagttggcccgtggccaccaggtcgctttaagcagtatttcatacgtggggtgcagtttaagtgtgttgtgtctagtagccacactcgtgacctttgctgtgctgtcgtccgtctctaccataaggaatcagaggtatcatattcatgccaatctgtcatttgcagtgctcgtggcgcaggtgctgctgctgatctccttccgcctggaacccggtaccacaccgtgccaggtgatggccgtactgctacactatttttttctctcagcctttgcttggatgttggtagagggcttgcacctgtacagtatggtcatcaaggtgttcggaagcgaagattctaagcatcggtactattatggcatgggttgggggttcccactccttatttgtatcattagcctaagtttcgccatggattcatatgggacatccaataactgttggctctcactcgcttctggagccatttgggctttcgtggcaccagccctgtttgtgattgtcgtgaatattggtattctgatagccgttactcgtgtgatatcccaaatatcagcagacaattacaaaattcatggagacccatcggctttcaaactgaccgcaaaagcggtcgcggtcctgttgcctattcttggtactagttgggtatttggggtgctggccgtgaacggttgtgccgtcgtgtttcagtatatgttcgcaacactaaactcactccaagggctgttcattttcctgtttcactgcttactgaattccgaggtgagggctgccttcaaacacaaaacaaaagtttggtctctcacctccagcagtgctcgaacctccaatgctaagccctttcatagtgacttgatgaacgggaccaggcccggcatggcctctacaaaactgagtccttgggacaaatcctcccattcagcccatagagtggacctgtccgcagtgtag

SEQ ID NO: 117788 - DNA, 687 bp, synthetic construct
  misc_feature 1..687: note = Description of Artificial Sequence: Synthetic coding sequence
  source 1..687: mol_type = other DNA
tagcatggtgtaagcgccagagatgtgctggagtcaagaacacgaaagcaacattctgaagccaccaacagcagcaacagggtgtttgtgtactgcgcgtttctggacttctcaagcggagaaggtgtgtggagtaatcacggctgcgccctgactcgcggaaatctcacctattcggtgtgtcgctgtactcaccttacaaacttcgctattcttatgcaggtggtgcctttggaggtgaatataggcatcctgatcgctgtaacacgagtcataagccaaattagcgctgacaactacaagatccatggggacccctctgctttcaagctgactgcaaaggccgtggccgtccttctcccgatcctgggtacttcatgggtttttggcgtcctggccgttaatggctgcgccgtggtgttccagtatatgtttgccacactgaattcgctgcagggtttattcattttcctgttccactgtctgctgaattccgaggtccgggccgcgttcaaacataaaacaaaagtgtggagtcttactagctcctctgcgaggacctcaaatgctaagccttttcatagcgatctcatgaatggcacacggccagggatggccagtaccaagctgtccccgtgggataaatcttctcactcagctcacagagtggatttgtccgccgtatag

SEQ ID NO: 117789 - DNA, 2721 bp, synthetic construct
  misc_feature 1..2721: note = Description of Artificial Sequence: Synthetic coding sequence
  source 1..2721: mol_type = other DNA
atggaaaagctgttgagactgtgctgctggtacagctggctgctgctgttctattataatttccaggtccggggcgtatactcaaggtctcaagatcaccccggatttcaggttctggcttctgcaagccattattggcccctcgaaaatgttgatggcattcacgaactacaggacaccaccggggcatccaggacacacaagctgactgtgctgccaagccgcaatgctactttcgtgtactcgaacgacagcgcctattccaatttatccgctaccgtggatattgtggagggcaaagtcaataaaggaatttacttaaaagaagagaagggggtcacattactgtactatgggagatacaatagcagttgtatcagcaagccagaacagtgcggccccgagggcgtgacattcagctttttttggaaaacccagggagagcagagcagacccattccaagcgcatatggtggccaagttatctctaacggatttaaagtctgtagctccggaggtcgtggctccgtggaactgtatacacgggacaactccatgacctgggaggccagctttagtccacccggcccctattggacgcatgtgctttttacatggaaatcaaaagaaggcctaaaggtgtatgtgaacggaacactgtccacaagcgatccgtcgggcaaagtctcccgcgattatggcgagtcaaacgtgaacctagtgatcgggtctgaacaggaccaggccaaatgctatgagaacggagctttcgatgaatttataatttgggagagagcattgactccagacgaaatcgctatgtattttacagccgcaattggcaagcacgcactgctttcttccaccctgccatctctttttatgacgtccacggcctcaccagtcatgccaacagatgcttaccatcctattatcacgaacctcacagaggaacggaagacgtttcagtcccccggggtgattctgagttatttgcagaacgtgagcctcagccttcctagtaagtcactttccgagcagaccgcacttaacctgacaaagacatttctgaaggctgtgggcgaaatcctgcttctgcccgggtggattgcactgtccgaagactccgctgtggtcctgtcccttatcgatactatcgacaccgttatgggtcacgtctcgagcaatctccacgggagcactccacaggttacagtggaaggcagtagtgctatggccgaattttcagtggcgaagatcttgccgaaaacagtgaattcctcccattatcgattccctgctcacggacagagcttcatccagattccccacgaggcttttcacaggcacgcttggtccacggttgtgggcttgctgtaccacagtatgcattattatttaaacaacatctggccggcacacaccaagatcgccgaggctatgcatcatcaggactgcctcctattcgcgacatcccatttgatctccctcgaagtctcaccgccccccaccctgtctcagaacctgtctgggtctccccttataacggtgcacctcaaacacagactgactagaaaacaacacagcgaagcaaccaatagctctaacagagtgttcgtttactgtgctttcctggatttcagctctggcgaaggcgtgtggagcaaccacggctgcgccctaacacgcggcaatcttacctattcagtgtgccggtgtacgcacctgacaaacttcgctatactcatgcaagtcgtccctctggaacttgctaggggccaccaggtagcactgtctagcatctcctatgtgggctgtagtctgtcagtgctgtgcctcgtcgccacactcgtgacattcgccgtgctgagcagtgtgagtaccattcggaaccaaagatatcacatacatgccaacctcagtttcgccgtgctcgttgcgcaggtgctcctgctcatctcatttcgactggagccaggcaccacgccctgtcaggtgatggctgtgttgctccactattttttcctctcagcatttgcttggatgcttgtagaggggttgcatctttattccatggtgatcaaagtgtttggaagtgaggactctaagcacagatactactatggtatgggttgggggttccccttgctgatctgtattatctcactgtctttcgccatggatagctacggcacctcaaacaattgctggctgtcactggcttccggcgccatctgggccttcgttgctcccgcccttttcgtaatagtggttaatatcgggattcttatcgccgtgacacgcgtgatatcgcaaatctctgctgacaattataaaattcacggagatcccagtgcgttcaagctgacggccaaagccgtggctgtgttgcttcccattttaggtacatcatgggttttcggcgtgttagccgttaatggctgcgccgtggtgtttcagtatatgtttgctactctgaactccctgcagggactgtttattttcctgttccactgcctactgaatagcgaagtgcgcgccgcttttaaacataaaacaaaggtttggagcctgactagttcttcagcccgcaccagtaacgcaaagccgtttcactctgatctgatgaatggtactcggcccggtatggccagtaccaaactgtccccatgggacaagagcagccactcagcccacagagttgatctcagtgccgtctag

SEQ ID NO: 117790 - DNA, 1275 bp, synthetic construct
  misc_feature 1..1275: note = Description of Artificial Sequence: Synthetic coding sequence
  source 1..1275: mol_type = other DNA
atgacacaggctggtaggcgaggtcccggaactccagagcccaggccccgaacacagcccatggcatctcctcgcctgggcacattctgctgtccaacccgagacgccgccacccaactggttctgtcgtttcagccccgtgcgtttcacgccctctgcctcggttctggaggactacggcttgctctcggacttctgcaacttctgcctggtagacgccctgccgggcccgggagccctgctacaagtcccccagcgtctgtccgcatcctccgcgccgccgccgcatgcgatctgctcggatgcctgggcatggtaattcgaagcactgtgtggttagggtttcctaattttgttgacagtgtctctgatatgaaccacacagagatctggcccgcagccttctgcgtgggcagcgccatgtggatacagctcctgtacagcgcctgtttctggtggctgttttgttatgccgttgatgcctacctggtaatcagaaggagtgcagggctgtctacaatcttgctttaccacattatggcctggggattagccacactcctgtgcgtggaaggggctgccatgctgtattaccctagcgtgtcaaggtgtgagcgggggttggatcacgccattcctcactacgtcacaatgtatctgcccctcttgctcgttttggtggctaatcccatcctattccagaaaacagtgactgcggtggcaagcctactcaaaggacgacagggaatttacacagagaatgaacggcggatgggagcagtgatcaagatacgcttcttcaaaatcatgttagtgctcattatctgttggcttagcaacatcattaacgaatctctgctgttctatttagagatgcagacagacataaacggaggatcactgaaacccgtgcggacagccgccaagaccacctggttcatcatgggtatactgaacccagctcagggttttttgctatccctcgctttttatggctggacaggttgctctttggggtttcaatctccgcgaaaagaaatccagtgggagagcctaaccaccagcgccgctgagggcgctcacccatctcctctcatgcctcacgaaaatccggcaagcggaaaggtgagccaggttggtgggcagacaagtgatgaagcgctcagtatgctgagcgaggggtcagacgcgagcacaatagagattcacacagcgtccgaatcctgtaataaaaatgaaggagacccggcactcccgacacacggggacctgtag

SEQ ID NO: 117791 - DNA, 516 bp, synthetic construct
  misc_feature 1..516: note = Description of Artificial Sequence: Synthetic coding sequence
  source 1..516: mol_type = other DNA
atggtaatccggtcaaccgtgtggctgggcttccctaactttgtcgactccgtcagtgacatgaaccacacagagatttggcccgcggcattttgtgtgggaagtgccatgtggattcagctgctttacagtgcatgtttctggtggttattttgttatgcagtggatgcgtacctcgttatacggcggagcgcggggttgtccaccatcttgctgtaccacataatggcctgggggttggccaccctcctttgtgtagaaggtgccgctatgctgtattatcctagtgtgtcacgatgcgagcgggggttagatcacgccatcccgcactacgttactatgtacttgcccctgttgcttgtgcttgtggccaacccaattttgttccagaagactgtgacagctgtggccagccttctgaagggtagacagggtatctatacagaaaatgagaggagaatgggcgccgtgatcaagatccggttcttcaagatcatgctggttctcatcatctag

SEQ ID NO: 117792 - DNA, 864 bp, synthetic construct
  misc_feature 1..864: note = Description of Artificial Sequence: Synthetic coding sequence
  source 1..864: mol_type = other DNA
tgaacggccggacccgtgacagggagcgcttcaaggggcccagcaagaggtcctaaaggaatggtgattcggtctaccgtgtggttaggattccctaactttgttgactcagtaagcgatatgaatcacactgagatttggccagccgccttttgcgtgggaagtgccatgtggatacagctgctgtacagcgcttgcttctggtggctcttctgctatgcggttgatgcctatttggtcatcaggcgaagcgctggcttatcaaccattctgctgtatcacataatggcatgggggctcgccaccttgctctgtgtggagggagccgctatgctgtactacccttcggtgagtcgatgcgagcgaggattggatcatgcgattccccactatgtcacaatgtatctgccgctcctcctagtgctcgtggccaatcccatcctgttccagaagacggtgacggcagttgcatctctactgaagggtcgtcagggcatctacaccgaaaatgagaggaggatgggcgccgtcatcaagattaggttcttcaagattatgttggtactcattatctgttggctgtcgaacatcattaatgagtccctgctgttctatctggagatgcaaactgatattaatggcggcagcctcaaaccggtgcggacggccgcaaagactacgtggttcataatgggtatcttaaacccggctcaagggttcctcttatccctcgctttctacggatggacggggtgcagtctgggcttccagagccctagaaaggagattcagtgggagtctcttactacatctgcagcggaaggggcgcacccatccccccttatgccgcatgagaacccatag

SEQ ID NO: 117793 - DNA, 1215 bp, synthetic construct
  misc_feature 1..1215: note = Description of Artificial Sequence: Synthetic coding sequence
  source 1..1215: mol_type = other DNA
atggcgtccccacgtctgggaaccttctgctgtccaactcgtgacgctgcaactcagcttgtcttaagcttccaaccgagggcgttccacgccctctgcctcggttctggggggttgagactggccctagggcttctgcagctcctcccggggcgtcgccctgcaggccctggatctcccgctaccagccctccagcgagcgtgcggattctgagggccgctgcagcatgcgacctgctcggatgcctggggatggtaattcgctccacagtgtggttgggtttccctaacttcgttgactcagtcagtgatatgaatcataccgaaatctggccagcggcgttctgtgtggggtccgccatgtggatccagctgctctattccgcctgcttctggtggttgttttgttacgccgtggacgcgtatctggtaattcggaggagtgccgggctgtctaccatccttctatatcacatcatggcctgggggctggccaccttgttgtgtgtggaaggcgcagcaatgttgtactacccatcagtttctaggtgcgaacgaggcctggaccatgcgatccctcactacgttacaatgtacctgccactcctgttggtgctggtggcaaacccaatactatttcagaagactgtgacagccgtcgcttctcttctcaaagggcgccaaggcatttataccgagaacgaacgccggatgggagcagtgataaaaattagattcttcaagattatgctagtcctgatcatctgctggctctcaaatatcattaacgagtcacttctgttctacctggaaatgcaaaccgacataaacggcggatcgcttaaacctgtaagaactgcggcaaaaaccacatggttcatcatgggcattttgaatccagcacaggggtttctgctgtcactggctttttacggctggaccggatgttctctaggattccagtcaccgaggaaggagatacagtgggagtcactgactacatctgctgccgagggcgcccatccaagcccgctgatgccccatgaaaatccagccagtggaaaagtctctcaggtcggcggccagacatccgatgaagctctcagcatgttgagtgaaggaagcgatgcaagcactatcgagatccataccgcatccgagtcttgtaacaaaaatgagggagaccctgccctaccaactcatggggatctgtag

SEQ ID NO: 117794 - DNA, 1083 bp, synthetic construct
  misc_feature 1..1083: note = Description of Artificial Sequence: Synthetic coding sequence
  source 1..1083: mol_type = other DNA
atggacccagaggagacatccgtgtatctcgactattattatgcgacgtcacctaatagcgacatccgagagactcactcgcatgtcccatatacttctgtgttcctgcccgtgttttacacagcagtatttttaactggagttctggggaacctggtgcttatgggggccctgcactttaagccaggatcgagacgactaattgacattttcataatcaatcttgcagcatccgattttatatttctcgtgactctgcccctctgggtcgacaaagaagcttccctcggactgtggcgcacaggttcctttctgtgcaaaggatcttcctacatgatctctgtcaacatgcactgttccgtcctcctgctaacgtgtatgtctgtcgataggtatctcgccatcgtttggcccgtggtgtcacgaaagtttcggagaacagactgcgcctacgtagtgtgcgccagcatttggtttatttcctgcctcctgggtctgcccacactgctctctcgagagctgacattgatcgatgataagccctattgcgcagaaaagaaagccaccccaattaagctcatatggtctctggtagcgctgatattcaccttctttgtccccttgttatcaattgtgacatgttattgttgcattgcgcggaagctgtgcgcccactaccagcagtcaggaaaacataacaaaaagctaaaaaaatcgatcaagattatctttatcgtggtggccgcttttttggtgtcttggctccctttcaatacctttaagtttcttgccattgtttccggcctccgccaagaacactacttgccgagtgcaatcctgcagctagggatggaggtgagtggtccactggcttttgccaattcatgcgtgaatccgttcatctattacatctttgatagctatatccgccgcgcgattgtgcactgcctttgtccatgtctaaaaaactacgacttcggatccagtaccgaaacctccgactcccatctcaccaaagctctgagcactttcatacatgcagaagatttcgcccggaggcgcaagcgatccgtttcgctgtag

SEQ ID NO: 117795 - DNA, 1830 bp, synthetic construct
  misc_feature 1..1830: note = Description of Artificial Sequence: Synthetic coding sequence
  source 1..1830: mol_type = other DNA
atgtctgacgagcgacgattacctggctcagcggtcggctggcttgtctgtggcggcttaagcctcctggccaacgcttggggaatacttagtgtgggtgccaagcagaagaaatggaagccactggaattcttattatgtactttggccgctacacatatgcttaacgtggccgtacccattgccacatattccgtagttcagctccgacgtcagagacctgactttgaatggaacgaaggactgtgcaaagtgtttgtgtcaacattttacaccttgacattagccacctgtttctccgtcacgtctctgagctaccataggatgtggatggtctgctggccagttaactatcgactcagcaatgccaagaagcaagccgtgcacaccgtaatggggatttggatggtgagtttcattctgagcgcactgcctgccgtcggctggcacgatacatccgaaaggttttacactcacggctgcaggtttatagtcgccgaaattggcttggggttcggggtttgtttcctcttattggtgggcgggtccgtggcaatgggagttatctgcactgcaatcgcattgttccaaactcttgcagtgcaggtaggccgacaggcggatcgtcgggcctttacagtccctacgattgtcgttgaagatgctcaagggaagaggagaagctccattgatggctctgagccagctaaaacctcgcttcagactacgggccttgtaacaacaatagttttcatctatgactgtcttatgggtttccccgtgctggtggtttccttctcatccttaagagcggacgctagtgctccttggatggccctctgtgtgctttggtgctcagtggcccaagcacttctcttacctgtgtttttgtgggcctgcgaccgctatcgtgcagatctgaaagcagtacgggaaaaatgcatggcactcatggcaaacgatgaggaatcagatgatgaaaccagcctcgagggagggatctcccccgacttagtgctcgagcggtcactggactacggctacggcggcgacttcgtggccctggacagaatggctaaatacgaaatcagcgcacttgaaggcggactgccccaactgtatcccctgcggccattgcaggaggataaaatgcaatatctacaggtgccgccaacacgtagattttctcatgatgacgcagatgtgtgggccgcagtgccccttcccgccttcttaccccgctggggctccggagaagatctcgccgctcttgcccacttggtgctccccgccggtccagagcgccgcagagccagcctactagctttcgctgaggatgcaccaccctcgagagcacgtcggcgatcggctgaatccctgttatctctgaggccctctgctcttgactccggaccaagaggagctcgggactccccacccggtagtcctcgtcgacggccgggcccaggcccaagaagtgccagcgcttcactcctgcccgatgcattcgcccttaccgcgtttgagtgtgagccacaggccctgaggcgacccccgggccctttccctgcagcccctgctgccccagacggagccgacccaggcgaagcccccacaccaccaagcagcgcccagaggagcccaggtcccagacccagcgctcactcacacgccggatcgctgcggccaggcctcagcgcctcttggggggagccaggggggcttagagctgccgggggtgggggaagtacttccagttttctttcctccccctcagagtcttctggctacgctacacttcacagcgactcactgggaagcgcatcttag

SEQ ID NO: 117796 - DNA, 2445 bp, synthetic construct
  misc_feature 1..2445: note = Description of Artificial Sequence: Synthetic coding sequence
  source 1..2445: mol_type = other DNA
atggagcccgaaatcaactgtagcgagttgtgtgactctttccctgggcaagaactcgatcgcaggccccttcatgacctctgcaaaactactattacgtcatctcatcattctagcaagaccattagctcgttgtctcccgtgcttctaggaatagtctggacgttcctgtcctgtggcttgctgctgattctgttcttccttgctttcacgattcactgcagaaagaaccgaattgtgaagatgtccagccccaatttgaacatagtgacactcttgggctcctgtctgacctacagcagcgcatacctgtttggaatccaagacgtgctcgtagggtcttccatggagaccttaatccaaaccagactgagcatgttgtgcatcggcacttctctggttttcgggccaatcctcggaaaatcctggcggctctacaaagtgttcacgcagcgggtgcccgataagcgagtcattattaaagacttgcagttgctgggtctggttgccgcgcttctcatggccgatgtgatactcctgatgacatgggtgctgactgacccaatccagtgcttgcagatactgtcagtctccatgacagtgaccggtaaggatgtttcatgcaccagtacgtctacccatttctgcgcatctcggtactctgatgtgtggatcgcacttatctggggctgcaaagggcttttattactttacggggcatacctggctgggctgacgggccatgtcagctcccctcccgtgaatcaatctctgaccattatggtgggcgtgaatcttctggttttagccgccggactcctgtttgtcgttaccaggtacctccactcatggccaaacctggtgttcggcctgacatccgggggcatatttgtgtgcacaaccactatcaattgcttcatctttattcctcagctgaaacagtggaaagcctttgaggaagaaaatcaaacaatccgccggatggccaaatacttcagtacgcctaacaagtctttccatacccagtatggcgaagaggagaactgtcatcccaggggggaaaagtcctctatggagagattgctgaccgagaagaacgccgtgattgaaagcctgcaggagcaggtgaacaacgccaaagaaaaaatagtcagactgatgtcagccgaatgtacctatgacctgccagaaggcgcagcacctcctgcttcatcgcctaacaaggatgtccaggccgtggcttccgttcacaccctggccgccgcccagggtccctctggccatctgtcagattttcagaacgacccaggcatggcagcgagggactctcagtgtacgagtggacctagcagctatgctcagagtctggagggtcccggcaaggatagctccttcagcccaggtaaggaagaaaagatctcagacagtaaagatttctcagaccacctggactcgggttgctcccagaagccctggacggagcagtctcttggaccagaacgcggcgaccaagtgcccatgaacccctcccagtctttactcccagagcggggcggctctgacccacagcgccagagacacttggaaaactccgaagagccgccagagagaaggtcccgcgtatcttccgtgatccgggaaaagctgcaagaggtcctgcaagacttgggcttgggccccgaggcatctctcagcaccgcgccctcttgccaccagcaaacctggaaaaatagcgccgccttcagtccgcaaaaaatgccactttccaaggagctggggttcagcccttacatggtccgtcggcgaagggcggctcagcgcgcacggagccactttcctggatccgcaccttcatccgtgggtcaccgcgctaatcggacagtgccaggggcgcactcccgcttgcacgtacagaatggagattcaccctccctggcccctcagacgactgacagtcgggtgcgccgcccttcttcacgaaagccttccctgccttccgaccctcaggaccggccggggaccctcgagggcagcaaacagtcgcagacagagccggagggagcacggggctccaaagccgcttttctgaggcagccgtctggatccgggcgcgctccttccccagcagcaccttgcttaagtaaggccagtcctgaccttcccgagcagtggcagctttggcccccagtgccttcaggctgcgcctctctatcgtcccagcattcctattttgatacagaaagctccagtagcgacgaattcttttgtcgctgtcatcggccctattgtgagatatgctttcagagctcatctgacagctccgactctggcacctccgataccgaccctgagccaaccggggggctcgcaagttgggagaaactttgggcccgatctaagcctattgtgaattttaaggacgatctaaaacccactctggtgtag

SEQ ID NO: 117797 - DNA, 2445 bp, synthetic construct
  misc_feature 1..2445: note = Description of Artificial Sequence: Synthetic coding sequence
  source 1..2445: mol_type = other DNA
atggaacccgaaatcaactgttccgagctgtgcgattccttccccggacaggagcttgatcgccgaccactacacgatctgtgtaagaccacaattaccagcagccaccacagctccaagacgatctcctccctgtcccccgtactgctggggatcgtgtggacttttctaagttgcgggttactcctaatccttttttttctcgcctttacaatccactgtcgtaagaaccggatagtgaaaatgagcagcccaaacctgaatatcgtcacactcttaggcagctgcctgacgtattcatcagcctacctgtttggaatccaggacgtacttgtggggtcatccatggaaacgttgatacagacacgtctcagtatgctctgcatcggaacttcgctggtctttggtccaattcttggaaagtcctggcgcttgtataaagtgttcacacaacgggtgccagataaacgggtcatcattaaagacctccagttactgggtctagtggctgcactccttatggcggatgttatcctgctgatgacttgggtccttaccgaccctattcagtgtctgcaaatcctgagcgtttctatgacggtgacggggaaggacgtgtcatgcactagcacgagtacacacttctgcgcctcgcgatatagcgacgtgtggattgctctgatttggggctgcaagggcctgctattgctgtacggggcttatctcgctggcttgactggccacgttagttcaccacccgtcaaccagagtctgaccatcatggtgggagtgaacttactagtgcttgccgctggccttctctttgttgtaacccggtatctgcattcttggcctaacctggtcttcggcttaacaagcgggggcatctttgtgtgcactaccactatcaactgtttcattttcattcctcagctgaaacaatggaaggcctttgaagaggaaaaccaaacaatccgccggatggcaaaatattttagcacgcctaataaatcctttcacactcaatatggagaagaggagaattgtcatccaaggggcgagaagtcgtctatggagagactgttgacagagaagaatgcggtgattgaaagccttcaggagcaggtcaataacgcaaaggagaaaattgtgcgacttatgtctgccgagtgtacctacgacttgccggagggcgctgcaccgcccgctagtagtccgaataaagatgtacaggcagtagctagcgtgcatacacttgcagccgcccaagggcccagcgggcatctgagtgacttccaaaacgatcctgggatggccgcgcgagacagccaatgcacaagcggaccctcatcatacgctcaaagcctagaaggacccggaaaagactcctcattcagcccagggaaagaggagaagatctcagattctaaggacttttcagatcacttggattctgggtgttcacaaaagccttggactgaacagtcactgggaccagagaggggtgatcaggtacctatgaatccctcccagagcctcttaccagagcgggggggaagcgacccccaacgccagagacacctcgaaaattcggaagaacccccagaaagacgctctcgagtctcttcggtaatcagggagaagctgcaggaggttctgcaggatttgggattggggccggaggctagcctttctaccgctcctagctgccaccagcagacctggaagaattctgctgcattttctccccagaagatgcccctgtccaaagagctgggattctcgccttacatggtcagaaggaggagagcggcgcaacgagctcggagtcattttccagggtcagcccccagcagtgtcggacacagggccaaccggactgtaccgggcgcccatagtcgactccacgtgcagaatggtgatagtcctagtttagctccccaaaccacagactctcgtgtgagaagacccagctcgcggaagccctcactgcctagcgacccacaggatcggccgggtacactggaagggtcaaagcagagccagaccgagccagaaggagcaaggggatcaaaagccgccttcttgaggcagccctcaggctctggtagagctccttccccagccgcgccttgtctcagtaaggctagccctgacctcccggaacagtggcaactttggccccccgtgccatctggctgcgcttcgctctctagtcagcactcctattttgatacggagtcctctagcagcgatgagttcttttgccgctgccatcgtccctattgcgagatctgtttccagtcctccagtgacagtagcgacagcggcacgtccgacaccgaccccgaacccacagggggccttgccagttgggaaaagctttgggctcgcagtaagccaattgtgaatttcaaggacgacttaaagcccactctcgtgtag

SEQ ID NO: 117798 - DNA, 2433 bp, synthetic construct
  misc_feature 1..2433: note = Description of Artificial Sequence: Synthetic coding sequence
  source 1..2433: mol_type = other DNA
atggagcccgagatcaactgcagtgaactctgcgattcatttcctggccaggagctcgataggagaccactgcacgatctctgtaagacaactatcacttcgtcccaccattccagcaaaacaatctctagccttagcccggtactcctcggcatcgtgtggacatttctttcctgtgggttactgctgatcctgttctttctggcgtttacaattcactgccggaaaaataggattgtaaagatgagtagccccaatctgaacatagtaacattacttggcagttgcctgacttattcatctgcctacctgttcggaattcaggacgtgctcgttggtagcagtatggaaacattgatccagacgagattatctatgctgtgcataggcacatcgcttgtatttggccccattttgggtaaatcttggcgactctacaaagtgttcacccagcgagtgccggacaagagggtgattattaaggaccttcagctgcttggcctggtagccgcccttctaatggctgacgtaatcctcttaatgacttgggtgctcactgacccaatccagtgccttcagatactgagtgtaactggtaaagacgttagctgcacatcgactagtacacatttctgtgcgtccagatattcagatgtgtggatcgccctgatttggggatgcaaaggcttgctactcttatacggagcataccttgctggcctgactggtcatgtgtccagtccccctgtgaatcagagtctgactatcatggtgggagtgaatcttctcgtccttgcagccgggctgctgtttgtggtgaccagatacctccactcgtggcccaatctcgtatttgggctgacaagcgggggtatcttcgtatgcaccactacaattaactgcttcatattcattcctcagctgaaacagtggaaggcttttgaagaagagaatcaaaccattcgccggatggctaagtatttctccaccccaaacaagtccttccatacgcaatatggggaggaggaaaactgccatccccgaggcgaaaaatcttccatggaaaggctgctgacggaaaagaatgccgtgatagaaagcctccaggagcaggttaataacgcaaaagagaagattgtacggctaatgtccgccgagtgcacgtacgacctgccagaaggcgccgctccccccgcctccagtcctaataaagacgttcaagccgtcgcctcggtgcatacactcgctgctgctcaaggaccatcaggacatttatctgatttccagaacgaccccggcatggcagcccgagacagtcagtgtacctctggtcccagctcttacgcccaatccttagaaggacctggtaaagatagctcattcagccctggaaaggaagagaagatctctgattccaaggacttctccgaccatctggattcaggatgtagccaaaagccctggactgaacagagtctcggtccagagagaggagatcaagtgcccatgaatccttctcagagtttattgcccgagagagggggtagcgaccctcaacgacagcgtcatctcgaaaacagtgaagaacctcctgagagacgatccagagtctcgagtgtgattcgggagaagcttcaagaagtgctgcaggacctcggtctcgggcctgaagcctctctatcaacggccccaagttgtcaccagcagacttggaaaaactcggccgcattttcaccccagaaaatgcccttgagtaaagaattgggattctcgccctatatggtcagacggagacgcgcggcccagcgagctcgctcccacttccccgggagcgcaccctccagcgtggggcacagggctaaccgtactgtccccggagcccactcacgcttgcacgtgcaaaatggggacagtcccagtctggcgccccagactacagactctcgggttaggcgcccttctagtaggaaacccagcctgccgtcagatcctcaagatcgccctggcactctggaaggatctaagcagtcccagactgaaccagagggggccagaggctcaaaagccgcttttctcaggcagccttcgggcagcggccgcgccccttcaccggcggcaccttgtctttccaaagcttcacctgatttaccagaacaatggcaactatggccccccgtaccttccgggtgcgctagtctgtccagtcagcacagttactttgacacggagtcaagctcttctgacgagttcttctgccgttgtcacaggccttattgtgaaatctgttttcaatcttcgtccgactcatccgattcaggtacaagcgatactgatccagaacccactggcggcttggcctcttgggagaagttgtgggcaagatcaaaaccaatcgtcaactttaaagacgacctgaagcctacgctagtgtag

SEQ ID NO: 117799 - DNA, 1590 bp, synthetic construct
  misc_feature 1..1590: note = Description of Artificial Sequence: Synthetic coding sequence
  source 1..1590: mol_type = other DNA
atgagcctgaattctagtctctcgtgtcgaaaagaacttagcaatttaacagaggaagaaggaggggagggaggtgtgatcattacccaatttattgccattatagtgattacaatatttgtgtgcttgggaaatctagtcattgttgtgacactgtataagaaaagttacctgctgaccctttcgaataaattcgtgttttcactgactctctcaaactttctcttgagtgtgctcgtgctcccttttgttgtgacatcctctatcaggcgagaatggattttcggtgtcgtctggtgcaatttcagcgccctgctgtatctgctcatcagttcagcctcaatgcttaccttgggtgtgatcgcaattgataggtattacgccgtgttgtatccaatggtctaccctatgaaaataacaggcaaccgggctgtcatggcactcgtgtatatttggctgcattcactgattggctgtctgcccccactattcggctggtccagtgtagagttcgacgaatttaaatggatgtgtgtcgccgcgtggcatagggagccaggttacaccgccttctggcaaatttggtgcgcgctgtttccatttcttgtcatgctcgtctgctacggtttcattttccgagtcgcacgcgtgaaagctcgcaaagtgcactgtgggactgttgtcatcgtggaagaagacgcccagcgcaccggcagaaagaactcctccacctctacctcaagtagtggctctaggcgcaatgcttttcagggagtggtgtattctgcgaaccaatgcaaagcgctgattaccatcctggtagtccttggggcatttatggtaacctggggcccatacatggttgtgattgcctcggaggcactgtgggggaagtcatctgttagtccgagcctggagacctgggctacctggctctccttcgcttctgcagtctgtcatcctctcatatacggattatggaacaagacggtccggaaggaactgctcggaatgtgttttggagaccggtattatcgcgaaccgtttgtgcaacgccaacgaacttctcgtctgttctcaatcagtaaccggatcaccgatctgggactaagtccgcacctgacagccctgatggcgggcggccagcctctcgggcacagcagtagcacaggggataccggcttttcatgcagccaggacagtggaactgacatgatgctgttggaggattatacctccgatgataatccgccatctcattgtacctgccctcccaagcgtcgctccagtgtaacttttgaggacgaggtcgagcaaatcaaggaggctgccaagaactcgatactacacgttaaggctgaagtgcacaagtcgctggattcttacgccgcatctctggctaaagcgattgaggcggaagccaagatcaacctattcggtgaggaggctcttcctggagtgttagtcactgctcgcactgtccccgggggcggatttggcggacgccgggggtcccgaacactcgtctcccaaagacttcagctgcagagcatagaagagggcgatgtgctggctgcagaacagaggtag

SEQ ID NO: 117800 - DNA, 1590 bp, synthetic construct
  misc_feature 1..1590: note = Description of Artificial Sequence: Synthetic coding sequence
  source 1..1590: mol_type = other DNA
atgagtctcaactcctccctgagctgcaggaaggagctatctaatttgactgaggaagagggcggcgaaggtggcgtgataatcacacaatttatcgccatcatcgtaatcaccatctttgtctgtcttggcaatcttgtgatcgtagtcacactttacaagaaatcctatctgcttactttgtctaacaagtttgtgttcagcctgacactcagcaacttcttgttaagtgtgctggtgcttccgtttgtcgtgacctcatcaattaggcgtgagtggatcttcggagttgtttggtgtaattttagcgccctgctttacctgttaatttcatctgcaagcatgctgactctgggtgtgattgccatcgatagatattacgcagtgctgtaccctatggtttatcccatgaaaattaccggaaacagggcggttatggccctggtttacatctggttgcacagtctcatcggctgcttgcctcctcttttcggatggagctcggtcgagtttgacgaattcaagtggatgtgtgttgctgcgtggcatagagaaccaggatacacagccttctggcagatctggtgcgccctcttccccttcctggtgatgctagtatgctatggctttatatttcgcgtggcacgggtcaaagccagaaaggtgcattgcggtactgtcgtgatcgttgaagaggatgctcaaaggaccgggcggaagaatagctcaaccagtacttcctctagtggatcccgcaggaatgccttccagggtgtggtgtactctgctaaccagtgtaaagcactgattaccattctggtggtcctcggcgccttcatggtgacttggggcccttatatggtcgttattgcgagtgaagcgctatggggcaaatcctccgtctctccatctctggagacttgggcaacatggcttagcttcgcgtcagcggtctgccatcccctcatctatgggctgtggaataagactgtgagaaaggaactattgggcatgtgtttcggggaccggtattatcgggagccgttcgttcagaggcagagaacttctagactgttcagcatcagtaacaggataaccgatcttggactctctccccatctgacagcactcatggctggtggccagccactggggcacagcagtagtactggagacacagggttctcttgctcccaggatagcgggactgatatgatgctgcttgaggactacacatccgacgataaccccccttcacattgcacctgcccaccaaagaggcgcagttctgtcaccttcgaagatgaagtcgaacagatcaaggaagccgcgaagaatagcatcctgcatgtgaaagcggaggttcataaaagcctcgactcttacgcagcttctctcgctaaagccatagaagctgaggcaaaaatcaatctgttcggtgaagaagcactgcctggcgtgctggtgacggctagaactgtgcctggagggggttttggcggccggaggggttctaggacattagtgtcacagcgtctgcagctgcagtctatcgaagaaggagacgtcctggcggctgagcagcggtag

SEQ ID NO: 117801 - DNA, 1590 bp, synthetic construct
  misc_feature 1..1590: note = Description of Artificial Sequence: Synthetic coding sequence
  source 1..1590: mol_type = other DNA
atgtctctaaactcgtcattgagctgtaggaaggaactgagtaatctgactgaggaggagggcggtgaagggggggtcatcatcacacaattcatcgcaatcatagtcatcactatctttgtctgtctcggaaacttggtgatcgtggttaccctgtataagaagtcttatctactcaccttgagcaacaagtttgtgttctcgcttacactcagcaacttcttgttgtctgttctcgtcctgccgtttgtggtcacctcctccatccgtagagagtggatctttggtgttgtgtggtgtaacttttccgctctcctttacctgcttatctccagcgcttcaatgctgaccctgggcgtcatcgcaattgacaggtattatgccgtcctgtaccccatggtgtatcctatgaagattacaggaaacagggccgtgatggccctggtctatatttggctgcattctcttatcggctgtctaccacccctgttcggatggtcaagtgtagagttcgacgaatttaaatggatgtgcgttgcagcctggcacagggaaccaggttacaccgctttttggcagatctggtgtgctctgtttccatttctggtaatgctggtatgctacggatttattttccgggtcgcccgcgtaaaggccagaaaagtgcactgcgggacggtggttattgtggaggaagacgcccagcgtactgggcgaaagaatagttccaccagcacttcttcctctggcagtcgccgaaatgcgttccaaggagtcgtgtacagcgccaaccagtgcaaagcactgattacgatccttgtagtgctgggagcattcatggtcacttggggtccatacatggtggtcatcgcctccgaggctttgtgggggaagagttccgtgagcccctctttagaaacctgggccacctggttatccttcgccagtgcagtgtgccacccattgatatacgggttatggaacaagactgtcaggaaagagctgctcggcatgtgttttggcgacagatattatcgggagccgttcgtgcagcgacagaggacaagtcgccttttcagcatctctaacagaatcaccgacttgggtctgtcaccccatctcactgccctcatggctggcggacaaccactgggccactcctcgtctactggagatactgggttctcctgtagccaggattctggcaccgacatgatgttattggaggactacacatctgacgataatccgccttcgcattgtacatgcccccccaagcgaagaagctcagtaacatttgaagacgaagtggaacaaattaaagaggcagctaaaaacagcatcctgcacgtcaaggctgaagtgcacaagtcactggatagttacgctgcctctctggccaaagccatcgaggcggaggctaagattaacctgtttggagaggaggctctgccaggagtgctggtgactgccaggacagtacccggcggagggttcggaggcaggcgcgggtccaggacattagtgtcccagagactgcagctgcaatccatagaagagggagatgtgctggccgccgagcagagatag

SEQ ID NO: 117802 - DNA, 1590 bp, synthetic construct
  misc_feature 1..1590: note = Description of Artificial Sequence: Synthetic coding sequence
  source 1..1590: mol_type = other DNA
atgtcactcaattcatccctgagctgcaggaaggaactttccaatttaaccgaagaggaggggggtgaaggaggcgttattattacacaattcatcgcaataattgtgattaccattttcgtctgtttaggaaatctagttatagtcgtgacgttatacaaaaaaagctacctccttactctgtcaaacaagttcgtttttagcctcactctgagtaattttctgttatctgttctcgtactcccctttgtggtcacaagcagcattaggagggaatggatctttggtgtggtgtggtgcaacttcagcgcactgctgtaccttttaatcagctcagcgtcaatgctgacactgggtgtgatcgctattgacagatattatgccgtcttatatcctatggtctatccgatgaagatcactggaaatcgggctgtcatggccctagtctatatatggctgcactcactgatcggatgtttacctccactgttcggctggtcatccgtcgaattcgatgagtttaaatggatgtgcgtcgctgcctggcacagggagcctggctacacagccttttggcaaatctggtgtgccctgtttcctttcctggtgatgctggtgtgctacggtttcatttttagagtcgccagggtgaaagcgcggaaagtccactgcggcaccgtggtgatcgttgaggaagatgcccaacgcaccggccgaaaaaattcctcaacaagtacaagttcaagcggctcccgtaggaacgcttttcagggggtggtctacagtgctaatcagtgtaaggcactcattaccatccttgtcgtgctgggagccttcatggttacttggggcccctacatggtcgtgatcgcgtccgaggctctctggggcaagtccagcgtatcaccttccctagagacatgggccacttggctcagcttcgcctccgctgtatgtcatcctcttatttatggcctctggaataaaactgtgaggaaagagctgctggggatgtgtttcggagatcgctactaccgggaaccatttgtccagcgccagagaactagccgtctgttttccatctccaaccggattactgacctgggtttatccccccatctgaccgcgctgatggctggggggcaaccactgggacactcaagcagtacaggggatactggcttctcatgttctcaagattccggtaccgacatgatgctgctggaggactacacctccgacgacaaccctccttcacactgtacatgcccacccaagaggaggtcctccgtgaccttcgaggacgaagttgaacagatcaaggaagccgctaaaaactccatccttcacgtgaaggccgaggtacacaaaagccttgactcgtacgcagctagcttggcgaaggccattgaggccgaggccaagattaatctctttggcgaagaagcgctgccgggtgtgcttgtgaccgcgcgaactgttcccggggggggcttcggaggcaggcgtggaagccgaaccttagtgtcacagcgcttacagctgcaatccatagaagagggcgatgttctggctgcagagcagcgctag

SEQ ID NO: 117803 - DNA, 1650 bp, synthetic construct
  misc_feature 1..1650: note = Description of Artificial Sequence: Synthetic coding sequence
  source 1..1650: mol_type = other DNA
atgtctgccaggggggtggttcagcacgccttgcctactcccagaagaggtgccctgacaatgagcttaaatagttctctgagctgtcggaaggaattaagcaatttgaccgaagaggagggcggagaagggggtgtgatcataacccagtttatcgctatcatcgtaattacgatattcgtttgtctagggaacctcgtgatcgtggtaacactgtataaaaaaagctacttactaaccctctcgaacaagttcgtgttctccctaaccttgagcaatttccttctgtctgtcctggttctaccttttgtggtcacatcatctatacgacgggaatggatctttggtgtcgtttggtgtaatttctcggccctcctgtatctactgatctcctccgccagtatgctcacactgggcgtaattgccatcgaccggtactatgccgtgctgtacccgatggtttatcctatgaaaattaccggcaatcgcgcagttatggccctcgtgtacatttggttgcattccctcatcggttgtctgcctccgctcttcggttggtctagcgtggaattcgatgaatttaagtggatgtgtgtggccgcatggcatcgggagccaggatatactgcattctggcagatttggtgtgcgttatttccttttctggtaatgttagtatgttacgggttcattttccgtgttgctagagtgaaggctcgtaaagtacactgtggtaccgtggtgatcgtcgaggaagacgcccagcgaactgggcggaagaattcttctactagtacctccagctccggtagccgccggaatgcattccaaggtgtggtgtacagcgctaaccaatgtaaagctctgatcacaatattggtagttttgggggcattcatggtgacctggggtccatatatggtcgttattgcatcggaggctctttggggtaaaagctcagtgtccccctctttagaaacatgggccacttggctgtcttttgcatctgctgtgtgtcaccctttgatttacggcttgtggaataagaccgttcggaaggagctcctcgggatgtgcttcggtgaccgctattatagggagccctttgttcaacgccagcgcacatcacggcttttctctatctcaaacaggattaccgatctgggcctgtccccacacttaaccgctcttatggccggagggcagcctctgggccactccagtagcacaggagatactggatttagctgttctcaagatagcggcactgatatgatgttactagaggactataccagcgacgacaaccctcccagtcattgtacatgtcctcctaagaggcggtcaagtgttactttcgaagatgaagtagagcaaattaaagaggctgcaaagaatagcatcctgcatgtgaaggccgaggtgcacaagtccctggattcttacgctgccagcctagcaaaagctatcgaggctgaggccaagatcaatctattcggtgaggaggcccttcccggagtgctcgtgactgcccgcaccgtcccgggggggggctttgggggcagaagaggctctagaaccttagtgtctcagaggcttcagctacagtccattgaagagggagacgtacttgccgctgagcagcgatag

SEQ ID NO: 117804 - DNA, 1356 bp, synthetic construct
  misc_feature 1..1356: note = Description of Artificial Sequence: Synthetic coding sequence
  source 1..1356: mol_type = other DNA
atgggtgggcgacggtgcgtgcccggcactctgccaatgcgtgcagcacctcccggggcaaagaggctgcacgtccctttaagagctaaaggcgtgggaaggtcaggtcatgccccacggctggagagcgtccgaacatcatactacgccgtgctttatccaatggtttaccccatgaagatcacagggaacagggccgtgatggccctggtgtatatctggctgcatagccttatagggtgtctgcctcccctgtttggctggagtagcgtcgagttcgatgagttcaagtggatgtgcgtcgccgcttggcacagggagcctggttacacagccttctggcagatttggtgtgcactgttcccatttctcgtcatgcttgtttgctatggctttatctttcgagtggcgcgcgtgaaggctcgcaaagtacactgcggaactgtggtgattgtggaggaggatgcgcagaggacaggtcggaagaattcttcaacttctacttccagttcagggagtcggcgcaacgccttccagggggttgtgtactccgccaatcagtgcaaagccttaatcactatcctggttgttctcggtgcatttatggtgacctggggcccttacatggtagtgatagcgagtgaggccttatgggggaaatctagtgtatccccatcccttgaaacatgggcgacgtggctgagcttcgcctcggcagtgtgtcatcctcttatatatggcttgtggaataagacggttcgcaaggagctgcttgggatgtgcttcggcgatagatactatcgggagccctttgtgcagaggcagcgcacaagccgtctattttctatctcaaatagaattaccgatttaggcttatctccccacctgaccgccctaatggcaggaggacaacctctggggcactcctcaagcaccggagatacaggattctcttgtagtcaagactctggcacagacatgatgctcctggaagactatacctctgacgacaaccccccttctcactgtacttgccctcccaagcgccggtcaagcgtaacatttgaagacgaggttgagcaaatcaaggaggccgctaaaaacagcattctgcatgtgaaggccgaggttcacaagagtctggatagctacgctgcctctcttgctaaggccatagaggctgaggcgaagattaatcttttcggtgaggaggccctgcccggagtgcttgtgactgctcgcactgtccctggtgggggtttcggtgggagacgaggatcacggacattagtatctcagcggcttcagctgcagtcaatcgaggaaggagacgtcctggccgccgaacagcgatag

SEQ ID NO: 117805 - DNA, 1248 bp, synthetic construct
  misc_feature 1..1248: note = Description of Artificial Sequence: Synthetic coding sequence
  source 1..1248: mol_type = other DNA
atgctggtgcctgttggttggatgaatgaatcttactatgccgtgttgtatcctatggtgtaccctatgaagattactggaaatcgcgccgtgatggcccttgtctacatctggctgcactcgctcattggctgcctgcctccactctttggctggtcttcagtcgagtttgatgaatttaagtggatgtgcgtggccgcttggcaccgagagccagggtacacagccttttggcaaatttggtgcgccttgttcccctttttggttatgctggtttgctacggtttcatcttcagggttgcaagggtaaaggctcggaaagtgcactgtggaactgtggtgatagtcgaggaggatgctcagaggaccggcaggaagaacagtagcaccagcacttcatcctccgggagtcggaggaatgccttccagggagtggtgtattcggccaatcaatgtaaggctctgatcaccatcctggtcgtacttggagctttcatggtcacatgggggccatatatggtggtcatcgcttcggaagcactgtggggcaagtcttccgtgtccccgtctctcgaaacctgggccacatggctctctttcgcatctgccgtgtgccatccccttatctacggcctttggaacaaaacagtaagaaaggaactgctgggaatgtgttttggggatcggtattacagggagccattcgtgcagaggcagcgaaccagtaggttatttagcattagcaatcgtattactgatttgggcctttcaccccacctcacagccttgatggcaggcgggcagcccctgggacactcgagttctaccggcgatacaggtttcagttgcagccaggattccggtaccgacatgatgcttttagaagattatacaagtgatgataaccctccatcccactgtacttgtccacccaagagaagatcttccgtgacctttgaggatgaggtcgaacaaattaaagaggcagctaagaacagcattctgcacgtgaaggccgaagtccataagagtctcgactcttacgcagctagcctcgctaaagccatcgaggcagaagccaagattaaccttttcggcgaagaagcgctgcccggcgtgttggtgaccgcacgcactgtgccaggcggaggtttcggtggaagacgcgggagccgaaccctagtgtctcagagactccaactacaaagtattgaggagggcgacgtgctcgctgctgaacagcggtag

SEQ ID NO: 117806 - DNA, 1104 bp, synthetic construct
  misc_feature 1..1104: note = Description of Artificial Sequence: Synthetic coding sequence
  source 1..1104: mol_type = other DNA
atgtctaaacgctcttggtgggcagggagccggaaacctcctcgcgagatgctgaagctgagtgggagcgacagctctcagagtatgaatggactcgaagttgctcccccaggtcttatcacaaacttctctctggcgaccgccgaacaatgtggacaggagacccccctcgaaaacatgttattcgcaagcttttatctgcttgatttcatcctggctctggtcgggaatacactggccttatggctgtttatccgggaccacaaaagcgggacacccgcaaacgtatttctaatgcatctagctgttgctgatctctcttgtgtactagtgcttcccacacgtctagtctatcactttagcgggaaccactggccctttggagagatcgcttgtcggctgacaggcttcctgttctacctcaacatgtacgcaagtatctacttcctgacgtgcattagcgctgatagattcttagcgatagtccatccagtgaagtctttaaaactgcggagacctttatatgcccatctggcatgtgcgtttctgtgggtggtggtggcagtcgccatggcacccctcttagtaagtcctcaaaccgtccagaccaaccacactgtggtatgtcttcaactgtatcgggagaaggcctcccaccacgccctggtgagcctggccgtagcatttactttcccatttatcaccactgtcacctgctatctgcttataatccgtagcttgagacagggactcagggtggagaaacgattaaaaaccaaagccgtcagaatgatcgctattgttcttgctatatttctggtgtgtttcgtgccctaccacgtcaataggtccgtgtatgtactgcactatagaagccatggcgcctcatgtgccacacagcgcatcttggccttggccaacagaattacttcctgcttgacatccctcaatggcgccttggatccaatcatgtacttttttgttgccgagaagtttcgtcacgctctctgtaacttgctatgcggcaagaggcttaaaggccctccaccgtctttcgagggaaagactaatgaatcgtccctctcagccaagtctgaactgtag

SEQ ID NO: 117807 - DNA, 312 bp, synthetic construct
  misc_feature 1..312: note = Description of Artificial Sequence: Synthetic coding sequence
  source 1..312: mol_type = other DNA
atgaatgggctggaggtagccccccccggtcttattaccaacttctccctcgccacagcagaacagtgtggacaggaaacccctctggagaatatgctctttgcctctttttacctgcccctgccacgacagccaaggatgtgcaccgtgacaggtctgacggccggctctaccgctcggtccaaacaacacctggaggtggtgtttgccgtgttacctgcgtttaagctccagaggggtagacgggaacgaacgagcaagccgcctatcattcctatgagctcgcccgggccatgttgggtaaggacatag

SEQ ID NO: 117808 - DNA, 1104 bp, synthetic construct
  misc_feature 1..1104: note = Description of Artificial Sequence: Synthetic coding sequence
  source 1..1104: mol_type = other DNA
atgagtaagcggtcctggtgggcggggtcaagaaagccccccagagaaatgctgaagctcagcggttcggactcttcccagagcatgaacggtctggaggtagccccaccaggcctgatcacaaatttctccttggccaccgccgagcaatgcggacaggaaacccccctcgagaatatgcttttcgcaagcttctatctgctggacttcattctggccttagttggcaacaccctagcactatggctctttatcagggaccacaaatccgggactcccgccaatgtctttttaatgcatctggccgtggctgacctgtcctgtgtgctcgttctgcctacccgcctcgtgtaccacttttctgggaaccattggccgttcggagagatagcctgtcgcctcactggctttctcttttacctcaacatgtacgcttccatctacttcttaacctgtataagcgccgacagattccttgccatcgtccatcctgtgaagagcttaaaattacgaaggcccttgtacgcgcatttggcttgcgccttcttgtgggtcgtagttgccgtcgcgatggctcccttgctggtttccccgcagactgtgcagactaaccatacagtggtctgtcttcaactgtatagagaaaaagcctcccaccatgccctcgtatccctggctgtggcctttacattcccgtttatcaccacagtgacctgctacctcctgattatccgtagtctcaggcagggacttcgggtcgaaaagcgtctcaaaactaaggcggtcagaatgatcgcaatcgtgctggcaattttcttggtgtgcttcgtcccctaccatgtgaaccggtccgtttacgttcttcactacagatcacacggggcctcctgcgcaacgcagagaatactcgccttggctaaccgtatcacctcttgtcttactagtctgaatggagcactcgatcccataatgtattttttcgtggcggaaaaatttaggcacgccctctgtaatctgctttgcggtaagagattaaaaggcccacctccatcatttgaaggcaaaaccaatgagtccagcctgagcgctaaaagtgaactttag

SEQ ID NO: 117809 - DNA, 411 bp, synthetic construct
  misc_feature 1..411: note = Description of Artificial Sequence: Synthetic coding sequence
  source 1..411: mol_type = other DNA
atgtcaaaacggagctggtgggctggctccagaaagccaccccgagaaatgttgaaactttccggatcagacagttcgcagtcaatgaatggcctggaggtggccccgcctggtctgatcacaaacttctcattggccactgccgagcagtgtgggcaagagacccctctggaaaacatgctgtttgcgtctttctacttactggattttatcctggcactcgtgggcaacacgctggcactgtggctgtttattcgggaccacaaatctgggaccccagcaaacgtgttcctgatgcacctggcagtggccgaccttagctgtgtcctggtcctcccaacccgtcttgtgtatcatttctcagggaatcattggcccttcggcgagatcgcttgtaggttgaccgggtag

SEQ ID NO: 117810 - DNA, 1104 bp, synthetic construct
  misc_feature 1..1104: note = Description of Artificial Sequence: Synthetic coding sequence
  source 1..1104: mol_type = other DNA
atgagtaaaaggtcatggtgggccggctcacggaaaccgccccgggagatgctgaagttatcggggtctgactcttcccagagtatgaacggactggaggttgctccaccagggcttatcactaacttctctttggccacagccgagcaatgtgggcaggaaacccctctcgaaaacatgttatttgctagcttttacctcctcgatttcatcctggccctggtcgggaacactcttgcgctctggttgtttatcagagatcacaagagcgggactcccgcaaacgtgtttctgatgcacctggcagtcgccgacttgagttgtgtcctggtccttcctacacggctggtctatcatttcagtgggaatcactggccattcggcgaaatcgcatgtagacttacaggtttcctgttttaccttaatatgtatgctagtatttattttctgacctgcatttcagccgaccggttccttgcgatcgtgcatcctgtgaagtccttaaaactccgtagacctctgtacgctcacttagcttgtgcttttctgtgggttgtggttgcggtggccatggcccctctcttggtgtctcctcagacagtacagaccaatcatacagtcgtttgcctccagctctacagggagaaggctagccatcatgcactggtgtctctcgctgtggcgtttacctttccttttataactactgtgacatgctaccttcttattatcaggtcattgaggcagggactcagggtagagaagaggctgaaaacaaaggccgttaggatgattgccattgttctcgccatttttctggtctgctttgttccttatcatgtaaacaggagcgtgtatgtactgcactatcgctcccacggggcatcctgcgctacacaaaggatcctggcattagccaatcgaattacctcttgcctgaccagtctgaacggagcactcgatccaatcatgtactttttcgtcgcagaaaaatttaggcacgcactgtgcaatcttctgtgtgggaagcgcctgaagggaccccctccctcgttcgaggggaagacaaacgaaagcagcctttctgccaaatcagagctgtag

SEQ ID NO: 117811 - DNA, 1338 bp, synthetic construct
  misc_feature 1..1338: note = Description of Artificial Sequence: Synthetic coding sequence
  source 1..1338: mol_type = other DNA
atggcggcccctaccccagcacgacctgtgctgacacacttattggtggcgctgttcggaatgggtagctgggccgcagtcaacgggatctgggtggagttgcccgtggtcgttaaagaactgcctgaaggatggtcactgccatcttacgtaagcgtcttagtggctctgggcaatttagggttacttgtggtgacactttggcggagactggcgccgggcaaagatgaacaggtccctataagggtggtgcaggttctgggcatggtggggacggctttactggctagcctctggcaccatgtggcccctgttgctggacagctgcattccgttgcctttctggctcttgccttcgttctcgctcttgcatgctgcgccagcaacgtgactttcttgccattcctgtcacacctgcctcctcgctttcttcgtagtttctttttgggccagggcctgagtgcactgctcccatgcgtgctggcactggtgcagggcgtgggacggctggaatgcccacctgcccctatcaacggcactcctggtcctccactggattttctggaacggtttccagcaagcacttttttttgggctcttactgccctccttgtggcaagcgctgcggccttccaaggactgcttcttctgctgccccctccaccaagcgtgccgacaggagagctgggctccggcctgcaggtcggggcccccggtgccgaagaggaggtggaggagtcctcaccccttcaggagccaccgtctcaagccgccggcacaacgcccggcccggatccaaaggcttatcagctgttgtcagcccgttcggcctgcttgttgggactgctcgcagccacaaacgctctcacaaacggcgttctgccagcagtccagtctttctcctgtctaccttatggaaggttggcctaccacctggcagtggtcctgggctccgcagccaatccgctggcatgctttctggccatgggagttttgtgccgctccctggctggactcggagggctctcgctcttgggggtgttctgtggcggctacctgatggctctagcagtgctgagtccgtgcccacctttggtcggtacgtctgcaggcgtggtgctggtcgtactgtcctgggtgctctgcctgggagtattctcatatgttaaggtggctgcctcatctctgctgcatggcggaggcagacctgccctcctggctgcaggtgtcgcaatccaagttggatccctccttggggctgtggctatgtttccgcctacctctatctaccatgtgtttcactcacgcaaggattgcgcagacccatgcgactcctag

SEQ ID NO: 117812 - DNA, 1338 bp, synthetic construct
  misc_feature 1..1338: note = Description of Artificial Sequence: Synthetic coding sequence
  source 1..1338: mol_type = other DNA
atggcggcccccactccggcccggccagtcttaacacatctgctggttgcactctttggaatgggctcatgggcagccgtgaatgggatttgggtcgaactgcctgtcgtcgttaaagaactaccagaaggttggtctctgccttcttacgtctctgttctggtagcgttgggaaatctggggttgctggtcgtgactttatggcgacggctggcaccaggcaaggatgagcaagttcctattcgtgtcgtgcaggtgttagggatggtgggcacagctctgctggccagtctgtggcatcatgtcgcacctgtcgctgggcagctgcacagtgtagcctttttggctctcgcctttgttctggcccttgcatgttgcgcctccaatgttacctttttgcctttcctatcacaccttccccccaggtttcttcggtctttcttccttggacaggggttgtctgcactgctcccctgcgtgctggccctagtccaaggcgtgggccgcctcgagtgtcccccagctcctatcaatggtaccccaggcccacccttagattttctcgagagatttcccgctagtacgtttttctgggcactgacagccctgcttgtggcttcagctgctgctttccaggggctcctgctcttattgcctcccccaccgagtgtgccgacaggtgaacttggatccgggttgcaggttggagccccaggggcagaagaggaagttgaggagtcatcaccactacaagagccgccaagtcaggcagcagggaccactccaggccccgatccaaaggcctaccagctgctaagtgcgagatctgcgtgtcttcttgggctcttagccgctacgaacgctctgacgaacggggtactgcccgcagtgcagtccttctcatgcttgccatatggacgtctagcataccatctcgccgtggtgttaggcagcgccgctaatcctcttgcgtgtttcctggcaatgggagtgctctgccgaagccttgccgggctaggcggtctgtcccttctaggagtcttctgtggcgggtacttgatggcactcgccgttcttagtccttgcccccccctggtcggtacaagtgctggcgttgtcttagtcgtgctctcatgggtcctttgccttggtgtcttctcttatgtcaaagtggctgcctcgtctctgctgcatggtggaggacggcccgccctgttggccgctggcgtcgccattcaagtcggcagtctcctgggcgcagttgccatgtttccgccaacgtcaatttaccacgtattccattctaggaaggactgcgccgacccctgcgactcatag

SEQ ID NO: 117813 - DNA, 1338 bp, synthetic construct
  misc_feature 1..1338: note = Description of Artificial Sequence: Synthetic coding sequence
  source 1..1338: mol_type = other DNA
atggcagcccctacacctgcaagaccagtacttacacacctgctcgtggctctgtttggtatgggctcctgggccgctgtaaatggtatttgggttgaactgccagtggtggtgaaggagttacccgaaggttggtccctcccatcatatgtcagcgtcctggttgcactgggcaacctcggtctcctcgtcgtcactctctggcgccgcctagcacctggaaaagacgaacaggtgcccatcagggtagtacaggtgctgggtatggtgggaacggctctcctggccagcctgtggcatcacgtggcacctgtagccggccagttgcattcggttgcttttctagccctagcatttgtcttggcactggcgtgctgcgccagtaacgtcacgtttctacccttcctctctcacctgccaccccgatttctgcggtcattttttctcggacagggtctatccgctcttctgccctgtgtgctcgcccttgtgcagggagttggccggcttgaatgccctccggcaccgataaacggtactccgggcccaccactggattttcttgaacgtttccccgcttctactttcttttgggcattaaccgccctgttggtcgcgagcgcagcggcctttcagggactattgctgctgctgcctcctccgccttcagttcccacaggcgagttagggagcggactccaggtgggggcccctggagcagaggaggaagtggaggaaagctccccccttcaggagccaccctcccaggcagctggaaccacccctggccctgatcctaaggcataccagttgctaagtgccaggtcagcctgcctgctgggcctcttagccgcgacgaacgctttgacaaatggggttctgcctgccgtacagtctttcagctgcttaccttatggcaggctggcctaccacttagctgtagtgttgggcagcgccgccaatcctctggcatgcttcctggccatgggggtgctatgtcgcagcctggcgggcctcggcgggcttagtttgttaggcgttttctgtggcggttacctgatggccttagccgtcctgtccccttgtccccctctggtcggaacgtctgctggcgttgtgctggttgtcctgtcctgggtgctctgcctgggtgtgttcagctatgtaaaagtagctgccagctccctgctccacggcggaggcagacctgcactgctggctgctggcgttgctatccaggtgggttcactgctaggagctgtggcaatgttcccccccacttccatctatcatgtgttccacagccgcaaggattgtgcagatccttgcgacagttag

SEQ ID NO: 117814 - DNA, 1338 bp, synthetic construct
  misc_feature 1..1338: note = Description of Artificial Sequence: Synthetic coding sequence
  source 1..1338: mol_type = other DNA
atggccgctcctactccagctcggccagtgctcacccatttgttagtggccctgtttggaatggggagctgggctgcagtgaacggtatttgggtcgagctccccgttgtcgttaaggagcttcctgaggggtggtccctcccttcttacgtgagtgtgctggtcgccctaggcaacttgggccttctcgtggtcacactctggagaaggctcgcccctgggaaggacgagcaggtgcctatccgcgtggtgcaagttttgggcatggtggggacagctctgctggcttctttgtggcaccacgtggcccctgtagctggccagctgcactctgtggccttcctagcgctcgcttttgtgctggctttagcctgctgcgcttcaaatgtaacatttctgcctttcctctcccatctgccgcctaggttcctgcgctctttttttctgggccagggactgtccgccctgttaccctgtgttttggcactggtgcagggtgtggggcggctggaatgtccccccgctccgatcaacggtaccccaggcccacctttggactttttggagagattcccggctagcactttcttttgggcactgactgccctcttggttgccagtgcagccgcattccagggtctactgctgttactccctccacctccaagcgttcccacaggggagttagggagtggattacaagttggagcgcccggggctgaggaagaagttgaggaatcaagccccctgcaagagcctccatctcaagcagctggtacaacgccaggccccgaccctaaagcataccagctcctgagcgccagatctgcttgtctcttgggcctcctcgctgccacaaacgcactgacaaatggagtcctgccagccgtacagtccttctcctgtctcccatacggaagattggcctaccacctggcagtagttctggggtctgccgctaatcctttagcctgcttccttgctatgggggtgctatgcaggtcactggcaggcctgggtggcctgtccctgctaggagtattctgtggcggatatttaatggccctggccgtgctcagtccatgcccccctctggtcggcacatctgctggagtagtgctcgtcgtcttgtcttgggtcctctgcctgggggtcttttcctatgttaaagttgccgcctcctccctattacacggaggtggacgccccgcccttttggccgccggcgttgctatacaggtagggagcctcctcggggccgtcgccatgttccctcccacttccatctatcacgtgttccactcccggaaagactgtgccgacccctgcgatagctag

SEQ ID NO: 117815 - DNA, 1338 bp, synthetic construct
  misc_feature 1..1338: note = Description of Artificial Sequence: Synthetic coding sequence
  source 1..1338: mol_type = other DNA
atggccgcccccaccccggcacgaccagtgctgacacatttactcgtcgcattattcggcatgggcagctgggcagccgtgaacgggatatgggttgaactacctgtagttgtaaaggagctgcccgagggctggtcacttccttcctatgtgtctgtcttggtggctctaggaaatctagggctgctggtagtaacactgtggagaaggctggctccaggcaaggatgagcaagttcccatcagagttgttcaggttctggggatggtgggcaccgcgctcctcgcctccctgtggcaccatgtggcgcctgtggctgggcagcttcacagcgttgcgtttctcgcactggccttcgttttggccctcgcatgctgcgcatccaacgtgacattcttaccttttcttagtcatctcccaccacgctttctgcgcagcttctttctaggccagggtctgagtgcgttgctgccctgtgttctggccctagtacagggcgtcggccggctggagtgtcctcctgctcccataaatggcacacccggcccgccattggactttctcgaacgatttcccgctagtacctttttctgggcactgacggccctgttggttgctagtgccgctgccttccaaggcctgctgctgctactgccccctccaccaagcgtaccgaccggcgaactaggcagtggactgcaagtcggggcacctggagccgaagaagaggttgaagagtccagcccactgcaggaaccgccaagccaagcagctggcacaacacccggtcctgaccccaaggcctaccagctcctatcagctcgctccgcttgcttgctcggtctgttggcggcgactaatgccctgacaaacggggtgttgcctgccgttcaatcattcagctgtttaccatatggacggcttgcctaccacctggcggttgtgctgggtagcgcagcgaaccctctcgcctgttttctggctatgggcgtcttgtgtagatcactggcaggattgggagggctctccctgctgggcgtgttttgtgggggctatttgatggccctggccgttctcagtccctgtcctccactcgtgggaacatctgcaggagtggtgctggttgttttgtcttgggtgttgtgccttggcgtattctcatacgtgaaggtcgctgcatcttctctgttacacggaggcggccgccccgccctgctcgcagctggagtcgctatccaagtgggctccctactcggcgccgtggctatgttccccccaacatctatttaccatgtctttcacagcaggaaagactgcgccgatccgtgtgatagctag

SEQ ID NO: 117816 - DNA, 1074 bp, synthetic construct
  misc_feature 1..1074: note = Description of Artificial Sequence: Synthetic coding sequence
  source 1..1074: mol_type = other DNA
atggtgggcaccgccctgcttgcatcgctgtggcaccatgtggcacccgttgccgggcaactacattcggtcgcatttcttgctctggcttttgttcttgccctcgcgtgctgtgccagtaatgtgaccttcttaccatttctgtcgcatctacccccacgttttcttcggagcttttttctgggccagggcctgtcagccttacttccatgcgtgcttgctcttgttcagggcgtgggccggctggaatgcccgcccgcgcctattaatggaacacccggacccccgctagattttttagagcgctttcctgctagcaccttcttctgggctctgacagccctgctggtcgcatcggccgccgcctttcaggggctgctgctgctgcttcctccgccaccttcagttccaaccggggaactggggtcaggactgcaggtaggggcccccggagccgaagaagaggtcgaggagtctagccccctccaagagcccccgagtcaggccgcaggcacgactccaggccctgatcctaaagcataccagctcctgagcgctcggtccgcctgcttactggggctcctcgccgcgacaaacgccctgaccaatggggtactccctgctgttcagtcgttcagttgtctcccctatgggcggcttgcttaccatctagccgtggtgctgggaagtgcagcgaatcctctggcctgttttctggcaatgggagtgctctgccggtcattggccgggctgggtggcctgtctctcttaggggttttctgcggcgggtatctaatggcccttgccgtgttaagtccatgtcctccactggtgggaacttccgctggggtcgttctcgtggtcctgagctgggttttgtgcctcggagtgttctcatacgtaaaggttgccgctagcagcctgctccacgggggaggccggccggccctgctggctgccggagtcgcaatccaggtcggctctttactgggagcggtggccatgtttccaccaacgtcaatctatcatgtgttccattcaagaaaagattgtgccgatccatgtgattcctag

SEQ ID NO: 117817 - DNA, 1347 bp, synthetic construct
  misc_feature 1..1347: note = Description of Artificial Sequence: Synthetic coding sequence
  source 1..1347: mol_type = other DNA
atggctgcacccaccctaggccggctagtactgacccatctgctcgttgcgttgttcgggatgggcagctgggccgctgttaacggcatatgggtagagctgcctgtagttgttaaggatctgcctgaaggctggagccttccttcctacctaagtgtagtggtggcactgggcaacttgggactgctagtagtgacgctgtggcgacagcttgccccaggaaaaggcgaacaggttcccattcaggtcgtgcaagttctgtctgttgttggaaccgctttattggctcccctgtggcaccacgtcgcacccgttgcaggccaactgcattcggtcgcttttctaaccctggctctggtgttagctatggcctgctgcaccagcaacgtcaccttcctgcccttcctatctcacctccctcccccttttctgagaagcttcttcctggggcaaggcctcagtgcactcctaccctgcgtcctcgccttggtacagggtgttggccgactggaatgcccaccggcccccaccaacggtacctcaggaccgccactggattttcccgagagatttcccgcttctacatttttttgggccctcaccgctctgttggtgacttcagccgcagccttccggggattgctgctcctcctgcccagtcttccgtcagtcacaactggcggttctgggcctgagttacagctcgggagtccaggtgcggaagaggaagaaaaagaagaagaagaagcactcccactacaggagcccccttcacaagccgccgggacaattccaggacccgacccagaggcccaccaattatttagcgctcatggggcattcctgcttgggctgatggctttcaccagcgccgtgaccaacggggtgttgccttccgtgcaaagcttctcctgcttgccctatggaaggctcgcttaccacctcgctgtggtattaggtagtgcagcaaaccccctggcatgcttccttgctatgggagtcctgtgcagatctttagccgggctcgtggggctaagcctcctgggaatgctcttcggggcatatctaatggccctggcgatcttgagcccctgcccccccctagtcggcacgacagctggcgtggtactggttgtcctgagctgggtgctgtgcctttgtgtcttctcttacgtcaaagtggccgctagttcccttttgcatggaggaggaaggccggccctgctggcagctggagttgccattcaggtgggatcccttcttggtgctggagccatgtttcccccaactagcatataccatgtgtttcagtctcggaaagactgtgtagacccatgtggaccctag

SEQ ID NO: 117818 - DNA, 1347 bp, synthetic construct
  misc_feature 1..1347: note = Description of Artificial Sequence: Synthetic coding sequence
  source 1..1347: mol_type = other DNA
atggccgcaccaacactcggtcgcctggtgctgactcacctgctggtggccctctttggcatgggatcatgggcagccgtgaacggaatttgggtcgagttgccggtggtggtcaaagatcttcctgagggttggtcactgccttcttatctctctgttgttgttgctctcggaaacctaggattgcttgtggtgacattgtggcgtcaactggctcccggaaagggggaacaggtgcccattcaggttgtgcaagttctcagcgtcgtgggtaccgctctgctggctcctctctggcaccacgtagcccctgtggcaggccagttgcacagtgtggcttttctgaccctcgccttagtgctggccatggcttgctgcacttcaaacgtgaccttccttccgtttctctcccacctgcccccaccctttcttaggtccttctttctaggtcagggtttgtcagcgctcttgccatgcgtgttagccctagtccagggtgtcggccgcctggaatgcccacctgcccctacgaatggcacctctggcccaccactcgatttcccagagcgcttcccagcatctacatttttttgggctcttactgcactactcgtcacttcggctgcggctttccgcggtttgctgctgctgctgccctccctgccgagcgtgacaacaggtgggtccgggcccgagctccagctcgggtcacctggcgccgaagaggaggagaaagaagaagaagaggcactgccactgcaggaacccccaagccaggctgcagggacaattccaggtccagacccagaggcacatcagttgttttccgcccatggcgcatttctccttggactcatggcctttacatctgctgtgaccaatggagtgcttcctagtgtccagtcttttagctgtctgccttatgggcggctggcctatcatttggcagtcgtgctcggttcagcagccaaccccctggcttgtttcttggcaatgggcgttctgtgccgttctttggcgggcttggtagggctgtcacttctgggtatgttattcggcgcatatctcatggcactggctatcctgtctccctgtccacctctggtaggcactaccgccggagttgtgctagttgtactttcatgggttttgtgcttatgcgtattcagctacgtcaaggtagccgcatcaagtctcttgcacgggggaggcagacctgcactcctggcagcgggcgtagccattcaggtggggagcctgcttggagccggagcgatgtttccgcctacgtccatttatcacgtgtttcagagtcgtaaagattgtgtggacccctgcggcccgtag

SEQ ID NO: 117819 - DNA, 1053 bp, synthetic construct
  misc_feature 1..1053: note = Description of Artificial Sequence: Synthetic coding sequence
  source 1..1053: mol_type = other DNA
atggccgcgcccacgttggggcggctagtgctgacccatcttctggtggcactgtttggcatgggatcttgggccgcagtgaacggaatttgggtggagttaccggtcgttgtaaaggacctacccgaaggctggtctctgccgtcctacctgagcgtggtcgtggccttagggaatctcggacttctggtcgtgaccctttggagacaactggcaccaggcaagggcgagcaagtgccgatccaagtggttcaggtattaagcgtcgtgggtacggctctactggccccactgtggcaccatgttgcaccggtggctggccaactgcactccgtcgcattcctcacccttgccctggtactggccatggcctgctgcactagtaatgtcacattcctaccctttcttagtcacttgccaccgccattcctaagatccttttttctcggacagggactctccgccctgttaccttgcgtgctagctttagtgcagggcgtgggccgccttgaatgtccacctgcccctaccaatggtactagtggcccgccactcgacttcccagaacggttccctgcaagcacgtttttctgggccctcacagccctgttggtgacctcagcggctgccttcagaggcttgttgctcctcctgccatctttgccgtcagtcacaacgggaggatccggcccagaactgcagctcggtagtcccggtgcggaagaggaggaaaaggaggaggaggaggccctgcccctgcaggaacctccttcgcaggctgcaggaaccattccaggtcctgaccctgaggcccaccagctctttagcgctcatggagcattcttgcttggcctcatggccttcacgtcagcagtgactaatggagttcttccctctgtgcagtccttctcgtgtttaccatacggtcggttggcataccatctggcggtggtccttggatccgcagccaaccccttggcttgcttcctggcgatgggggttctgtgccgctgctgtcggggctgctgtgtgtgtgtttgttcccatatgtag

SEQ ID NO: 117820 - DNA, 1413 bp, synthetic construct
  misc_feature 1..1413: note = Description of Artificial Sequence: Synthetic coding sequence
  source 1..1413: mol_type = other DNA
atgcctgctccactgctgttgatcagcaggactctgggaaacttcatggtcctctggagtacatgcagaaccacggtttttaaaagtgtgacaaatcggtttattaagaatcttgcctgttctgggatttgcgcctctcttgtgtgtgtgccgtttgacatcattctgtccacatctccccattgctgctggtggatctacacaatgcttttctgtaaagtggttaagtttctgcataaggttttttgcagtgtaaccattttgagcttcccggctattgcccttgaccgatattattctgttctgtaccccttggaacgcaaaataagtgatgcaaaatccagggagctggtcatgtacatctgggctcacgccgtggtggcttccgtccctgtattcgccgttactaatgttgctgacatctacgccacatcaacttgtactgaagtctggtcgaatagtctgggacatctggtgtatgttttggtttacaacattacgacagttatcgtgcccgtagtcgtggttttcctgtttctgattctcattcgaagggcgctcagcgcctcgcagaagaagaaagtaatcatagccgcactgagaaccccacagaacactatcagcatcccctatgcctcccaacgcgaagctgaactgcatgccacactgctgagcatggtgatggtcttcatcctctgttccgtcccttacgctacactggtggtttaccagacggtgctgaacgtccccgatacaagtgtcttccttctgctcactgctgtgtggctgcccaaagtctctctactcgcaaacccggtactgttcttaacagtaaacaaatccgtccgcaaatgcctgatcgggactctcgtgcagctccaccacagatatagcagaaggaacgtagtgagtacggggagtggcatggccgaagcgagtctagagcctagcattcgctctggatcccagctcctggaaatgtttcatatcggtcagcagcagatcttcaagcctaccgaggatgaagaggagtctgaggctaaatacatcgggtcagccgactttcaggccaaggagattttctccacttgcctagaaggcgagcaaggtcctcaattcgccccctcggcacctccactgtctactgtggatagtgtgagtcaagtggcaccagccgcccccgtggaacccgagacattcccggacaagtattcactgcagttcggatttggaccatttgagctgccaccgcagtggcttagcgaaactaggaacagtaagaagagactcctcccaccacttggcaatacaccggaggaactgatacagaccaaggtgcccaaggtgggaagagtggagcgtaaaatgtcacggaataataaagtgtctatctttcctaaggtggactcttag

SEQ ID NO: 117821 - DNA, 1548 bp, synthetic construct
  misc_feature 1..1548: note = Description of Artificial Sequence: Synthetic coding sequence
  source 1..1548: mol_type = other DNA
atgggccacaacggttcttggatcagccctaatgcatctgaaccccataatgccagcggtgccgaggccgcaggcgtaaaccgtagcgccctgggtgaatttggagaggcacagttatatcgccagttcacaaccaccgtacaggttgtgatctttatcggatcccttctgggcaactttatggtgctctggtcaacctgtaggaccactgtattcaagagcgtgactaatagattcataaaaaatctggcctgtagcggcatttgtgcatctctggtgtgtgttcccttcgatattattctcagcacctctccacactgctgttggtggatttataccatgttattttgtaaagtagtcaagttcctccacaaggtgttttgtagcgtgaccatcctgagctttcccgcgatcgccctggaccgatattatagtgtgctgtatccacttgagaggaagatctcagatgccaagtcccgcgaattagtgatgtacatatgggctcacgccgttgtggccagtgttcccgtgttcgccgttacaaacgtggccgacatttatgctactagcacatgcactgaagtctggtctaactctctggggcatcttgtgtacgtgctggtgtacaacataacaactgtaatcgtaccagtcgttgtggtcttcctgttcctcatactaatcaggcgggccctttccgcttcccaaaagaaaaaggtgattatcgccgccctacgcacaccacagaacacaataagtatcccttacgcctcacagcgtgaggctgaactccacgccacactgcttagcatggttatggtcttcatcctctgcagcgtgccatacgccaccctggtcgtatatcagacagtccttaatgttccggatacatctgtttttctgctactgaccgctgtgtggctgcctaaggtgtctctgcttgcaaacccagtactctttctcactgtcaacaagagcgtccgcaaatgcctgattgggactctcgtacaacttcaccataggtactcacggcgcaatgtcgtgagtaccggcagtggcatggccgaggctagcctggaaccttctataaggtccggcagtcaactgctggagatgttccacataggccagcagcagattttcaagccgacagaagacgaggaagaatccgaagccaagtacattgggtcggccgatttccaagctaaagagatattttcaacatgcttggagggcgaacaggggccccagtttgccccctctgcccctccgttgtcaaccgtggactccgtctcacaagtggctccagcggcgccagtcgaacccgagacctttcctgacaagtattcactgcaatttggattcggccccttcgagctccccccgcagtggttgtccgagacccgtaactccaagaagaggttactacctcccttaggtaacacaccagaggagctgatccagactaaggtgcccaaagtaggacgggttgaacgcaaaatgtcccgaaataataaagtcagcatcttcccaaaggttgactcttag

SEQ ID NO: 117822 - DNA, 1548 bp, synthetic construct
  misc_feature 1..1548: note = Description of Artificial Sequence: Synthetic coding sequence
  source 1..1548: mol_type = other DNA
atgggtcataatggtagctggattagccctaacgctagcgagccccacaacgcgtcaggagctgaggccgccggcgtaaaccggagcgccctgggtgaatttggggaagcacagctttataggcaatttaccactactgtgcaggtggtgatcttcatcggaagcctcttaggtaattttatggtcctgtggagcacctgccgtaccactgttttcaagtcagttactaatcgattcattaagaacttggcttgtagtggtatctgcgcctccctggtatgcgtgcctttcgacatcatcctatccacaagcccgcattgctgttggtggatctataccatgttattttgcaaggtggtaaagtttctgcataaagtgttttgttctgtcaccatcctttctttccccgcgattgctctggacagatattacagcgtactctatccattggaaaggaaaatttcagacgcaaagagcagagagttggtaatgtacatttgggcacatgctgtggtggcctctgtcccggtctttgcggtgactaacgtagcagacatatacgccacctctacttgcaccgaagtgtggtcaaattctttaggccacctggtctatgttctggtgtataacatcactacagtgatcgttccagtcgtggtcgtcttcctgtttctgatcttgattagaagagccctaagtgcctcacagaaaaagaaggtaatcatcgctgctctgcggacgccccagaatacgatctctattccctacgcttcccagcgagaggctgagctacatgccaccctgctctcgatggtgatggtctttatactctgcagtgttccatacgccactctggtcgtgtatcagactgtgctgaatgtgccagacaccagcgtcttcctgcttctgactgctgtctggctgcccaaggtctctctgctcgccaatccagtactgtttcttacggtgaataagagtgtcagaaagtgccttatcggaaccttagtccaactgcaccataggtacagcagaagaaacgtggtgtcgacagggtccggcatggcagaggcttctctggagccatcaattcggtcaggaagccagctactcgagatgtttcatattgggcaacagcaaattttcaaacccacagaagacgaagaggagagtgaagctaaatacatcggcagtgctgacttccaggctaaagagatatttagcacttgtcttgagggagaacagggcccccagtttgctccaagcgctccgcctctgtccaccgtggatagcgtgagccaggtcgctccagctgccccagtcgaacctgaaacctttcccgacaaatactctctacaatttggtttcggacccttcgaactgccgccccaatggttgtcagagactcgaaactcaaagaaaagattgctgcccccattagggaatacccctgaggagttgatccagaccaaggttcctaaggtcggacgggttgagcgcaaaatgtcacgtaacaataaggtgtccatctttccgaaggtggactcttag

SEQ ID NO: 117823 - DNA, 996 bp, synthetic construct
  misc_feature 1..996: note = Description of Artificial Sequence: Synthetic coding sequence
  source 1..996: mol_type = other DNA
atgattactctgaacaaccaagaccagccagtgcctttcaactcttcacatccagatgagtataagatcgctgcgttggtgttttatagttgtatattcatcataggtctgtttgtgaacatcaccgccctgtgggttttttcctgtacaaccaagaagaggactacggtcacaatctacatgatgaatgttgcgctagttgacttgatcttcataatgaccctgccttttcgcatgttttattacgcaaaggatgaatggccattcggggagtacttctgccagattcttggtgccctcaccgtgttctacccgtctatcgccctgtggttgctcgccttcatttctgcggataggtacatggcaatcgtgcagcctaaatacgctaaggagctcaaaaacacttgtaaggccgttttagcgtgcgtgggagtgtggattatgactcttactaccacgacccctctgctgttgctatacaaagacccagataaagacagcaccccagccacctgcctgaagatctctgatattatctatttaaaggccgtcaacgtgcttaacctcacacgtctgacctttttttttctcatcccattatttatcatgatcgggtgttacctggttatcattcacaacctgctccatggccggactagtaaacttaagcccaaagtcaaagagaaaagcattcgtattataatcacattacttgtacaggtactcgtgtgttttatgccctttcatatttgtttcgcattcctgatgcttggaacaggggagaatagttacaatccatggggagcgtttactaccttcttgatgaacctcagtacttgcttggatgttatcctctattatattgtttcgaagcaatttcaggcgcgagtgatcagcgtcatgctgtacagaaactacctgagatctatgaggcgcaagtcctttcgaagtggctcactccgcagcctgagcaacatcaacagtgaaatgctctag

SEQ ID NO: 117824 - DNA, 996 bp, synthetic construct
  misc_feature 1..996: note = Description of Artificial Sequence: Synthetic coding sequence
  source 1..996: mol_type = other DNA
atgattactctcaataatcaggatcagccagtgccgtttaattcaagccaccccgatgaatacaaaatcgcagccctggtgttttactcatgtatctttatcatcggactgttcgtaaacatcacggccctgtgggtgttttcttgtaccaccaaaaagagaacgactgtcacaatttatatgatgaacgtcgcactggtggatctgatcttcatcatgactctgccctttcggatgttctactatgccaaagatgaatggccattcggcgaatatttctgtcaaatcctcggcgcccttactgtgttttatccatcaatcgcactgtggttgttggcatttataagcgccgacaggtatatggcgatcgttcaacccaaatacgccaaggaactgaaaaacacttgtaaggccgtattagcctgcgtgggcgtgtggattatgactttgaccaccaccacacctctactgctgctttacaaggacccagacaaggatagtacccccgccacatgcctgaaaatctcagacatcatttacctcaaggctgtaaacgtcctgaacctgactcgcctgaccttcttctttctgatacccctcttcatcatgatagggtgctacttggtaattatacataatctgttgcacggccggacgagtaagttaaaacccaaggttaaagagaagtccatcagaatcataatcaccctcctggtgcaagtcctcgtctgttttatgcctttccatatttgttttgcatttctgatgcttggaacaggggaaaattcatataacccttggggcgccttcacaacttttctaatgaatctcagtacctgccttgacgtaattctgtactatattgtgagcaaacaatttcaggcacgggttatctcagttatgctgtacaggaattatctcaggtccatgcggcggaagtctttccgatcagggtccctcaggagcctgagcaatatcaattctgagatgctctag

SEQ ID NO: 117825 - DNA, 996 bp, synthetic construct
  misc_feature 1..996: note = Description of Artificial Sequence: Synthetic coding sequence
  source 1..996: mol_type = other DNA
atgattacattgaacaaccaggaccaacccgtgcctttcaactcctcacatcctgatgagtataagattgccgccctcgttttctacagttgtatcttcatcattggcctgttcgtcaatatcacagcactgtgggtattctcatgcacaactaagaagcgcacaaccgtaaccatctatatgatgaacgtggctctcgtggacctgatcttcattatgacactaccgtttagaatgttttactatgcaaaagatgagtggcctttcggcgagtatttctgccagattctcggcgcattgaccgtgttttacccatcgatcgctttatggctcctcgcctttatcagcgcagaccggtatatggcgatagttcaacctaaatatgccaaagaactgaagaatacatgtaaggcggtactggcttgcgtgggagtctggattatgactctgacaacgactacgcctttgttgttgctatataaagaccctgataaggactcaacaccagctacctgcctgaagattagcgacattatatatcttaaagcagtgaacgtcctcaacctcacacggctaactttctttttcctgataccactattcataatgatcggatgctatctggtcatcattcacaatctcctgcacggtaggacatcaaaactgaagcctaaggttaaggaaaagagcatccgtattatcattacactgcttgtccaggttctcgtgtgcttcatgccattccatatatgtttcgcatttctgatgctggggaccggagagaacagttataacccatggggcgcttttactacctttctaatgaatctctctacatgtcttgatgtgatcctctactatattgtgagcaagcaattccaggcccgggtgatttctgtcatgctgtatcggaattacctccgctccatgaggagaaagtcattcagatctggcagcctccggtctctgagtaacataaactccgagatgctgtag

SEQ ID NO: 117826 - DNA, 297 bp, synthetic construct
  misc_feature 1..297: note = Description of Artificial Sequence: Synthetic coding sequence
  source 1..297: mol_type = other DNA
atgatcactctgaataaccaggaccagcctgttccctttaactcaagtcacccggatgaatacaagattgccgcactggtcttttacagctgtattttcattatcgggctttttgtcaatatcacagctctttgggtattttcttgcactaccaagaagcgcacaaccgtcaccatttacatgatgaacgtcgcactggtggatctgatttttatcatgaccctgcctttccgaatgttttactatgctaaagatgaatggccctttggcgagtacttctgccagatcctgggctag

SEQ ID NO: 117827 - DNA, 1086 bp, synthetic construct
  misc_feature 1..1086: note = Description of Artificial Sequence: Synthetic coding sequence
  source 1..1086: mol_type = other DNA
atggacattcagatggcaaacaactttaccccgcccagtgccactccgcaggggaatgactgcgatttgtatgcgcaccattctaccgcccggattgtcatgccccttcattattcactcgtattcattatagggcttgttggcaacctgttagccctcgtggtcatcgtgcagaaccggaagaaaatcaacagtacgactctgtactccaccaacctcgtaattagtgatatcctgttcacaaccgccctgcccactcgtattgcttattacgccatgggcttcgattggcgcataggcgacgccttatgccggatcaccgcccttgtcttttatatcaacacctacgcgggggttaactttatgacatgtctctcaattgacaggtttattgctgtggttcaccccctgcgatataataagatcaagcggattgagcatgcgaagggcgtctgcatcttcgtctggatcctcgtctttgcccagacgctgcccctgttgatcaatcccatgagcaaacaggaagccgagcggattacgtgcatggaatacccaaattttgaggagaccaaaagccttccgtggatactcctcggcgcctgtttcatcggctacgtgctaccgctgatcataattctgatttgttacagtcagatctgctgcaagcttttcaggacagctaaacaaaaccctttgacagagaagtccggtgtgaacaagaaagctctgaacaccataatcttaattatcgtggttttcgtgctgtgctttacgccctaccatgtggcaatcattcaacatatgatcaagaaacttagattcagcaacttcttggaatgtagtcagcggcacagcttccaaatttcacttcacttcacagtttgtttgatgaacttcaactgttgcatggatccttttatttacttctttgcttgtaaaggttataagaggaaggtgatgcgaatgctcaaacgacaggtgtcagtttctatcagctccgctgttaaatcggccccggaggagaacagtcgcgaaatgactgagacgcaaatgatgatccattcaaagtcatctaacgggaagtag

SEQ ID NO: 117828 - DNA, 1248 bp, synthetic construct
  misc_feature 1..1248: note = Description of Artificial Sequence: Synthetic coding sequence
  source 1..1248: mol_type = other DNA
atggttttcgctcacaggatggataattcaaaacctcaccttatcatcccgacccttcttgtccccctacaaaatcgctcctgcacagagactgcgacacccttgccttcccagtacttgatggagctgagcgaagaacactcctggatgagtaaccagaccgatctgcactacgtcctaaaaccaggagaagtcgccacagcttcaatcttcttcggtatcctgtggcttttttccatattcggaaattctctagtctgtttggtgatccaccgatcccggaggactcagagcaccacaaattacttcgttgtaagtatggcctgcgccgacctgctgattagtgtggcatcgactcccttcgtgctgttgcaatttacgacaggtaggtggacacttgggtcagcaacgtgtaaggtggtaagatacttccagtacctgactcccggtgtccagatctacgtcctcctgtccatatgcatcgatcggttctatacaatcgtttacccgctgagcttcaaggtgtctagggaaaaggcgaaaaagatgattgctgcttcctgggtatttgacgcaggctttgtgacacccgtgctgttcttttacggcagcaactgggattcccattgcaactactttcttccctcgtcatgggagggcactgcatatactgtgattcacttcctggtcgggtttgtgatcccatcagtgttgattatactgttctatcaaaaagtaatcaagtatatttggcggattgggactgatgggaggactgtgcgacgtactatgaatatcgtgcctagaaccaaagtgaaaactattaaaatgttcctgattctcaacctgctcttcttactgagttggcttccctttcacgtggcccagctctggcacccgcatgagcaagactacaaaaagtcatccctggtgttcacggccatcacatggatctccttctcatcctctgcaagtaagcccaccctttattccatctacaacgccaatttccggaggggcatgaaggaaactttttgcatgtcctcaatgaagtgctatagatccaatgcatacaccatcactacatcttccagaatggcaaagaagaattacgtcgggatcagcgaaatcccaagcatggccaaaacgatcactaaggattctatttacgatagctttgatagggaagcaaaggagaaaaagctggcctggcctatcaattccaacccccctaatacgtttgtctag

SEQ ID NO: 117829 - DNA, 1248 bp, synthetic construct
  misc_feature 1..1248: note = Description of Artificial Sequence: Synthetic coding sequence
  source 1..1248: mol_type = other DNA
atggtgtttgctcacagaatggataactcaaaaccccatctgatcattccaaccctcctagtgcctctacagaataggagctgtacagaaacagccacacccttacccagtcagtacctgatggagctatcagaggaacactcctggatgtctaaccagacagacctccattacgtgctcaagccaggtgaagttgccaccgcctctatcttttttggcattctgtggctattcagcatcttcggaaacagtttggtctgcctggtcatccaccgatcgcgacggacacagtccacaaccaactacttcgtcgtgtccatggcttgtgcagatctattaatcagcgtcgccagcacgccctttgtgctgctccaattcaccacaggaaggtggacactcggctctgccacttgtaaagtggttcgatactttcaatatctaacacccggggtgcaaatctacgtcctgttaagcatctgcatcgatcggttttataccatcgtttatccactgagttttaaagtgagcagggagaaagctaagaaaatgattgcagcttcatgggtatttgatgcaggctttgtcactcctgttctctttttctacgggtcaaactgggattctcactgcaattactttctgcccagtagctgggagggcactgcttatactgtcattcattttctggtaggattcgtgataccctctgtactgattatcctcttttatcagaaagtgattaaatacatctggcggattggcactgacggacggaccgtacgcaggacaatgaatattgttccacgcactaaggttaagactattaaaatgttcctgatcctgaacttgctgttcctgctgagctggctgcctttccacgtcgctcagctttggcaccctcatgaacaggattacaaaaaatcctccctggtattcaccgcaattacctggatcagcttctcttcctccgctagcaagcccaccctgtattccatatacaatgcaaatttccggcgcggaatgaaggagacattctgcatgtctagcatgaaatgttatagatcaaatgcctacactatcacgacgtcgtcaaggatggccaagaaaaattacgtgggtattagtgagattccttccatggctaaaactatcactaaggacagcatttatgatagctttgaccgggaggccaaagagaagaagctcgcgtggccgattaattctaatccgccgaatacctttgtgtag

SEQ ID NO: 117830 - DNA, 180 bp, synthetic construct
  misc_feature 1..180: note = Description of Artificial Sequence: Synthetic coding sequence
  source 1..180: mol_type = other DNA
atggtttttgcgcatcgcatggacaattctaagccacaccttataattcccacgctgcttgtgccactccagaaccggtcctgcaccgagactgccactccgctaccctcccagtatctaatggagctatctgaggaacacagctggatgagcaatcaaactgatcttcattacgtctag

SEQ ID NO: 117831 - DNA, 1077 bp, synthetic construct
  misc_feature 1..1077: note = Description of Artificial Sequence: Synthetic coding sequence
  source 1..1077: mol_type = other DNA
atgccatctgtgtctcctgcagggccctccgctggcgccgttcccaatgctactgcagtcacaactgtacggacgaatgcttccggactcgaggtcccgctattccatcttttcgccaggctggatgaagaattgcatgggacgtttcccggcctgtggctagcgctaatggccgtacacggggctatcttcttggctggcctagtcctcaatggcctggccctgtacgtcttctgttgtagaactagggcaaagacgcccagtgtgatttatacgataaacctggtcgtaactgacctgctggtgggcctttctttgcccacacgcttcgcagtatattacggcgccagggggtgcctgcgttgcgccttccctcatgtcctcgggtacttcctgaacatgcactgcagcatcctttttctgacctgcatatgcgtggatagatacctagccatcgtgcgcccggaggggtccaggcgttgcaggcaaccagcctgcgcccgggcagtatgcgctttcgtttggcttgcagccggtgccgtcactctctccgtcttgggtgtcaccggctctcgaccttgctgcagagtttttgccctgaccgttctagaattccttctgccgcttttggtcatctccgtgtttacgggccgaatcatgtgcgccctgtcccgccctgggctactacatcaaggcagacagcgcagggtccgggccatgcagttgctgctaacggtcctgattattttccttgtgtgttttacccctttccatgctcgccaagtggcagtggcgctgtggccggacatgcctcaccacacttcactcgtagtctaccacgtggccgtgaccctgagtagcctgaattcttgcatggacccaattgtgtattgcttcgtcacgagtggctttcaggctacagtgagggggctgtttggccaacatggggagcgtgagccctcgagcggggacgtggtctccatgcatagatcaagcaaagggtccggcaggcatcatatcctcagcgcaggaccgcatgctctgacccaggctcttgctaatggccccgaggcatag

SEQ ID NO: 117832 - DNA, 1050 bp, synthetic construct
  misc_feature 1..1050: note = Description of Artificial Sequence: Synthetic coding sequence
  source 1..1050: mol_type = other DNA
atgaactccactctagatggcaaccagagttcacacccattctgtctactggcttttgggtaccttgaaactgttaatttctgcctgttagaggttctgataatcgtcttcctcacagtgctcatcatttccggaaatatcattgtgatcttcgtgttccactgtgcacctctgttgaaccatcatacgacgagctacttcatccagacaatggcctacgcagacttattcgtgggagtgagttgcgtggtgccttcgctaagcctcctgcaccaccccttgcccgttgaagagtcccttacttgccagatttttggatttgttgtcagcgtgttgaagagtgtgagtatggcctcactggcctgtatatccattgaccgctatatcgccatcactaagccactgacctataatactttggtcactccttggagattgaggttatgtattttcttgatttggctgtattccacactggttttcttaccctcgttctttcactggggaaagcccgggtaccacggggatgtgttccagtggtgtgcagaaagctggcacactgactcatatttcacactgttcatcgtgatgatgctctacgctccagctgctctgattgtgtgtttcacctacttcaatatcttccggatctgtcaacagcacactaaggatatttctgaaaggcaggccaggtttagctcacaaagtggggaaaccggagaagtccaggcttgccctgataagcgctatgctatggttcttttccgaatcacctctgtgttctatatcctgtggctaccgtacataatatatttcctgcttgagtcttccaccggccattcgaatcggttcgcctcctttttgacaacgtggctcgcaatctccaattcattctgtaactgtgttatctattctttgtccaactccgtattccaaagaggcctgaaaagactctcaggcgcaatgtgcacatcatgcgctagccagactaccgccaacgatccctatactgtaaggagcaagggccctctgaatggctgccacatttag

SEQ ID NO: 117833 - DNA, 753 bp, synthetic construct
  misc_feature 1..753: note = Description of Artificial Sequence: Synthetic coding sequence
  source 1..753: mol_type = other DNA
atgaactctactctagatggaaatcagagcagccatcctttctgtctgctggcgttcgggtatctcgagacagtgaacttctgccttctggaggtgctgattatcgtgtttctgacagtcttgattatcagcggcaacattatcgtgatattcgtgtttcactgtgctcccctgcttaaccaccataccaccagttatttcatacagacgatggcttatgcagacttgttcgtgggcgtatcatgcgtagtgcctagcctgtctttgttgcatcaccctctgcccgtcgaagaaagtctcacatgccagatttttgggttcgtggtgagcgtattgaaatccgtgagtatggccagcctcgcctgcatctccatagatcggtacatcgctatcaccaaacctctcacgtacaatacactcgtgacaccttggcggttgaggctgtgcatttttctgatatggttgtatagcaccctcgtttttcttcccagtttttttcactggggtaagcctggttatcacggagacgtgtttcagtggtgtgcggaaagctggcacacagattcttacttcactctgttcatcgtaatgatgttgtatgctccagccgccctcattgtgtgcttcacgtattttaacatcttcaggatctgtcagcaacacacaaaagacatcagtgaacggcaagctcgattctcttcgcagtccggcgagactggggaagttcaggcatgcccagttagcaatcactag

SEQ ID NO: 117834 - DNA, 1302 bp, synthetic construct
  misc_feature 1..1302: note = Description of Artificial Sequence: Synthetic coding sequence
  source 1..1302: mol_type = other DNA
atgtgcttcagcccaatcctcgagataaatatgcagagcgagtcaaatataacggttcgcgatgacatcgatgacattaatacaaatatgtaccagcccctctcatacccactgagcttccaggtttcgcttactggttttcttatgctggagatcgttttgggacttggttcaaatctaaccgtcttggtgttgtactgtatgaagagtaaccttatcaactcagtgtcaaatatcatcacgatgaacctccacgtgctcgatgtcattatctgcgtaggatgtattccactgaccatcgtgatcttactcctgtcactggagtccaacaccgcactgatttgttgcttccatgaagcctgtgtttccttcgcctctgtgtctactgcaatcaatgtgtttgctatcacgcttgatcgctacgacatttccgtgaaacccgctaacaggatattgacgatgggacgggccgtgatgttgatgatctcaatctggattttttcctttttcagctttctgattccatttatcgaagtaaacttcttcagcctgcagtcagggaacacctgggagaacaagacactgctgtgtgtgagtacgaatgagtattataccgaacttggcatgtattaccatcttctagtacagatcccgatcttctttttcaccgttgttgtgatgctgattacctacacgaaaattctgcaggcactgaatatccgcattggtactaggttcagcaccggacagaagaagaaagcccgaaaaaagaagacaatctctctaaccacacagcatgaagccacggacatgagccagagttctgggggtcgcaacgtcgtctttggtgttaggacatccgtttccgttatcatcgccttgagacgggcagtcaaacgtcaccgcgagcggagggagagacagaaacgggtgttcaggatgtcacttctcatcatttccacatttctactgtgctggacccccattagcgtgctaaacacaacaattctgtgcctcggcccctccgacctgttggtaaagcttcgcctgtgctttcttgtcatggcctatggcacaaccatattccacccccttctgtatgcatttactaggcagaagttccaaaaagtgctcaagtctaagatgaagaagcgcgtggtttccatcgtggaggccgatccactgcccaacaatgcagtgatacataattcatggattgaccccaagcgtaacaaaaagattacgttcgaggactcggagattcgtgaaaagtgcttagtaccacaggtggtgacagactag

SEQ ID NO: 117835 - DNA, 1086 bp, synthetic construct
  misc_feature 1..1086: note = Description of Artificial Sequence: Synthetic coding sequence
  source 1..1086: mol_type = other DNA
atggctcctactgagccttggtcgccctcccccgggtcagccccctgggactacagcggcctggatggactggaggaactggagctgtgtccagctggtgaccttccttacggctacgtatacattcccgctctttacctggccgcttttgccgtgggccttctgggaaacgccttcgtggtttggttgctggctggtaggcgaggccctcggcggttggtcgacactttcgttctccatctagcggccgctgatttgggatttgtcctgacgctgcccctttgggctgctgcagcagccctcggtggtagatggcctttcggggatggcctctgcaagctgagctcctttgcccttgctggaactagatgtgctggggctctgttattagccggcatgtcagtcgataggtacctcgccgtagtgaagctgctagaggccagacccctgaggactccaaggtgcgctcttgcgtcttgctgtggtgtctgggcggtcgctcttctcgcgggtttgcccagcctcgtttaccgtggtttacagcctctgcccggggggcaggattcgcagtgtggagaagagccctcccatgccttccagggactcagcttgctgctgctgctgttaacgttcgttcttccgctggtggtcaccctcttttgttattgccgcatctcccggcgactcagaagaccccctcacgtgggccgggctcggcgcaacagtctgcgtatcatcttcgccatagagtccacattcgtcggctcgtggttacccttttctgccctgagggccgtgtttcatctggcacgtctgggtgccttgcccctaccctgcccactcttactggccctgcgctggggccttacaattgcgacttgcctggcattcgttaactcctgtgcaaatccactgatttaccttttactggaccgctctttccgggcccgggcactggatggggcctgcgggcggaccgggcgcttagctaggagaatctcgagtgctagtagcttgagccgtgacgactcttctgtattcagatgcagagcacaagccgcaaacacagcttccgccagctggtag

SEQ ID NO: 117836 - DNA, 1014 bp, synthetic construct
  misc_feature 1..1014: note = Description of Artificial Sequence: Synthetic coding sequence
  source 1..1014: mol_type = other DNA
atgaattcttgggacgccggcttggccggacttttggtggggactatgggcgttagcttgttgtctaatgcccttgtactcttatgccttctacacagtgccgatattcgaagacaggcccctgctctgtttacattaaatctcacttgcgggaacctgctctgcacagtagtaaacatgccactcaccctcgccggggttgtcgcgcaacggcagcccgcgggggataggctgtgccgtctggccgccttccttgacactttcctggctgccaatagcatgctgagtatggctgctctaagcatcgatcgatgggtggcggtcgtattccccctctcttatagggccaagatgcgactcagggacgctgcactgatggtggcctacacctggttgcatgcactgacgtttcctgctgctgccctggcgttgtcctggctcggatttcatcagctttatgcatcttgcacgctatgttccagaaggcctgatgagcggcttaggtttgccgtgttcaccggcgcgtttcacgcactctctttcttgctctcattcgtagtcctgtgttgtacctacctgaaagttctgaaagtcgcacgcttccactgtaagaggattgacgtgataactatgcagaccttggtgcttctggtcgacctgcacccctcagtgcgagaaaggtgtttggaggagcaaaagaggaggcggcagcgggctaccaagaaaatatcaactttcataggcacattcctcgtctgcttcgccccttatgtaataactagactggtggagctcttctcaacagtccccataggttcgcactggggagtgcttagcaagtgcctcgcatactctaaagctgcctccgacccctttgtgtacagcctccttagacatcagtaccggaagtcttgcaaagagattctgaatcgccttctgcatcgccgcagcatccatagctctggtctgactggggactcccactctcaaaatatcctgcccgtcagcgagtag

SEQ ID NO: 117837 - DNA, 1128 bp, synthetic construct
  misc_feature 1..1128: note = Description of Artificial Sequence: Synthetic coding sequence
  source 1..1128: mol_type = other DNA
atggcgaatgcgtctgagcctggcggaagtggcggaggtgaggctgctgcactgggtctgaagcttgcgaccctctctctcctcctgtgcgtttcactggcaggaaatgtcctctttgccctgctgattgtgagagaacgtagtctccaccgggccccctactatctgttactggacctgtgcctggctgatgggcttagggccctggcatgtcttccagccgtcatgctggcagcaaggcgggcggccgctgcagccggggctccgcctggggccctgggttgtaaacttctggccttcttagccgctttattttgttttcacgcagccttcttgctgttgggtgtgggcgtgaccagatatttggcaattgcacaccacagattttacgcagaaagactggctggatggccttgcgccgcaatgctcgtctgcgctgcgtgggcactcgctttggctgccgcttttcccccggtgcttgacggtggcggagatgatgaggacgctccttgtgcgctggaacagaggccagatggggcgcccggcgccctgggttttctgctgctcctggccgtagttgttggggctacccaccttgtctatctccgcttactgttctttatccatgatcggcgtaagatgaggccagcccggctggtcccagccgtgtctcatgattggacattccacggccccggggccactggccaagctgctgccaattggacagcagggttcggaagagggcccactcctccagctctcgttggcatccgacccgcgggccctggccgcggagcaaggcgcctactcgtgttggaagagtttaagaccgaaaagcgactttgcaaaatgttttacgcagtgacactcctgtttttgttgctctggggcccctatgtggttgctagttacctgagggtcttggttcgtcccggtgcagttccccaggcctacctgacagcatccgtgtggcttacattcgcccaagcaggaatcaaccccgtcgtgtgttttctgttcaatcgcgagctgcgagattgttttcgcgcccagttcccttgctgccaatctccaagaaccacacaggcgactcatccgtgcgatctgaaaggcatagggctgtag

SEQ ID NO: 117838 - DNA, 993 bp, synthetic construct
  misc_feature 1..993: note = Description of Artificial Sequence: Synthetic coding sequence
  source 1..993: mol_type = other DNA
atgatgtggggcgctggctcaccactggcttggctgtctgctggttcaggtaatgtgaatgtgagcagtgtcggacccgcggagggaccaactggacctgcggcgcctttgccctcgccgaaggcatgggacgttgtcttgtgtatttctggcactctggtctcctgcgagaacgctctggtcgtggcaattatcgtgggcacgccagccttcagagcaccgatgttcctgcttgtcggatcattggccgtggcagatctgctggccggcctggggttggtgcttcatttcgcagcagtcttttgcataggttctgccgaaatgtcactggtgctcgtaggcgtgctcgcaatggcttttaccgcgagtataggaagtcttctggctattacagttgaccggtacctgagcctgtacaacgcattgacttactacagcgaaacaaccgtcactagaacatatgtcatgttggcccttgtgtggggcggggcccttggactcggactcctgcctgtcctcgcatggaattgcctggatggcctgaccacttgtggcgtggtttaccccctgagtaagaatcatctggttgttttagctatagctttttttatggtgttcggcatcatgctccagctgtatgcacagatttgtcggatagtatgccgacacgcccaacagatcgccctgcaacgccacctacttccagcctcccactatgtcgcaacccggaaggggattgccaccttagccgtggtgctgggcgctttcgccgcatgctggctgcccttcacagtgtattgcctgcttggggacgctcatagccctcccctgtatacctacttaacactgctccccgccacttacaattccatgattaatcctattatttacgccttccgcaatcaggatgtccagaaggttctttgggctgtgtgctgctgttgcagctctagcaagatccccttccgctccagatcaccatcggatgtgtag

SEQ ID NO: 117839 - DNA, 960 bp, synthetic construct
  misc_feature 1..960: note = Description of Artificial Sequence: Synthetic coding sequence
  source 1..960: mol_type = other DNA
atgccttttccaaactgctctgccccctccactgtcgtcgccaccgctgtgggggttctcctcgggctagaatgtggcttgggcttgctgggcaacgccgtcgccctgtggactttcctgttcagggtgcgggtttggaaaccgtacgcagtatatttgttgaacctcgcgctcgcggacttgctgctcgctgcctgtttgcctttcctggccgctttttatttgtctctccaggcttggcatctaggcagagtgggatgctgggccctgcatttcttattggatctgagccgctccgtcggaatggccttcttggcagcagtggcactcgacagatatttaagggtcgtccaccccagactgaaagtgaatttgttatctccacaggctgccctgggcgtgagtgggctcgtgtggttgctcatggttgcgctcacgtgcccaggcttattgataagtgaagctgctcagaattcaaccaggtgccattctttctactcccgtgccgacggcagtttttccataatttggcaggaggccctgagttgtctgcaattcgtccttccgtttggcctgattgttttctgtaacgctggcatcatcagagctctgcagaaacgtctccgggagcccgagaagcagcccaagctgcagcgggcccaggccttggtaacccttgtagtggtgctcttcgctctgtgtttcctgccttgtttcctggcccgtgtgctcatgcatatttttcaaaatctgggttcctgcagggctttatgcgccgtggcccacacctcggacgtcacaggttccctgacatacctgcattccgtgcttaaccccgtcgtatactgtttttcttcaccaacctttagatcctcatacagaagggtgttccacacactgcgtggcaaaggtcaagccgccgagccgcccgatttcaaccctcgcgacagctatagctag

SEQ ID NO: 117840 - DNA, 1071 bp, synthetic construct
  misc_feature 1..1071: note = Description of Artificial Sequence: Synthetic coding sequence
  source 1..1071: mol_type = other DNA
atgaacggagtgtccgagggaacaagaggctgttccgaccgacagccaggtgtgcttactagagaccggagttgcagccgtaagatgaactccagcgggtgtctgagtgaggaggtgggaagtctgcgcccacttactgttgtgatccttagcgcctcgatagttgtgggcgtgctggggaatggattagtcctctggatgacggtattcaggatggctaggaccgtgtcgacagtctgcttcttccaccttgctttggccgacttcatgctcagcctgtccttaccaatcgcaatgtactacatagttagccggcagtggctgctgggtgagtgggcctgcaagttatatatcacctttgtctttctcagctacttcgcatcaaactgcctactcgtgttcatttctgtggataggtgcatatcagtgctgtatcccgtttgggcgttaaatcaccgcaccgtgcagagagcatcctggctagcatttggcgtttggctactggccgcagctctttgttctgctcacctcaagttccggaccacacgaaagtggaatggatgtacccactgctacctggctttcaattccgacaatgagactgcccagatctggatcgaaggggttgttgaggggcacatcatcggtactataggacatttcttgctggggttcttaggacccctcgccatcatcggcacatgtgcccacctgatccgggctaaactgctacgggagggatgggtccacgccaacagaccaaagcgcctgctgctggtactcgtgtctgcattcttcattttctggtccccatttaatgtggtgctgctcgttcacctgtggcgaagagttatgctgaaagaaatctaccaccctcgcatgctgttgatcctgcaggcttcatttgcgctgggctgcgtgaatagtagtttgaatccattcctgtacgtgttcgtgggacgcgactttcaggaaaaattcttccagtcacttacgagcgccctggcacgtgcatttggcgaggaagagttcctgagctcttgtccccgcggcaacgcccccagagaatag

SEQ ID NO: 117841 - DNA, 1146 bp, synthetic construct
  misc_feature 1..1146: note = Description of Artificial Sequence: Synthetic coding sequence
  source 1..1146: mol_type = other DNA
atgagatcgcacaccatcaccatgaccacaacaagcgttagctcatggccctattcatcccaccgcatgaggtttattactaatcacagcgaccagcccccacaaaacttctcagccactccaaacgtgacgacgtgtcctatggatgagaaactcctctcgactgtgctgacgacatcgtacagcgtcatctttattgtagggctagtgggcaacatcatcgccctgtacgtctttctcgggatccacagaaaacgcaattcaatacaaatctatctgctgaatgtagccatcgccgatcttctgttgatattttgtctgccctttcgaatcatgtatcacatcaaccagaacaaatggactcttggagtcatactctgtaaggtcgtcgggaccttattttacatgaatatgtacatctcaattattctgctgggttttattagcctcgataggtacattaagataaatcgctctatccagcaaagaaaagccataacaaccaagcagtccatttacgtgtgctgtatcgtgtggatgctggccctgggcggcttcttgaccatgatcatcctcacgctgaagaaaggagggcacaactctacgatgtgctttcactatcgcgataagcacaacgcaaaaggagaagccatttttaatttcatactggtcgtcatgttctggctcatttttctcctgatcatcctatcatatattaagattgggaaaaacctgctcagaatctctaaacgtaggagcaagtttcctaattcggggaaatacgctacaacagctcgcaattccttcatcgtcttaatcattttcacaatatgtttcgtcccttaccatgcattcaggttcatatatatctcgtctcagctgaatgtgtcctcttgctactggaaagaaatagttcacaagaccaatgaaattatgctggtcctctctagcttcaatagctgtctcgatcctgtgatgtatttcctaatgtcctcaaacattaggaagattatgtgccagctgttgtttagacgcttccagggcgaaccttctcgttcagagtctacctcggaattcaagccaggctactctctccatgacaccagcgtcgccgtaaagatccaaagttcgtccaaatccacttag

SEQ ID NO: 117842 - DNA, 1146 bp, synthetic construct
  misc_feature 1..1146: note = Description of Artificial Sequence: Synthetic coding sequence
  source 1..1146: mol_type = other DNA
atgagaagccacaccatcacaatgactaccacctccgtgagctcatggccctacagcagtcatagaatgaggtttattactaatcactctgaccagcctccccaaaacttctccgccacccctaatgtaaccacatgcccgatggatgaaaaacttctgtctaccgtattaacaacatcttattccgtcatcttcatcgtcggcctcgtcgggaacatcatcgcactgtatgtatttcttggtattcatagaaaacgcaattccatccagatatacctgctcaacgttgctatcgctgatctcttgctcattttttgtctcccctttagaattatgtaccatatcaaccaaaataaatggacactcggagtaattctgtgcaaggttgtgggaaccttgttctacatgaacatgtatatctccatcattctcctgggcttcatatccttggaccgctacatcaaaattaaccgaagtatacagcagcgaaaggcaatcaccactaaacagtcaatctacgtgtgctgtatcgtatggatgttagccctgggaggatttctgactatgataatcttgaccctgaagaaagggggccataattcgaccatgtgcttccattacagggacaaacataacgcaaaaggagaggcaatatttaactttattcttgttgttatgttttggctcatattcctcctaattatccttagctacataaagatcggcaagaatctgctccggatcagcaagcgtcgctcgaagttccctaactcggggaaatatgccaccaccgcaaggaactcatttattgttttgattattttcaccatctgcttcgtaccttaccacgcgttcaggtttatttacatttccagtcagctcaacgtgagctcttgctactggaaggaaatagtgcacaaaacaaacgaaatcatgcttgtcttatctagctttaactcttgcctggatcccgtcatgtatttcttaatgtcgtcgaacatccgtaagatcatgtgtcagcttcttttccgtcgcttccagggcgagcccagtcgatctgagagcacttccgagtttaagcctgggtacagcctgcatgatacctctgtcgcggtcaaaattcagtcatcatcaaaatctacctag

SEQ ID NO: 117843 - DNA, 1005 bp, synthetic construct
  misc_feature 1..1005: note = Description of Artificial Sequence: Synthetic coding sequence
  source 1..1005: mol_type = other DNA
atggatgagaaattgctgtccacagttctcacaactagctacagcgtgatattcatcgttggccttgtgggaaacatcatcgccttatatgtgttcctgggcatacatcggaagcgcaactccattcagatttacctgttgaacgttgctatcgcggatttactgcttattttttgcctccctttccgcattatgtaccacatcaatcaaaacaaatggacgttgggggtcatcctgtgtaaagtggtaggaactctattctatatgaatatgtacatctctattattctcttgggctttatttcacttgaccgctacatcaagattaaccgttctatccagcagcgcaaggcaatcactacaaagcagtccatctacgtatgttgtatcgtttggatgctggctctcggtggtttcctcacgatgattatactcactcttaagaaaggcggacataatagtacaatgtgtttccattacagagacaaacataacgcaaaaggagaggcaatctttaacttcattttggtcgtcatgttctggcttatatttctcctgatcatcctgagctacatcaagatcggcaaaaacctccttcgcattagcaagcggcgcagtaagtttcccaactcaggcaaatatgccaccaccgcccgtaactcctttattgtgctaattatttttactatttgtttcgtgccttaccatgcgtttagatttatctacatcagctcccaactcaacgtgtcctcttgctattggaaggagatcgtccataagactaatgaaatcatgttagtgctatcttctttcaatagctgccttgatccggtaatgtatttcctgatgtctagcaacatccgtaagatcatgtgccaacttttgtttcgccgatttcagggcgagccatcacggagcgagagtacaagcgagttcaagccggggtatagcctccatgacacatccgtggctgtgaaaattcagtcatctagcaaaagtacttag

SEQ ID NO: 117844 - DNA, 930 bp, synthetic construct
  misc_feature 1..930: note = Description of Artificial Sequence: Synthetic coding sequence
  source 1..930: mol_type = other DNA
atgaatggtacttataacacctgtggttcaagtgatctgacctggccaccggccataaagctggggttttatgcctacctgggggtgttactggtgctcggcttgctgctcaattcactggcactgtgggtgttttgttgcagaatgcagcagtggacagagacacgcatctacatgacgaatctggccgtggcggacctctgcctactgtgcacactgccattcgttctgcacagtttgagagacacttctgatacaccgctgtgccaactgtcacaaggcatttacttgactaatagatatatgtccatctcactggtgactgccatcgctgtggatcggtacgtggccgtccggcatcctttgagagcgcgtggcttgcgcagtccccgccaagccgctgcagtgtgcgctgtgctttgggtactcgtgattggatcacttgttgctcgctggctcctggggattcaggaaggcgggttctgcttcagatcaactcgccataacttcaactcgatggcttttccactcctgggcttctacctgccactggccgtagtggtattctgttccctcaaggtggttactgcgctggcgcagaggccgcccactgatgtcgggcaggccgaggccaccaggaaagccgccaggatggtctgggcgaacctgctcgtctttgttgtgtgttttttacccttgcatgtggggttaaccgtgcggctcgccgtgggttggaacgcatgcgctttactagagaccattagacgagcactctacattacctccaagctgagtgacgccaactgttgtctggacgccatctgttactattatatggcaaaggaattccaggaggcctccgccctcgccgttgcgccatctgcaaaggcgcataagtcgcaggacagcttatgcgtgactcttgcatag

SEQ ID NO: 117845 - DNA, 930 bp, synthetic construct
  misc_feature 1..930: note = Description of Artificial Sequence: Synthetic coding sequence
  source 1..930: mol_type = other DNA
atgaatgggacttataatacatgtggaagcagcgacctcacctggccccctgcaattaagctggggttttacgcgtatctgggtgtgctgctggtgctgggtttactgctaaattccctagcattgtgggttttctgctgtaggatgcaacagtggaccgagacccgtatttatatgaccaacctggctgtcgcggacctgtgtttgctatgtacgttaccgttcgtgctccatagcctcagagacacatctgacacgcccctgtgtcagctctcccaggggatatacctaaccaatcggtacatgagtatctctctcgtaacagccatcgccgtagaccggtacgttgcagtcaggcatccactccgagctagggggctgaggtccccccgccaggcagctgctgtttgtgcagtgctctgggtactggtgatcgggtctttggtcgctcgatggctgctggggattcaggaaggaggcttctgttttaggtccacaagacataacttcaattcaatggcctttcccttgttaggcttttatctccctctggccgtggtggtcttctgttcactgaaggtagtgacggcattagcacaaaggccacctaccgacgtgggccaagccgaggccactaggaaggccgcacggatggtgtgggcaaacctgttggtattcgtggtctgctttttaccactgcacgttgggttaacggttcgattagctgtgggatggaatgcatgcgccctccttgagaccatcagacgagccttatacattactagcaaattatctgacgccaactgttgtctagacgctatctgctactactatatggccaaggagtttcaggaagcgtccgctctggcagtggctccttctgctaaggctcataaatctcaagacagcctttgcgtgacgctggcttag

SEQ ID NO: 117846 - DNA, 930 bp, synthetic construct
  misc_feature 1..930: note = Description of Artificial Sequence: Synthetic coding sequence
  source 1..930: mol_type = other DNA
atgaacggcacctacaatacttgtggcagtagcgatctcacttggccacccgcaatcaaactcggcttttatgcttaccttggagtccttctagtgctcggactcctgttgaactcattggcactctgggtcttttgctgccggatgcagcagtggacggagaccaggatatatatgacgaatcttgccgtcgcagatctatgtctgctgtgcacccttcctttcgttctccacagtctccgcgacacaagcgacacacccctgtgtcagctatctcaggggatttacctaaccaataggtatatgagcataagcttagtgaccgcgattgcggtggaccggtatgtggctgttcgacatcccctacgggctcgcggtttgcgttcccctcgccaggctgccgcggtgtgtgcagtactgtgggtcctcgtcatcggcagccttgtcgccaggtggctcctcggcattcaggagggaggcttttgtttcagaagcacccggcacaacttcaacagtatggccttccccctcctgggcttctaccttccgctcgcagtggttgtgttttgctccctgaaggtggttaccgccctcgcgcaaaggcccccaacggacgtcggccaggcggaagccacgcggaaagccgcaaggatggtgtgggccaacttactagtgtttgtggtgtgctttttacccttgcatgtcggacttaccgtaagacttgccgttggctggaacgcgtgcgccctgctggagacaattagacgagcgttatacattacttcaaagctaagtgatgccaattgttgcctcgatgccatctgctattattatatggctaaggaatttcaagaggccagtgcgcttgccgtggcaccgtcagccaaggcccataaatctcaggactccttgtgcgtgacactggcttag

SEQ ID NO: 117847 - DNA, 930 bp, synthetic construct
  misc_feature 1..930: note = Description of Artificial Sequence: Synthetic coding sequence
  source 1..930: mol_type = other DNA
atgaacggtacctacaacacgtgcggttcaagcgacctcacatggcccccggccataaagctgggattttatgcatacttgggcgtacttctcgtgctaggccttctcctgaatagtctggcactgtgggtcttctgctgccgcatgcaacaatggactgagacacgtatctatatgacaaacctggcggtcgccgatttgtgccttctatgcacactacccttcgttcttcactccctgcgagacacctccgatacaccgctatgtcagctctctcagggtatctacttaaccaatcgctacatgtcaatctcattagtcaccgctattgcagtggataggtatgtagcagtgcgccacccgctgcgcgcccgtggactgagatcccctcgccaagccgcggcggtatgcgccgtcctgtgggtgctggtgattgggtcgctggttgcccggtggttacttggtatacaggaaggtggtttttgttttcgtagcactcgacacaatttcaacagcatggctttccctctgctcggcttctatttaccactcgcggtcgtggttttttgttcattgaaggtcgtgacagccttggctcaacgcccgccaaccgacgtggggcaggccgaggccacacggaaggctgccaggatggtctgggcaaatctgctggtattcgtcgtgtgcttcctgcctttgcacgttgggctgaccgtacggctcgccgtcggctggaacgcatgcgctcttttagagactatccgccgggccctttatatcacaagcaagctgagcgatgcaaactgttgtctcgacgctatctgctattactatatggcaaaggaattccaggaggcctcagctctggcggtggccccatccgcaaaggcgcacaaatctcaagactctctatgtgttacattggcctag

SEQ ID NO: 117848 - DNA, 1023 bp, synthetic construct
  misc_feature 1..1023: note = Description of Artificial Sequence: Synthetic coding sequence
  source 1..1023: mol_type = other DNA
atgctttcaggctcacgagccgtgcctacaccccatcgagggtccgaagagttgcttaaatacatgttacattctccatgcgtgagtttgaccatgaatggaacttacaacacttgcggatcctcagacctcacctggccccctgccatcaagcttgggttttacgcttatctgggagttttgctagtacttggattgcttctgaactcactcgctttatgggtgttctgttgtaggatgcagcaatggaccgagacgcgtatttacatgactaacttagccgtggctgacctatgcctgctttgtacattgccatttgtgctgcacagcctgagagatacctcagatacccctctttgccagctgtctcagggtatatatctcaccaacagatacatgagtatatccctggttactgccatcgcagtggacagatacgtggctgtaagacatccactccgcgccagaggcctgagatcaccgcgacaggcagctgctgtgtgcgctgtcctttgggttctggttatcggatctctcgtggcgcgctggctgctgggcatccaagagggcggtttctgtttccgatcaactagacacaactttaactccatggcattccccctgttaggtttttacctacccctggcagtggtggtattttgtagccttaaagtggtaaccgcactggcacaacggcctccgaccgacgtgggccaagccgaagccacccgaaaggccgcccggatggtatgggccaacttgctcgtcttcgtggtctgcttcctccctctgcatgtgggcctgacagttcggctggccgtgggatggaatgcctgtgccctgttggagaccatacgtcgggctttatacatcacgtccaagctgtctgatgccaactgctgcctcgacgcgatttgctactactacatggctaaagagttccaagaggccagcgcattagctgtggccccttccgctaaggcacataagtctcaggattcactgtgtgtgactcttgcctag

SEQ ID NO: 117849 - DNA, 1842 bp, synthetic construct
  misc_feature 1..1842: note = Description of Artificial Sequence: Synthetic coding sequence
  source 1..1842: mol_type = other DNA
atgcgcgctcctggagcgcttctggcacgcatgagccgtctcctccttctactgctactgaaggtgtccgcttcttcagctctcggagtagcaccggcatccaggaatgagacttgtttgggagagagctgcgcccccactgtgattcaaaggaggggcagagacgcttgggggcccgggaactctgctcgagatgtcctgcgcgcccgcgcacccagagaggaacagggcgctgccttcctggcgggcccatcgtgggacctcccagcagcgcctggacgagaccccgccgcagggaggggcgccgaggcctccgccgctggccctccaggaccgcctactcggccgcccggcccatggcgttggaaaggcgcacgaggacaggagccttctgagaccctggggagaggaaaccctactgcactgcagctgtttctacaaatcagtgaggaagaggagaaggggccccggggagcaggaatcagtggacggagtcaagagcagtcagtgaaaactgtgcccggagcaagcgatttgttttactggcccagaagggctggcaagctgcagggctctcaccacaagccattgagcaaaaccgccaacggcctggccggccacgaaggttggacaattgccttgccaggacgggccctcgcccagaatggatccctcggagaaggaatccatgaacctgggggtcccaggcgcgggaactcaaccaacaggagggtaagactcaaaaaccccttctatcccctgacccaagagagttatggcgcctacgctgtcatgtgcttgtccgtggtaatctttggcacaggaattatcggcaatctcgccgtgatgtgcattgtgtgtcacaactactatatgagatctatttccaactccctgttggcaaatctcgcattctgggactttctaatcatctttttttgcctgccccttgtgattttccatgagctgacaaagaagtggttgcttgaggactttagttgtaaaatcgttccctacatcgaagtggcttctctgggtgtgaccacttttacattgtgcgccctctgcatagaccgctttagagcggcaactaacgtccagatgtattacgagatgattgaaaattgctcatccaccacggccaaacttgctgtgatctgggtgggggctctgctgttagccttgcctgaggtggttctccgccagctttccaaggaagatcttggctttagtggccgggcaccagccgaaaggtgcataataaaaatttcgccggatctcccagacacgatttatgtgttggcgctgacctacgattctgcacggctatggtggtatttcgggtgctacttctgcctccccaccctgttcaccatcacgtgctctctggtgactgcaaggaagatccgaaaagcagaaaaagcatgtacgcgtggcaacaagcgtcaaatccagctcgagtcccagatgaattgtacagtcgtcgccttaaccatactttacggcttctgtatcatccccgaaaacatctgtaacattgtgaccgcttacatggcgaccggcgtgtctcagcagaccatggacctactaaacataattagtcaattcctcctgtttttcaaaagttgcgtcacgccggtgctgctgttctgcttatgcaaaccgttcagcagagctttcatggagtgctgctgttgttgttgtgaagagtgcattcagaagtccagcaccgtaacttctgacgataatgataatgagtatacgacggagttggaattgtctccttttagcactatccgtagggagatgtcaactttcgcttctgtggggactcattgttag

SEQ ID NO: 117850 - DNA, 1362 bp, synthetic construct
  misc_feature 1..1362: note = Description of Artificial Sequence: Synthetic coding sequence
  source 1..1362: mol_type = other DNA
atggcgtctccatctctcccgggatccgactgcagccagatcattgaccactctcatgtgcctgagttcgaggttgccacctggattaaaataacgcttattttggtctatctcattatctttgtgatgggattacttggcaactccgccacgattagggtcactcaggtactgcagaagaagggttatctgcagaaggaggtgactgaccacatggtgtcgctagcctgtagcgacattctggtgtttctcatcggcatgcctatggagttctactccattatctggaaccccttaactacatcttcgtacactctcagttgcaagctgcacacctttctttttgaggcctgcagctatgcgacattactgcatgttctcacattgtcattcgagcgatacatagccatctgtcaccccttcaggtataaggctgtgtcgggcccttgccaagtgaaactgctcattgggtttgtgtgggtgacatccgcactggtggctctccccttgttgttcgctatgggaaccgaatacccactcgtgaacgtgcccagtcatcggggtctgacctgtaatcgctcatcgaccaggcatcacgagcagcctgaaaccagcaatatgtccatctgcacaaacctttcttccaggtggaccgtattccagagcagtattttcggcgcgttcgtggtgtacctcgttgtactgctgtcagtggcctttatgtgctggaacatgatgcaggtattaatgaagtctcagaaggggagcctggcaggaggtactagacctccacagttacgcaagtctgagagcgaggagagtcgaacagctcgaaggcaaaccatcatcttcctaagactcatcgtggtgaccctggctgtttgttggatgccgaatcaaatccggcgaattatggccgctgctaagcctaagcacgattggacgaggtcgtatttccgggcctacatgatcctcctgcctttttctgagaccttcttttacctaagcagcgtgatcaatcccctgctgtacacggtttctagccagcagttcagaagggtgttcgtgcaggtcctgtgttgtcgactgagcttacagcatgctaaccacgagaaaaggctgcgcgttcatgctcactcaactacggatagcgctaggttcgtgcagcggccactactctttgcgagtcgaagacagtcaagtgcccggaggacagaaaaaatttttctgagcacatttcagagtgaggccgaaccccagtctaagagtcagagcctttccttagagagtttagagcctaattccggtgcaaagcccgcgaacagcgctgcggaaaacggatttcaagagcacgaagtctag

SEQ ID NO: 117851 - DNA, 1089 bp, synthetic construct
  misc_feature 1..1089: note = Description of Artificial Sequence: Synthetic coding sequence
  source 1..1089: mol_type = other DNA
atgggcaaccatacatgggaaggctgccatgtggactcccgcgtggaccaccttttcccaccaagtctgtatatctttgtcatcggcgtcgggctgcccactaactgcctggccctttgggctgcttatcgacaagtccagcagagaaacgaactgggggtttatctgatgaatctgagtatcgccgatttattatatatttgcaccctccccctgtgggtcgactacttcctccaccatgacaactggatccacggtcctgggtcctgtaaattgttcgggtttatcttctatacaaacatttatatctctatcgcatttctatgttgtatttcggtggaccgctacctagctgtggctcatcccctccggttcgctaggctgaggagagtgaaaacggccgtcgccgtgtcttccgtggtgtgggcgactgagttgggcgccaattccgcgcccctctttcatgacgagctatttagagacaggtacaaccatactttttgctttgagaaattcccgatggagggttgggtggcttggatgaacttgtaccgcgtgttcgtggggtttttgtttccttgggctctgatgctgctcagctaccggggaatccttagagctgtcaggggatcggtgagtaccgagcgacaggaaaaggccaaaattaaaagattggcgctgagcctcatcgcgatagtcttagtgtgttttgctccatatcacgtgttattactgtctcgatccgctatctatctaggccgtccctgggactgtggattcgaggaacgagtgttttctgcatatcatagctctctggccttcacatctttgaactgtgtggctgatcctattttgtattgtctggtgaatgaaggcgcccgtagcgacgtcgctaaggctcttcacaacctgcttcgtttcctggcctctgataagccccaggaaatggccaatgcaagtctcaccctggagacgccactcaccagtaagaggaactcaaccgctaaagccatgaccggatcttgggcagcaacccccccatctcagggcgatcaggtacagttgaaaatgctccctccagcccaatag

SEQ ID NO: 117852 - DNA, 1041 bp, synthetic construct
  misc_feature 1..1041: note = Description of Artificial Sequence: Synthetic coding sequence
  source 1..1041: mol_type = other DNA
atggacacaggaccagaccagagctatttcagtgggaatcattggttcgtgttttccgtgtaccttttgacatttctggtcgggctacccctgaacctcctggccctggtcgtttttgtgggcaagctgcgctgtaggcctgtggctgtagacgtcctgttactgaatcttactgcttccgacctcctcctcctcttgtttttgccgtttcgcatggtggaggctgccaacgggatgcattggcccctgccgtttattttgtgccccctgtccggtttcatctttttcaccaccatatatctcacagcactctttctcgcagcagtgtccattgaaaggtttttatccgttgctcatcccctgtggtataagacccgaccccggctcgggcaggccggactggtttcagtggcatgctggctgctggcctccgctcattgttctgtggtgtacgtaattgagtttagtggggacatttctcattcccaagggactaacggcacatgctacctcgaattctggaaagaccaactggctatcctcctaccagtcagactcgagatggcagtggtgctctttgtagtgccgctgattatcacatcctactgctactcgcgactggtttggattctgggtcgcggcgggagccacagacgccagagaagggtcgctggccttgtggccgctacgctcctaaacttcttggtgtgcttcgggccttataacgtgagccatgtggtgggttatatctgcggcgaatcccctgtctggcgtatctacgttacactgctgtccaccctgaatagttgcgttgatccttttgtgtactactttagttcttctgggttccaggcggactttcatgaacttctgaggagactctgtggcctctgggggcagtggcagcaggaaagctcaatggaactcaaggaacagaaggggggtgaggagcaacgtgcagacagacccgcggaaaggaagacatctgaacacagtcagggatgcggaaccggcggccaggtagcctgcgccgaaaattag

SEQ ID NO: 117853 - DNA, 1119 bp, synthetic construct
  misc_feature 1..1119: note = Description of Artificial Sequence: Synthetic coding sequence
  source 1..1119: mol_type = other DNA
atggcctgcaacagcactagtctggaagcttatacctatctgctgttgaatacttccaatgcctctgatagcggcagcacacagctgccagcacccttgcgcatcagtctagccatcgtgatgctattgatgactgtggtcggcttccttgggaacaccgtcgtctgcattatcgtgtaccagagacccgcaatgagatctgccataaatctcctgctagccactcttgctttcagtgatatcatgctctccctatgttgtatgcctttcacggccgtcacattaatcacggttcgctggcacttcggagaccacttctgccggctatccgctaccctgtactggttcttcgttttagaaggcgtcgccatccttttgatcatatcagtcgatagattcctcatcatcgtgcagagacaggataagctcaaccctcggagggccaaagtcattatagccgtttcatgggtgctgtctttttgtatagccggaccttctctaacaggttggacactcgttgaagtgcccgcccgagccccacagtgcgttctggggtacacagaactgcccgctgatagggcctacgtggtgactctagttgtagcggttttttttgccccctttggtgtgatgctttgcgcttacatgtgtatattgaatacagtgcggaaaaacgcagtgcgggtgcataaccagtctgactccctagacctccgacagctgacgagagccgggctgagaagacttcagagacagcagcaggtcagcgtcgacctatctttcaaaactaaggcctttaccactattttgattctttttgtgggcttttccctgtgttggctcccccattctgtatactcattactgagcgttttttcacagcgcttctactgcggctcatctttctacgcgacatcaacatgcgtgctgtggctctcttacctgaagtctgtgtttaatcctattgtatactgttggagaatcaagaaattcagggaagcgtgcatcgagctgcttcctcagacattccagatcctgcccaaggttcctgaaaggatcagaagacgcattcaaccctccacagtgtatgtctgtaacgagaatcagtctgctgtgtag

SEQ ID NO: 117854 - DNA, 837 bp, synthetic construct
  misc_feature 1..837: note = Description of Artificial Sequence: Synthetic coding sequence
  source 1..837: mol_type = other DNA
atgtccgcacccggatccccggatcaagcatatgacttcctgctgaaattcctgctggtcggggacagggacgtgggcaaaagcgagatcttagaatctctgcaggatggcacagccgagtctccttattcccacctcggtggcatagactataaaacaactacaatactactcgatgggcagagggtgaaactgaagctgtgggatacctccgggcagggccgcttttgtacaatctttaggtcctactctcggggtgcacagggggttattctcgtatacgatatcgccaacagatggtcattcgagggaatggatagatggataaaaaaaatagaagagcacgctccaggagtgcctaagatcctagttggcaaccgactgcacctcgcctttaagcggcaggtgcctcgagaacaagcccaagcatacgctgagcgcctgggtgtgacattcttcgaggtcagcccactgtgcaacttcaatatcatcgagtcatttactgaattggcccgcattgtgctcctgcgacaccgtctaaactggctgggtcggccctctaaggtcctgtcattgcaggacctatgttgccgcactatcgtctcttgtacccctgtgcatcttgtcgacaagctgcctcttcctatcgcactgaggagccacctcaagagcttttccatggccaagggacttaatgctaggatgatgcgcggactgtcctacagcttaaccacttcaagcacgcacaaaaggagctccctttgcaaggtgaaaatcgtgtgtccgccacagtcacctcctaagaattgcaccaggaacagttgcaagatctcgtag

SEQ ID NO: 117855 - DNA, 585 bp, synthetic construct
  misc_feature 1..585: note = Description of Artificial Sequence: Synthetic coding sequence
  source 1..585: mol_type = other DNA
atggttattctcgccgtgaccaaaaataaaaagctccgaaattctgggaacatcttcgtggtttccctgtccgtggctgatatgctggtggctatatatccgtatcccttgatgctgcacgcaatgagcattgggggctgggacctttctcaactgcagtgccagatggtcggctttatcacaggtctgtctgtggtaggttctatattcaatatcgtggctatcgccatcaaccggtactgctatatatgccactcacttcagtacgagaggatcttctcagtgcgcaatacatgcatttacctggtgatcacttggatcatgaccgtgctggcagttctgccaaatatgtatatcggcacgattgagtatgatcctaggacgtatacttgtatcttcaattacctgaacaaccccgtatttaccgtaaccattgtctgtatccatttcgtgctgcccctgcttatagtgggcttttgctatgtgcgaatctggacaaaagtcctagcagccagagatcctgccggccagaaccccgataaccagctagctgaaccaacctccactgctgcctcgaccctgtag

SEQ ID NO: 117856 - DNA, 1086 bp, synthetic construct
  misc_feature 1..1086: note = Description of Artificial Sequence: Synthetic coding sequence
  source 1..1086: mol_type = other DNA
atgaacgagtccaggtggaccgagtggcggatcctcaatatgtcgtcgggaattgttaacgtctcagaaagacacagttgcccactgggcttcggccactatagcgtggttgatgtctgcatattcgaaaccgtcgtgatcgtattattaacatttctgattatagccggaaatcttacagtcattttcgtgttccactgtgctccgctgctccaccactatacaacaagttactttatccagactatggcttatgccgacttgttcgtaggcgtgtcttgcctcgttcccacactcagccttcttcactatagtaccggagtgcatgagtctctcacttgccaggtgttcggctacattatctctgtgctgaagtccgtgagcatggcttgcctcgcgtgtattagcgtggaccggtatcttgcaatcactaagccgttaagctacaatcaactggttaccccttgtaggctgaggatctgtatcatacttatatggatctacagctgtctgatcttcctccctagcttctttggctggggaaaacctgggtaccacggagatatctttgagtggtgtgctacttcatggctaacttcagcttattttactggcttcatcgtgtgcctcctgtatgctccagcagcattcgttgtctgctttacatatttccacatttttaaaatctgccgccaacacacaaaagagattaacgacaggagggctagattcccatctcacgaggtggatagtagccgcgagactggccatagcccagatagaaggtacgccatggtgttattccggatcaccagcgtattttacatgctatggctgccctatatcatatacttcttactagagtcatctcgcgttctcgacaaccctacattgagcttcctgactacctggctagctatctccaactccttttgcaattgtgttatctatagcctgtcaaattcagttttcaggctggggttgcgacgtctgtctgagaccatgtgcacttcatgtatgtgtgtcaaggaccaggaagcacaagaacctaaacctaggaagcgagcaaactcttgtagcatctag

SEQ ID NO: 117857 - DNA, 960 bp, synthetic construct
  misc_feature 1..960: note = Description of Artificial Sequence: Synthetic coding sequence
  source 1..960: mol_type = other DNA
atgagtcagcagaacacgagcggcgactgcctgttcgacggggtcaacgagttaatgaagacactgcaatttgctgtgcatataccaacatttgtgctgggtctgttgctgaatttactcgccatccacggattcagcactttcctgaagaacagatggccggactatgcggccacttcaatttacatgatcaacctggctgtgtttgacttactcctggtactctcactcccctttaagatggttctctcccaggtacagagtccatttccatcgttgtgtacactggtggaatgtctgtacttcgtctccatgtacggtagcgtgttcactatttgcttcatatccatggacaggttcctggcgatccgatacccattattagtctcacatttgcgctcacctcgaaagatctttggcatttgctgtaccatctgggtcctcgtgtggacaggctccatccctatttattcctttcatgggaaggtggagaaatatatgtgctttcacaacatgtctgatgacacatggagtgcaaaggtatttttccctctggaggtgttcggattcctgcttccaatggggataatgggcttctgctgttcaaggtccatccatatcctgctcggaaggcgcgaccacacacaagattgggtgcaacaaaaagcctgcatctactcaatcgccgccagcctggctgtcttcgtggtgagttttctccccgtgcatctgggatttttcctgcagtttctggtgagaaattcctttatcgtggagtgcagggcgaaacagagcattagcttctttttgcagctgtccatgtgcttttctaatgtgaattgctgcttggatgttttctgctactattttgttatcaaagagtttaggatgaacattcgggctcaccgccccagccgagtacagctggttctgcaggacaccacaattagtagaggctag

SEQ ID NO: 117858 - DNA, 960 bp, synthetic construct
  misc_feature 1..960: note = Description of Artificial Sequence: Synthetic coding sequence
  source 1..960: mol_type = other DNA
atgtcacagcagaatacatccggtgattgtttgttcgatggggtcaatgagctgatgaagacccttcagtttgcagtgcacataccaacgtttgtgttgggcctgctcttgaatctactggccatccacggtttttccaccttcctgaagaatcgctggccagattatgcagcaaccagcatctatatgatcaacctagctgtattcgatttactgctggtactgagtctaccttttaagatggttctttcacaggtccagtctcccttccctagcctctgcactctcgtcgagtgcctgtatttcgtgtctatgtacgggtccgtttttaccatttgtttcatctccatggatagattccttgcgatcagataccctctgctagtatcacatctgcgttcacctcggaagatattcggtatttgctgcactatttgggtcctggtgtggacaggcagcatccccatctatagcttccacggcaaggttgaaaagtatatgtgcttccacaacatgagtgacgacacatggagcgccaaggtgttcttccccctcgaagtattcggctttctgctgcctatgggtattatgggcttttgttgtagccgctctatccacatcttgcttggccgtcgggaccatacccaggactgggtccagcagaaagcttgcatttattcaatcgcagcaagtcttgccgtgtttgttgtgagctttcttccggtgcacctcggcttttttctccaattcctggtgcggaactcatttatcgtggagtgtcgcgcaaagcagtccataagtttttttttacaattatccatgtgcttcagcaatgtcaactgctgcttggacgtcttctgctattacttcgtaatcaaggagttccgtatgaacatccgcgcccaccgccccagccgcgtacagttagtccttcaggataccacaatctctcgaggctag

SEQ ID NO: 117859 - DNA, 729 bp, synthetic construct
  misc_feature 1..729: note = Description of Artificial Sequence: Synthetic coding sequence
  source 1..729: mol_type = other DNA
atgtcccagcagaatacatcaggggactgccttttcgatggcgtcaacgaattaatgaagactctgcagtttgccgtacatatccccacctttgtgttgggccttctcctcaatttgcttgctatccacggtttttcaactttccttaaaaatcgatggcccgactatgcagctaccagcatctatatgatcaacctcgccgtttttgaccttcttctcgtgttgtctctacctttcaagatggtgttatctcaagtgcagagcccctttccatcactgtgcacgctggtggagtgtttgtactttgtgtctatgtacggcagcgtgtttacaatctgctttatctctatggacagattcctggctatcagatatcccctcctcgtctctcatctgaggagccctcgtaagattttcggtatctgctgtaccatctgggtcctggtgtggactgggagcatcccaatctacagctttcacggcaaagtcgaaaaatacatgtgctttcacaatatgagtgatgacacgtggagtgccaaggtctttttcccgctggaggtgtttggatttctattacccatgggaatcatgggtttctgttgcagtaggtccattcatattctcctcggccgccgggaccatacgcaggactgggtgcagcagaaagcctgcatctacagcattgctgcctcattggctgtcttcgtcgtgtcttttttgcctgtgtag

SEQ ID NO: 117860 - DNA, 960 bp, synthetic construct
  misc_feature 1..960: note = Description of Artificial Sequence: Synthetic coding sequence
  source 1..960: mol_type = other DNA
atgtctcagcagaataccagcggagattgcctgttcgacggcgtgaacgaactgatgaagactctgcagtttgccgtccatatcccaacttttgtcctcggccttctactcaatctgttggcaatccacggcttctctaccttcctgaagaaccgctggcccgactatgccgctacctccatatatatgattaatttagccgtgttcgatttactcctagtcctgagcttgccgttcaagatggtactgagtcaggtgcaaagccctttcccttctctatgcactttagtggaatgtctgtacttcgtcagtatgtacggttctgttttcacaatttgtttcatctccatggatagattcctggcaatacgataccccctgctggtctcacacctgaggtctcctcgtaaaatcttcggcatctgttgcaccatctgggtgctagtctggactggatcaatccccatctactcatttcacggaaaagtcgagaagtacatgtgcttccacaatatgagcgacgacacatggtccgccaaagtcttcttccccttggaggtgtttgggtttctgctgccgatggggatcatgggcttctgttgttccaggagtatccacattctactgggacggcgcgatcatacacaggactgggtgcagcaaaaagcatgcatctactcaatagctgcctcactggctgtcttcgtggtctcttttctgccagtgcatctggggttttttttgcagttcctggtgaggaacagtttcatagtcgagtgtagagccaagcaatccatttcctttttcctccagctgagtatgtgcttctccaacgttaattgttgcctcgacgtgttttgttattactttgtgatcaaggaattccggatgaacataagagcacaccgcccatctagagtgcagcttgtgctgcaggacacaactatttcccgagggtag

SEQ ID NO: 117861 - DNA, 1572 bp, synthetic construct
  misc_feature 1..1572: note = Description of Artificial Sequence: Synthetic coding sequence
  source 1..1572: mol_type = other DNA
atgacccctcaaagcctgctgcagactacgttgtttcttctctccttactgttcttagtgcaaggcgctcatgggcgaggccatagagaagactttcggttctgctcccagcagctgcagtctcttgaaagtaagctcacaagtgtgaggtttatgggcgacatggtttcctttgaggaagatcggattaacgcaaccgtgtggaaactccagcccacggcgggactccaagaccttcacatacactctagacaggaggaagagcaatctgaaatcatggagtacagcgtcctgctgccgaggaccctgttccaaagaaccaagggacgttccggcgaagctgagaaacgcctgctgcttgtcgatttctcaagccaggccctgttccaggacaaaaatagctcacaggtcctgggcgaaaaagtgcttggcatcgttgttcaaaacacaaaggtagccaatctgaccgagcccgtcgtgctaactttccagcaccagcttcagcctaagaatgtcaccttgcaatgcgtgttctgggtggaggacccaacactgagcagcccaggacactggtctagcgcagggtgcgaaacagtgcgacgggagacccagacttcatgtttctgtaaccaccttacctacttcgccgttcttatggtaagttctgtggaggtggacgcagtgcacaagcattatttgagccttctgagctatgtcgggtgcgtggtcagtgccctagcatgcctcgtgactatcgctgcgtacctctgctctagagtgccacttccttgtagaagaaagcctagggattatacaatcaaggtacatatgaaccttcttctggccgtgtttctgctagacacttcctttctactgtcagaacctgtcgcattgaccggcagtgaagcaggttgccgtgccagcgccatctttttgcacttcagccttcttacatgtcttagctggatgggcctggaagggtacaatctttataggctagtcgtagaagtctttggcacatatgtgccagggtatctgttgaagctctccgctatgggctggggatttcctatttttttggtgacactggtggccctcgttgatgtggacaactacggccctattatccttgctgtacacagaacccccgaaggggtgatctaccctagcatgtgctggatccgtgacagtctggtgtcctacattaccaatctcggcttattttccctggtgttcctgtttaacatggctatgctggcaaccatggttgtgcaaattctccgtctacgcccgcacacccaaaagtggtcgcatgttctaaccttactcggattgagcttggtgttggggttaccatgggctttaatcttcttctcctttgcaagcgggaccttccagttagtcgtcctctatctgttctccattatcacctcattccaggggtttttaattttcatttggtattggtccatgaggctgcaggccaggggcggaccttccccattgaagagcaattcggactcagcccggctgcccatcagcagcggcagcacctcgagcagccgcatctag

SEQ ID NO: 117862 - DNA, 2082 bp, synthetic construct
  misc_feature 1..2082: note = Description of Artificial Sequence: Synthetic coding sequence
  source 1..2082: mol_type = other DNA
atgaccccccagtctctgcttcagacaacgctgttcctactctccttactgttccttgtccagggtgcccacggccggggccatcgggaagacttcaggttttgctcccagcgcaaccagactcacagatcctccctgcactacaaacccactccagatctgcgcatatccattgagaactccgaggaggccctgaccgtccacgctccattcccagctgctcacccagctagtcgttcattccccgatccaaggggcctgtaccacttctgtttatattggaacaggcacgccggtcggctgcacctgctgtatggtaaacgggacttcctactttccgataaggcatcctcattgctgtgcttccagcaccaagaagagagcctggctcagggccctccgcttcttgccaccagtgtaacatcctggtggagtcctcagaacatttctcttccctccgcggctagttttactttcagttttcactctcctccccatactgccgcacacaatgcctccgtggacatgtgtgagcttaaacgcgacttgcagcttctgtcccagttcttgaagcacccacagaaggcctcacgacggccatcagcagcccctgccagtcaacaactgcagtccttagagtccaagctgaccagcgtccgtttcatgggcgacatggtatctttcgaagaggaccgcatcaacgccaccgtgtggaaactgcagcccactgcaggactgcaagatttgcatattcattctcgccaggaagaagaacagtctgagattatggagtattctgtattgttgccccggacactgtttcagcggacaaaaggtagatctggcgaggctgaaaaaaggttgcttcttgttgactttagcagtcaggcgttgttccaggataaaaatagttcccaagtgttgggggagaaagtccttggcattgtagtccaaaatacaaaggtggctaacttgactgaaccagttgtgttgacatttcagcatcagctgcaacctaagaatgtcaccttgcagtgtgttttttgggtggaagaccctacactttcctccccaggtcactggtcatctgctgggtgtgagacagtgcggcgtgagacccagacttcctgtttttgcaatcacctgacctattttgccgtgcttatggtctccagtgtggaagtagatgcggtgcacaagcactatctttctctcctgtcttatgtgggctgtgtcgtcagtgcgctggcctgcctcgtcacaatcgcagcctatttatgcagccgggtacccctgccttgcagacgcaaacccagagattatactataaaggtgcacatgaacctcttgctggccgtgttcctgcttgacaccagtttcctcctgtcagagccggtggcactgacaggcagtgaggctggatgtcgtgcttccgccatcttcctccatttctctttattgacctgcctgagttggatgggcctcgaaggctataacctgtatcgcctggtggtggaggtgtttggcacatatgtgccgggatatctcctgaagttgagcgcaatgggctggggcttccccatcttcctggtaacccttgttgctctggttgacgtggataattatggacctataattctggcagtgcataggacgccagagggcgtgatatacccaagcatgtgctggattcgggacagcctggtcagttacataacgaatctgggactgttcagcttagttttcttgttcaatatggcaatgctagccactatggtggtgcagatacttagattacggccccatactcaaaagtggtcacacgtgctcaccctattgggactgagcctagtactgggcctgccttgggccctgatcttcttcagtttcgctagcggtaccttccagctggtcgtgctgtatctgttttccatcatcacatccttccagggctttctgatttttatttggtactggagcatgagacttcaagcgaggggcggcccctcacccctcaagagtaattcagattccgcacgtctccccatcagtagtggaagcacctccagcagcagaatttag

SEQ ID NO: 117863 - DNA, 2082 bp, synthetic construct
  misc_feature 1..2082: note = Description of Artificial Sequence: Synthetic coding sequence
  source 1..2082: mol_type = other DNA
atgactcctcagtctctgttgcagactaccctcttccttctcagcctgctttttctggtgcagggagcacacgggcggggccacagagaggactttcgtttctgtagtcaaagaaaccaaactcacaggagtagcctgcactataagcccacccccgatctgcgtatatccatcgaaaattctgaggaggccctcacggtgcacgcaccgtttcccgcagctcaccccgcatcacgtagctttcccgatccccgggggctctaccacttttgtctttactggaataggcatgcggggaggctccaccttttatatgggaagagagactttttgttgagcgacaaggccagctcacttctgtgcttccagcaccaagaggaaagtctggcgcagggcccccctctgcttgcaaccagtgtaacctcatggtggagtccgcaaaacattagtttacccagtgctgcttctttcaccttttctttccacagtccccctcatacagccgcccataatgctagcgtagacatgtgtgagctgaagagagacctccagctgttaagtcagtttttaaaacacccccaaaaagccagtcgacggccatccgcagcccctgcgagccagcagctccagtctcttgaaagtaaattgacatctgtaagattcatgggagatatggtttcctttgaagaggatcggatcaacgcaacagtatggaaactgcagcctactgctgggctccaggatctacatatacatagtcgacaggaggaggagcaaagtgaaattatggaatactctgtcctcctgcctcgcaccctgtttcagcggacaaaggggaggtctggggaggcggagaaacgcctgcttttagtcgacttttcaagccaggccttgttccaagataagaactcttcacaagttctgggcgaaaaggtcctgggaattgtggtgcagaacacaaaggtcgctaatctcaccgagccagtggtgctcaccttccagcaccagctgcagcccaagaatgtgaccctgcagtgcgtattttgggtggaagatcccaccctgagcagtcctggtcattggagcagtgccggatgcgagacagtcagacgggagactcaaaccagctgtttctgcaatcacctgacttacttcgctgtacttatggtctctagcgtggaggtagacgcggtccacaagcattacttgtccctgttaagctacgtgggttgcgttgtgtctgccctggcctgtctagtgacaatagccgcatacttgtgtagcagagtccccctcccctgccggcggaagcccagggactacaccataaaggtccatatgaatctgttgctggccgtgtttctgctggatacatcgttcctcctctccgagccggtggcactaaccgggtcggaagcagggtgtagagcttctgcgatatttctccactttagcctgctcacatgcctgagttggatgggtctggaggggtacaacctatatagacttgtagtggaagtattcgggacatacgtgcctgggtaccttctcaagttgtcggcaatgggctggggcttccccattttccttgtgacactggtggccctcgtggatgtagataactacggcccaatcatacttgcggttcacagaaccccagaaggagtaatctatccttcaatgtgttggatccgcgattctctagtgtcttacatcacgaaccttggactgttttccctggtatttctgtttaatatggcaatgttagccactatggtggtgcagatactgaggctccggccacacacacagaaatggtcacatgtcctcactctactgggtctcagcctggtgctggggctcccttgggccttgattttttttagttttgcctccgggaccttccagctcgtggtgctctatcttttctcaattattaccagcttccagggcttcctgatcttcatttggtattggtccatgaggctccaagcacgcggcgggcctagcccacttaagtcaaactccgactccgccagattacccattagctctggttcaaccagttcttcacgcatttag

SEQ ID NO: 117864 - DNA, 2064 bp, synthetic construct
  misc_feature 1..2064: note = Description of Artificial Sequence: Synthetic coding sequence
  source 1..2064: mol_type = other DNA
atgactccacaatccctgttacagacaaccctcttccttctctcattgttgtttctggttcagggggcccatggaagaggacaccgcgaagatttccgattttgcagccagagaaaccagacccaccggagcagtcttcactataaaccaacaccggacttgaggatttctatcgagaattcagaagaagcccttaccgttcatgcccctttcccagcggcccacccagcgagccggagcttcccagatccacgtggactgtatcatttttgcttgtattggaatcggcacgccgggaggctgcacttgctatatggaaagagagacttccttttatcagacaaagcatcctccctgttatgtttccagcatcaggaagagagcctcgcccagggaccaccccttctggccaccagcgtgacctcctggtggagccctcagaacatctcactgccgagcgccgctagctttaccttttcatttcacagcccaccacacactgcagcccataacgcatcagtggacatgtgcgagcttaaacgagatctgcagttactgagtcagttcttgaagcatccacaaaaggcctccagacgcccgtccgccgctccagcaagccagcagctccagtctctcgagagtaagctaacgtccgttaggttcatgggggatatggtgagctttgaggaggaccgaatcaacgcaacggtctggaagctgcagcctacagctggtctgcaggaccttcatattcactctcgacaggaagaagagcaaagcgaaataatggagtactccgtgctcctgcccagaactctgtttcagcgcaccaagggcaggtccggagaagccgagaaaagactcttgctagtagacttttcgtcccaagccttgttccaggacaagaatagtagccaagttctgggggagaaagttcttggcattgtcgtgcaaaatacgaaggtggcaaatttaacagaaccagttgttctaacatttcagcaccaactgcaacctaaaaacgttactctacagtgtgtgttctgggtggaggatcccacactaagctcacccggtcactggtcaagcgccggctgcgaaacggtccggcgcgagactcagacaagttgtttctgcaatcatctgacctacttcgcggttcttatggtgagttcagtcgaggtggacgccgttcataagcattatcttagcctgctgagttacgtggggtgcgttgtgtccgccctcgcatgccttgtcactatagctgcatacctctgctcacgaagaaagccgcgagattataccatcaaagtccatatgaatcttttgctggcagtcttcctgctcgatacctctttcctgctctcagaaccagtcgccctgacaggcagcgaggcaggctgtcgggcctctgccattttcttgcactttagcttgctcacctgcctgtcctggatgggcttagagggttataacctttaccggctggtggttgaggtgtttggaacatacgtaccaggctacctcctgaagctttccgccatggggtggggtttccccattttccttgtgaccttagtggccctcgtcgacgtcgacaactatggccctatcatcctggccgtccatcgtactccagagggtgttatctatccaagtatgtgttggatccgggacagcctggtctcctacatcaccaacctgggattgttcagcctggtttttcttttcaatatggccatgctggccactatggtcgtgcaaattctcaggttgaggccccacacacaaaagtggtctcatgtgctgacacttttaggtctgagcctcgtgctcggactaccctgggctttgattttcttttcattcgcatctggaacctttcagctggtagtgctctacctgttttctataattacctccttccagggttttctgatctttatctggtactggagcatgaggctgcaggccaggggagggccctcgcccctcaagtcaaactcagactccgctcggctgcccatttcctccggcagcacatcctcctcgcgcatatag

SEQ ID NO: 117865 - DNA, 2082 bp, synthetic construct
  misc_feature 1..2082: note = Description of Artificial Sequence: Synthetic coding sequence
  source 1..2082: mol_type = other DNA
atgacaccccagtccctgctgcaaaccacactctttttactctcgctgctgttccttgtacaaggtgcccacggccggggacatagagaagactttcgattctgttctcagcggaatcagacccatcggagctctctgcattacaaacccaccccagatctccgcatatccattgaaaattctgaagaagctctgacggtgcacgctcccttccctgcagcccatccagctagcagatcttttcctgatccccgaggactttatcacttctgtctgtactggaacaggcacgctgggaggttgcatctgctatatggtaagagagatttcctcttgtccgataaagcatcctcgctactgtgtttccagcatcaggaagaaagcctggctcagggaccaccactcctggcgactagcgtgacttcctggtggagcccccagaacatttcactgcctagtgccgcatcatttaccttttcttttcactcaccgcctcacaccgccgcccacaatgcctccgtagatatgtgtgaattgaagagagatctgcaactcctcagccagttcctgaaacacccccagaaagctagtagacgcccctccgcagcacctgcatcacagcagctgcagtccttagagtccaaactcacttctgtgcggtttatgggagacatggtttcattcgaagaggacagaattaacgccactgtctggaagctgcagccaacggcaggcctccaggatctacacatacactctaggcaggaagaggaacagagcgaaatcatggaatactcagtgctactgcccaggactcttttccagaggaccaaggggcgtagcggagaggccgaaaaaagactgttactagtggatttcagttcgcaggctctgttccaagataagaacagctctcaagtgctaggtgaaaaagtcctgggcatcgtagttcagaatacaaaggtagcgaacctaaccgagcctgtcgtgctcacctttcagcaccagcttcagcccaagaacgttactttgcagtgtgtgttctgggttgaagatccaacgttaagttcccctgggcactggtctagtgctgggtgcgaaaccgttcgaagggaaacccagacaagttgcttttgtaaccacctcacgtactttgccgtactgatggtgtctagtgtggaagttgacgctgtccataagcactacttgtcgctgttgagctatgtgggctgcgtggtgagcgccctggcttgtctcgtaactatcgccgcatatctatgttcgagagtgcccctgccgtgtagaagaaaaccacgcgattataccatcaaggtgcacatgaacctgcttttggcagtctttcttctcgatacatccttcctgctgtctgaaccagtcgccctgaccggctctgaagctggttgccgtgcgagcgccattttcttgcacttttcgctgctgacatgtctgtcctggatgggactggagggatacaacttatataggttggtggtggaggtttttggtacctatgttcctggctacctgttaaaattaagcgctatggggtggggcttcccgatttttctggtgaccctcgttgctctagttgacgtggataattacgggccgataattcttgccgtgcacagaacacccgaaggggttatctatccatcgatgtgttggattagagacagcctcgtgtcttacattaccaacctggggctgtttagtcttgtgtttctctttaacatggccatgctcgctacaatggtggtacaaattctcagattgcgcccacacacacagaaatggtcccacgtcctgaccctccttggtctgtcgctagtactggggcttccttgggcactgatctttttctcctttgcatccgggacctttcagctggtggtcctgtacctcttctcaatcatcacaagtttccaagggttcttgatatttatctggtactggtctatgcgcctccaggcgagaggcgggccctctcccctgaagtcaaatagcgactctgctcggctgccgatcagcagcggctccaccagtagttctagaatttag

SEQ ID NO: 117866 - DNA, 2064 bp, synthetic construct
  misc_feature 1..2064: note = Description of Artificial Sequence: Synthetic coding sequence
  source 1..2064: mol_type = other DNA
atgacccctcagagcctgcttcagaccacactgtttctgctgagcctgctttttctcgttcagggcgcgcacggccgcggtcatagagaagactttaggttctgcagtcagaggaaccagactcacagatcctccctccactataagccaactcccgacctaagaatctctattgagaatagcgaggaggctcttaccgtccatgcccccttccccgcagcacatcccgcctcgcgttcctttcctgaccctagagggctgtaccatttttgcctgtattggaacaggcatgccggcaggctgcacctcctttacggcaagcgcgactttttgttgagtgataaggctagttctctcctgtgtttccagcatcaggaagagtccctcgctcagggccccccactgctcgcaactagcgtcacaagctggtggagtcctcagaacatttccctgcctagtgcagcttcatttacattttcgttccacagtccacctcatactgccgctcacaatgctagcgtggatatgtgcgagttaaagagggatctgcagcttttatctcagtttttgaagcatccccagaaagcctcacggcggcccagcgcagcaccagcctctcaacagctgcagtccttggagtccaaactgaccagcgtgcgttttatgggcgacatggtctccttcgaagaagacaggatcaacgcgaccgtctggaagctccaaccaactgccggccttcaggacctgcatattcattcccgtcaggaggaagaacagtcagagattatggaatactccgttctgctcccaagaactctgttccaacgcaccaagggtcggagtggggaagctgagaagcgcctgctgctggttgatttctcttcccaggcactctttcaggacaaaaacagctctcaagttctcggcgagaaggtcttggggatagtcgtacaaaatactaaagtcgccaatctcacggagcccgttgtactcacattccaacatcagctccagcctaagaacgtcacgctgcagtgcgtgttttgggtcgaggatccaaccctttctagccccggccattggtcctcagctggttgtgagaccgtccgaagagagacccaaaccagttgcttctgtaaccacctgacttattttgccgtgctaatggtatcttccgtggaagtggacgccgtccataaacactatctgagcctgcttagttacgtggggtgtgtcgtttcagctcttgcttgtcttgtgacaatcgccgcctacctctgttctaggcgaaagccgcgagactacacaattaaggtgcacatgaatctgcttctcgccgtgtttctgttagatactagttttcttctgtcagaacccgtagctctgaccgggagcgaggcgggctgccgtgcctccgccattttcctccattttagcctgttaacctgtctgtcctggatgggattagagggctacaacctgtatcgactggtcgtagaggtatttggcacctatgtccctggatacctgcttaaactatcagccatgggctgggggttccctatcttcctcgtcactctggtggcactcgtggacgtcgacaactacggcccaatcatcttggccgttcatcgcacccctgagggtgtgatttatccctccatgtgctggataagggatagcctagtgtcatacattacaaatcttggcctttttagcctcgtattcctgttcaatatggccatgcttgccaccatggtggtacagatcttacgactgcgcccgcacacccagaaatggtcacacgtgctgactctcctgggtttgtccctcgtcctcggtcttccatgggccctcatttttttctccttcgcctctggcactttccagctagtcgtactttacctgttttcaattatcacatcttttcaaggattcctgattttcatctggtattggagcatgcgtcttcaggctagaggaggacccagtccgctgaagtctaattcagactcagctaggctccctatctccagtggtagcacatccagctcccgtatatag

SEQ ID NO: 117867 - DNA, 2064 bp, synthetic construct
  misc_feature 1..2064: note = Description of Artificial Sequence: Synthetic coding sequence
  source 1..2064: mol_type = other DNA
atgaccccgcaatctctgctccagacgaccctgtttcttctgtcactactttttctggtgcagggtgctcatggacgcggtcatcgcgaagacttccgtttctgcagccagcgcaatcagacccaccgttcctctctacattataagcccacccccgatctgagaattagtatcgagaattctgaggaagcactcacagtccatgctcctttcccggccgcccatcccgctagcaggtcattccctgatccacggggtctctaccacttctgcctgtactggaatcggcatgccggtcgccttcacctgctatacggcaagcgggacttccttctgagtgataaggcaagctctctcctatgtttccagcaccaggaggagtcgctcgcccaaggaccaccccttctggccacatccgtcactagctggtggtcacctcagaacatctcattgccatctgcggccagtttcacatttagctttcattcccctccccacactgctgcacacaatgcttcagtggatatgtgcgaattgaaaagagacctccaactcctctctcaattcttaaagcatccccagaaagcctcccgccggccctcagccgctcccgcttcacagcaacttcagtcgctggagagcaaactcacttctgtgcgttttatgggggatatggtgagtttcgaagaggatcgcataaacgcaacagtgtggaaattgcagcccaccgccggcttgcaagatttgcatattcactccaggcaggaggaggaacaatctgagattatggagtacagcgtgctccttcctcgcacccttttccaacgtacgaaaggccgatcaggggaggcagagaaaaggttgcttcttgtggacttctccagccaggcgctgttccaggacaaaaatagctcacaggtgctcggtgaaaaagtgctgggaattgtggtccaaaatactaaggtggctaacctgacggaacccgtggtgctgacatttcaacatcagttgcagcctaaaaacgttacactgcaatgtgtcttttgggtggaggacccaaccctgtcctcccctggtcattggtcctccgcgggctgtgagactgtgagaagagagacacagacgtcttgcttttgtaaccacctgacctattttgccgttctcatggtgagctccgtggaggtggacgctgtgcacaagcattacctgtcattgttgagttatgtaggttgcgtggtgagtgccctcgcctgtctggtgacaattgcagcttacctatgttcccgccggaaaccgagagactacaccatcaaggtccatatgaatctcttgctggccgtgttcttactcgacacctcctttctattgagcgagcccgtcgccctcacaggctcagaagccggttgccgagcctccgccatttttctacatttctcattacttacatgtctgagttggatgggccttgagggctacaatctgtacagactggtcgtggaagtgtttggtacttacgtcccaggatacctgctgaaactatcagccatgggttggggctttccaatcttcctcgttactctggtggccctcgtggacgtagacaactatggaccaatcattctggccgtgcatcgaacgccagagggagtcatataccccagcatgtgttggatacgggactcactggtgtcctacattaccaacttgggattgttttccctggtgttcttattcaatatggctatgctggctaccatggtagttcaaatcctgcggctgagaccccatacacagaaatggtcacacgtgctgacattacttggcctctcactggtgttaggcctcccttgggccttgatttttttcagtttcgcctcagggacatttcagctggtggtgttatacctcttctcaatcatcaccagcttccagggatttttgatatttatttggtattggagcatgaggttgcaggcaaggggcggcccctcccctttgaagagtaattcggactcagctcgcttacctatctcctccggcagtacatcttcctcccgtatatag

SEQ ID NO: 117868 - DNA, 1539 bp, synthetic construct
  misc_feature 1..1539: note = Description of Artificial Sequence: Synthetic coding sequence
  source 1..1539: mol_type = other DNA
atgtgtgagttaaagagggacttacagctgctgtcgcagttcttgaagcacccccagaaggctagcagaagaccatcggcagcccccgctagccagcagctgcaatcattggaaagcaagttaacttctgtcaggtttatgggagacatggtgagttttgaagaggatcgcattaatgccaccgtatggaagctgcagcctaccgccggactccaggatttgcacattcacagcaggcaggaggaggaacagagcgaaatcatggagtacagtgttttgttgcctaggactctcttccaacgcaccaaaggaagatccggcgaggccgaaaagagacttctactggttgacttttctagccaggccctgtttcaggacaaaaactcttctcaagtgctgggggaaaaagtgctggggatcgtcgtgcagaacacgaaagtggccaacctgaccgaacccgtggtgctgactttccagcaccagctgcagccaaaaaatgtcactttacagtgcgtgttttgggtggaggaccctacactctcctcaccaggccactggtcctctgcgggatgcgagacagtgagaagggaaacacagacatcttgcttttgtaatcatttaacatacttcgctgtgttgatggtctcatctgtggaggtcgatgctgtgcacaaacactacctctccttgttgtcgtatgttggctgcgtggtttctgccctggcctgcttggtgacaattgccgcgtatttgtgctcacggcggaaacctcgggattatacgatcaaagtgcacatgaatctactgctcgcggtatttttgttagacaccagttttctgctctcagagccagtggcgcttacaggctccgaggccgggtgtagagcttcagccattttcctgcatttctccctgctcacttgcctttcctggatggggctcgagggctacaacctgtatcgcctggtggtggaagtgttcggtacttacgtgcctggttacctgctaaagctgtccgctatgggctgggggttccctatttttctcgtgacactcgttgccctggtggacgtagataattacgggccaatcatactggctgtccatcgaactcctgagggcgtcatttacccaagcatgtgctggatcagagattctcttgtctcctatattactaatctggggctctttagcttggttttcctcttcaacatggccatgcttgccacaatggttgtacagatcttacggctgcgcccacacacacagaaatggtctcatgtgcttaccttacttggactgtccctggtcctgggcctaccatgggcactaatttttttttccttcgctagcggaacattccagctcgtggtactctatctctttagcattataacgtcattccagggcttcctcattttcatttggtactggagcatgagactccaggcgagaggtggcccctcgcctctgaagagcaacagcgacagtgctcgcctgcccatcagctctggttcgacctcttcctcacgcatctag

SEQ ID NO: 117869 - DNA, 2064 bp, synthetic construct
  misc_feature 1..2064: note = Description of Artificial Sequence: Synthetic coding sequence
  source 1..2064: mol_type = other DNA
atgactccccagtctctgttacagacgacactgttcctgctgtccctcctgttcctcgttcagggagcccatggtcggggccatcgggaggatttccgcttttgtagccaaaggaaccaaactcataggagttctttacactacaagcccacacccgatctcagaattagcatcgaaaattccgaagaagcactcaccgtccacgccccattcccggcagctcatcctgcttcacgctcgttcccggatcctcggggcctgtaccacttttgcctgtattggaacaggcacgcagggagattgcacctgctgtatggaaagcgcgacttcctgctgagtgataaggctagttcccttctgtgcttccaacaccaagaggagtccttggcacagggaccaccactgctagcaacctccgtgacctcgtggtggtcaccccagaatatcagcctcccttcagccgcatctttcacatttagtttccattccccaccccacaccgccgcccacaatgctagcgtagacatgtgtgaattgaaacgagatttacagctgctctcccagttcctgaaacacccacaaaaggcatctagaagaccctccgctgccccagcatcccagcagctgcagagcctcgaaagcaaactgactagtgtgcgcttcatgggagatatggtctccttcgaagaggaccggatcaatgctacagtgtggaagttgcagccaacagcaggcctgcaggacctccatatacactcacgacaggaagaggaacaatctgagatcatggaatactctgtactgctacctaggaccctgttccagaggacaaagggccggtctggcgaagccgagaagagactcttattggtcgacttttcctcgcaggcactctttcaggacaaaaactcaagccaagtcctcggtgaaaaggtgctgggcatcgtcgttcaaaacacaaaggtagccaatctcaccgaaccagtggtcctcacatttcagcaccagctgcagcctaaaaacgtcactttgcagtgcgttttctgggtggaagacccaaccctcagctcccctggccattggtctagtgccggatgcgagacagtgcggcgagagactcagacatcctgcttttgtaaccacctgacctacttcgctgttctgatggtctcctcagtcgaggtggacgctgtacataaacattatctcagtctcctgagttatgtgggttgtgtcgtgagcgcattagcctgcttggtgaccatagccgcttacttgtgcagccggcggaaaccccgcgactacactattaaggtacacatgaaccttctgcttgccgtttttctgctcgataccagctttctcctaagcgagcctgtcgcgcttacagggagcgaggctggctgcagagcaagcgcaatttttttacacttttctctgctcacatgtctttcttggatggggctcgaggggtacaatctttacagactggtggtggaagtttttggcacatatgtccctgggtatctccttaagctcagcgcgatgggatgggggtttccgatttttctcgttacactcgtcgccctggttgacgttgataactatgggccgataatcctggcagtccaccgcacccccgagggcgtgatttacccaagcatgtgttggatcagggacagtctggtgtcctatataaccaacctgggcttgttttccttagtttttctattcaatatggcaatgctggctaccatggtcgtgcagatcctcagactaaggccccatacacagaaatggtcccatgtgctcaccctcttgggactgagtctggtgctcggtcttccatgggctctgattttcttctcctttgcctctggcacattccagttggttgtgttataccttttcagtattattacgtcgtttcagggctttttgatattcatatggtactggagcatgagattgcaggctcgaggaggcccctctccattgaagagcaatagcgattctgcccgcctccctatctccagtggctcgaccagttctagtcgcatatag

SEQ ID NO: 117870 - DNA, 2064 bp, synthetic construct
  misc_feature 1..2064: note = Description of Artificial Sequence: Synthetic coding sequence
  source 1..2064: mol_type = other DNA
atgacgccacagagccttcttcaaactacattgtttctgctgtcactcctgttcttagtgcagggagcccacggccgggggcacagggaggacttcagattttgttcacaaagaaaccaaacccaccgatcgtcattacattacaagcccaccccagatctgaggattagcattgagaacagcgaagaggcactgaccgtgcacgccccgtttcctgctgcacatccggcctcgcgatcattcccagatcctcgagggctttatcacttctgtctgtactggaatcgccatgccggtagactccacttattatatggcaaacgggacttcctgcttagcgataaagcgtcttctctcctttgcttccaacatcaagaggagtctttagcacagggcccaccactgctcgcgacgtctgtcacttcttggtggtctccacagaacatctccctcccaagcgcagcaagcttcacgttcagctttcactctccacctcatactgcggctcacaatgcatctgtcgacatgtgcgaactcaaaagagacttacagcttctcagccagttcctcaaacatccacagaaggcaagccgccggccatccgccgcacctgcatcacagcaactccagtctttggaatccaagctgacatccgtgagattcatgggagatatggtatccttcgaagaggacagaatcaacgcaacggtgtggaagctccaacctactgcaggtctgcaggaccttcatatccactccaggcaggaggaagaacagtccgagataatggagtattccgtgctcctgcccagaactctctttcaaagaaccaaaggccgctccggggaagctgagaaacgcctgcttctggttgacttttccagtcaggctctgtttcaggataagaacagttcccaagtactcggagagaaagtgctgggaatagttgtccagaacacaaaagtggcaaatcttacagaacccgtggttctgacgtttcaacaccaactccagccaaagaacgtgacactccagtgcgtcttctgggttgaggaccctaccctgtcttcccctggtcattggagctctgctggctgcgagaccgttcgcagagagacccagacttcatgtttctgcaatcacctgacctactttgccgtactgatggtgagcagcgtcgaggtggacgccgtacacaagcattatctgagcctactgagctacgttgggtgtgtggtctcagcactagcctgcctggtgaccatcgccgcgtatctttgcagccggaggaagccaagggattacacaatcaaggtccatatgaacctgctcctggctgtattcctgctggacacctcatttctgctgagtgaacccgttgcactcacaggcagtgaagcagggtgtcgcgcttcggccatttttctgcattttagcctcctaacctgtttgagttggatgggcctggaaggctacaacctgtacagactcgtggtggaggtcttcggcacatacgtccccgggtatctcctcaagttatctgccatgggatggggatttcctatctttctcgttacactggtcgccctggtggacgtcgataactacgggcctattattctcgcggtgcatagaacgcccgaaggagtcatataccccagcatgtgctggatccgggatagcctggtctcttacataacaaatctgggccttttttccctcgtattcctttttaacatggctatgctggctaccatggtggtgcagattttgcgcctgaggcctcacacacagaaatggtctcacgtcctcacgctgctcggcctcagcctggtgttgggtctaccctgggccctgatattcttttctttcgcgtctggtactttccagctggttgtcctctatctgttctctataattacatcctttcagggctttctgatttttatctggtattggagcatgcggctccaggcgaggggggggccctcccctcttaaatccaacagcgactcagcacgcctgcccatctcctccgggtctacttctagcagccgaatatag

SEQ ID NO: 117871 - DNA, 1089 bp, synthetic construct
  misc_feature 1..1089: note = Description of Artificial Sequence: Synthetic coding sequence
  source 1..1089: mol_type = other DNA
atgaatgccagcgccgcatcgcttaatgattcccaggtggtggtcgtcgctgcagagggggcagcagccgcagcaactgcggcaggaggtccagacacaggagagtggggtccaccagctgctgcggcactcggagctggtggaggagccaacggcagcctggaactcagcagccagctttccgccgggcctcccggtctcctgctgcctgcggtcaatccctgggacgttctgctgtgcgtctctgggaccgttatcgctggggagaatgcattggttgtggcgcttatcgcgtctactcctgccctccgaaccccgatgttcgtactggttggatccctggctaccgccgatcttctggctgggtgcggacttatcttgcatttcgtttttcagtatttagtgccatctgagacagtgtctctcctgaccgtgggatttttggtggcttcattcgcagcttctgtcagttccctgctggctatcaccgtggataggtacttgtccctgtacaacgcactcacatattattcccggaggactctcctcggcgtgcacctgctgctggcagctacatggacagtcagcctgggcctgggcttactgcccgtcttgggatggaactgcctggcagagcgggccgcatgctccgtagtacgtcccctagccaggtcccatgtggccttattgagtgcggctttttttatggtcttcgggatcatgttgcacttgtatgtccgcatttgccaggtggtgtggcgacacgcccatcagatcgcattgcagcagcactgcctggcgccccctcatctggccgccacaaggaaaggcgttggaacactcgccgtggtcttgggcacatttggcgcttcatggctgccgtttgctatttactgcgtggtcggcagtcacgaggaccctgctgtttatacctatgcaaccctgctgccagctacttacaatagcatgattaatcccattatctatgcgttccgaaaccaggaaattcagcgcgctctctggctcctgctatgcggctgctttcagagtaaagtgccctttaggagccgcagtccgtctgaggtctag

SEQ ID NO: 117872 - DNA, 1134 bp, synthetic construct
  misc_feature 1..1134: note = Description of Artificial Sequence: Synthetic coding sequence
  source 1..1134: mol_type = other DNA
atgaccctcctcgcgtggtgcacccggggagccaatcctgccgccatgaatgcgagtgccgctagcctcaacgactcacaagtggtggtcgtggcggccgagggagctgcggcagctgctacagcggcagggggcccggacactggggagtggggacctccggctgcggctgcattaggcgccggcggcggtgcgaatggaagcctggagcttagctcacagttgtctgccggaccccccgggctgttgctccctgcagttaatccttgggacgtgctgctgtgcgtgtctggaacggtgattgccggtgagaatgcgctcgtcgtggctctaatcgcgtcaacccccgcactgaggaccccgatgtttgtgcttgttgggagtctggcaactgctgacttactggctggatgcggcctgattctccatttcgtgtttcagtatcttgtccccagtgagactgtctccttacttacggttggatttcttgtggcgagcttcgcagcatccgtgagcagcttacttgccattacagtggaccgctacctgagtctctacaatgccttgacatattactctaggaggaccttgctcggcgtgcatctcctgttggcagctacttggaccgttagtctgggactgggcctacttcccgtcctcggatggaactgccttgctgaaagagcagcctgttctgtggtgcgtcctttagctagaagtcacgtagccctgctgtctgccgctttcttcatggtctttggcattatgcttcacttatacgtcaggatctgtcaagtcgtctggaggcacgcacatcagattgccctccagcagcactgccttgcaccccctcatttagcagcgaccagaaaaggggtcggcaccctggctgtcgtattgggaactttcggtgccagttggcttccattcgccatatattgcgtcgtgggttctcacgaggaccccgctgtgtatacttacgctactctgttgcccgcaacgtacaacagcatgatcaatccaatcatctatgcttttagaaatcaggaaattcagcgtgccctctggctcctgttgtgtggttgctttcagtcgaaggtccccttccggtcaaggagtccgtctgaggtgtag

SEQ ID NO: 117873 - DNA, 1023 bp, synthetic construct
  misc_feature 1..1023: note = Description of Artificial Sequence: Synthetic coding sequence
  source 1..1023: mol_type = other DNA
atgaacgcttcagcagcctcgttaaacgactcccaggtagtcgtagtcgctgcagagggggctgctgctgctgctacagctgctggtggaccagacacaggagagtggggcccaccagcggctgcggccctaggggccggaggcggagccaatgggagcttggagctttccagccagctgagcgccggtccccccggactgcttctgccggccgtgaatccttgggacgtgttgttgtgcgttagcggtaccgtgattgccggcgaaaacgccctcgtggtcgctctgatcgctagcactcctgcacttcgcacgccaatgtttgtactcgttggcagtttagctactgcagatctgttagctggatgcggcttgatattgcactttgtcttccaatatctcgtgcccagtgagactgtctcattgctgaccgtggggtttcttgtagcatccttcgccgccagtgtgtcatctctgctggctattaccgtagatagatacctttcactttacaacgcgctcacatactactccaggcgcactttgctcggtgtgcaccttcttctcgctgctacttggactgttagcctcggcctgggactgctccctgtgctcggttggaactgcctggcggagcgggccgcatgcagtgtggtgcgtccactcgctcgatctcacgtggccctgctttccgcagcctttttcatggtgttcgggatcatgcttcacttgtatgtaaggatttgtcaggtggtttggcgccatgctcaccagatcgccctgcagcagcactgtttagctccaccccatcttgccgcgacgaggaagggggtcggaaccctggccgtggttttgggaacctttggtgcgagttggctgccgtttgctacctacaattcgatgataaatcccatcatctacgctttcagaaaccaagaaatccaacgcgccctatggctgcttctgtgcgggtgctttcagtccaaggtgcccttcagatcccggagcccctccgaagtgtag

SEQ ID NO: 117874 - DNA, 1740 bp, synthetic construct
  misc_feature 1..1740: note = Description of Artificial Sequence: Synthetic coding sequence
  source 1..1740: mol_type = other DNA
aacccacggctcacagtgctcgagcgggttgaaggctatggagaacaggaatggcagaaaggcgatggcaagggacgtggagaagggcattccgagtctggtgtgctgtccggctccggcagctgcacgtcgcatgtgtcttgcttccttgccgtaacgaaggccgatcctgccgccacctctgggcagaaaggcgatgagcttctaattctccagctgcctgggttggccctctgcacccaaaccaatttacctaaacggcttcaatgggaggtaccacccaccaaacctgggtctctcggcttaggcagtccgagtcaggggaggtggacacggatgggggatggaccacaagaggtgccctgggtgccctcgtttggaccaatggagtcaagtcccattcctcagtctagcggcaacagctccaccctcgggcgcgtcccacagacgcccggcccctctacggcctccggcgtccctgaagtagggctccgcgacgtcgcctccgagtcagttgccctgttctttatgctgcttctagatctgactgccgttgccggaaatgcggctgtcatggccgttatagcaaaaactcccgccctgcggaagttcgtgtttgtatttcacttgtgcctcgtggacttactggcggccctcacgttgatgcccctggcaatgctaagctcctcagccctgttcgatcacgcgctgtttggagaggttgcctgtcgtctttacttgttcctgtcagtttgcttcgttagcttagccatactgtctgtgagcgccatcaacgtggaaaggtactattatgtggtgcacccgatgagatatgaagtacggatgaccctggggctcgtggcatctgtattggtgggtgtgtgggttaaagcgcttgcaatggcgagtgttcctgtgctagggcgggttagctgggaggagggtgctccttccgtaccaccgggatgttccttgcagtggtcacatagcgcctattgtcaactctttgtggtggtgtttgccgtactgtactttctgctgcctctgctgctaattcttgttgtctattgttccatgtttagagtcgccagagtcgctgctatgcagcatggtccccttcctacttggatggaaacgcccagacagcgatcagaatccctgagtagcagaagcactatggttaccagctcaggggccccgcaaaccacacctcatcgtacatttggaggcggaaaagctgctgtggtccttctggcagttggaggtcagtttctgctgtgttggcttccgtacttcagcttccacctttacgttgccctgtccgcccagcctattagcacaggacaggtggagagtgtggtgacttggattggatatttctgttttacttccaaccccttcttctacggatgcctgaaccgacagatcagaggggaactttcaaagcaatttgtttgcttcttcaagcctgcccctgaggaagagctcagattaccttccagggagggaagtatcgaagaaaattttctccaatttcttcagggtacaggatgccccagcgaatcctgggtgtcccgtccactgccctctcccaagcaggagccaccggcagtagatttcaggattcccggccaaatcgccgaggaaacctccgagttcttagagcaacagctgacttccgatatcatcatgtcagacagctacctccgcccagcagcaagtcctcgactcgaatcatag

SEQ ID NO: 117875 - DNA, 1356 bp, synthetic construct
  misc_feature 1..1356: note = Description of Artificial Sequence: Synthetic coding sequence
  source 1..1356: mol_type = other DNA
atggagagctctccgataccccaatctagcggcaacagttctaccctgggaagggtgccacagaccccaggaccttcaaccgctagtggcgtgcccgaggtggggctgagagacgtagcgtctgagagtgtggccctgtttttcatgctgcttctggatttgacagcagtggcaggaaacgccgcggtaatggctgtcattgcaaagacccctgccttacgaaaatttgtgttcgtgttccatctctgcctggttgatttgctcgccgcattgacactcatgcccctcgctatgctctctagctctgcactttttgatcatgctctcttcggggaggtagcctgtaggctgtacttgttcctgtccgtttgcttcgtgtccctggctatcttgagcgtgtctgcaatcaatgtagaacggtactactacgtggtgcatccaatgagatacgaggttcgcatgacattaggtttagttgctagtgtcttggtcggagtttgggtcaaggctctggctatggcttccgtgccggtgctggggagggtgagttgggaagagggtgctccctccgtaccccctggatgttccctgcagtggagccactctgcctactgccagctgtttgtggtggtcttcgctgtcctgtactttttgctgcccctcctgctgattctagtggtctactgtagcatgttcagagtggccagagtcgcagctatgcaacatggacccctacccacatggatggaaaccccgagacagaggtcagagagcctctccagccgcagcactatggtaacctccagcggagccccgcagactacgccccatcgcacttttgggggggggaaagctgccgtggtgctgctggccgtggggggtcagttcctcctctgttggctgccctatttttcctttcatctgtatgtcgctttatcagcccaacctatctccaccgggcaggtggagagtgtggtaacttggatcgggtacttttgctttacctctaatccgttcttctacggatgtcttaaccgccagataaggggcgagctatcaaaacagtttgtttgtttttttaagccagcaccggaggaggagcttcggttgccctcccgcgaagggtcaattgaggagaattttttgcagtttctccagggaaccggatgcccctccgaaagctgggtctcaagaccccttccttccccgaagcaagagccccccgcggtcgacttcaggattcccgggcagatagccgaagaaacaagtgagtttcttgagcaacaactcacaagcgacattattatgtctgacagttatcttagacccgcggctagccctcgattggaatcttag

SEQ ID NO: 117876 - DNA, 1356 bp, synthetic construct
  misc_feature 1..1356: note = Description of Artificial Sequence: Synthetic coding sequence
  source 1..1356: mol_type = other DNA
atggagtcgagccccatcccacagtcttctgggaattcttcaacgcttggacgggtgccccagactccagggccttccactgcgagcggggtcccagaggtcggcctcagggacgttgcaagcgaatctgttgccctgtttttcatgctcctgttagacctgaccgctgtggctggaaatgctgctgttatggccgtgatcgccaaaactcccgccctgcgtaaatttgtgttcgtatttcatctgtgtcttgtggatctattagccgccctcactttaatgcctttggcaatgctgtcttcttctgctctgttcgaccatgcgctgttcggggaagtggcatgccgactgtatctgtttctgtccgtgtgtttcgtctctctggctattttgagcgtcagtgctatcaacgttgaacggtactattatgtggtgcaccccatgaggtatgaggtgagaatgaccttgggacttgtggctagtgtactagtgggcgtttgggtgaaggcactagccatggctagcgtccccgtgcttggcagagtctcttgggaggagggcgccccttcggtgcctccaggctgctcgcttcaatggtctcactcggcctactgtcagctcttcgttgtagtgtttgccgtgttatacttcctgctccctttactgttaatcttagtggtctattgtagtatgttccgtgtagcgagggtggccgccatgcagcatgggcctctgccaacctggatggaaactccccgccagcgaagcgaaagcctgtcgagtagatctaccatggtgacatctagtggggccccacaaaccacaccccaccgaaccttcggaggtggaaaagctgccgtggttctcctcgcggttggcggccagtttctgttatgctggctgccatatttctcttttcacctgtacgtcgccctatctgcacagcctatcagcaccggccaggtcgagtctgtggttacctggatcggttatttctgttttacttctaacccctttttctatggatgtctgaaccggcaaatccggggtgagctatctaagcagtttgtttgcttttttaaacccgcaccagaagaagagctgaggcttccttcacgcgagggcagcattgaagagaacttccttcaattcttgcaagggacaggctgcccctcggagagctgggtaagtcggccactcccttcacctaaacaggagccccctgcggtggatttcaggattccgggtcagatagcagaggagacctccgaattcctggagcaacagctgacaagtgacattataatgagtgatagctatctgcgtcctgccgcctcgcccagactggagtcctag

SEQ ID NO: 117877 - DNA, 1356 bp, synthetic construct
  misc_feature 1..1356: note = Description of Artificial Sequence: Synthetic coding sequence
  source 1..1356: mol_type = other DNA
atggagagttcacctattccgcagtctagtggcaactccagtacactgggaagagtgccccagacccctgggcccagtacggctagcggtgtgccagaagttggcctgcgtgacgtggcatccgaaagcgtggccctgttctttatgcttctgctggacctgactgccgtggcggggaatgcagccgttatggcagttattgcaaaaacccccgctctgcggaaatttgtttttgtctttcacctgtgcttggtggacttactagcagcactcactctgatgcccttggctatgctgtcctctagtgctctctttgatcacgcgttgtttggggaggttgcatgtaggctgtacctgtttctctccgtttgcttcgtttcgttggctatcctgtcagtgtcagcgattaacgttgagcggtattactacgtggtgcatcctatgcggtacgaagtcagaatgacgctcgggctggtcgcctccgttctcgttggcgtatgggtgaaggctctagcaatggcctccgtcccagtccttggtcgagtcagctgggaagagggagctccctccgttccgccagggtgctctctgcaatggtctcattcggcatattgccagctcttcgtggtagtgtttgcagtgctgtactttttgctgccactgctactaattttggtggtttattgctcaatgtttcgggtagctcgtgtggctgcaatgcagcatggcccactgcccacttggatggagactcccagacagcggtctgagagtcttagctctcggtccaccatggtgaccagctccggcgcacctcagaccaccccccataggacctttggcggcggtaaagcagctgtggtgctactcgcagtcggagggcagtttctgctgtgttggctgccatatttcagtttccatttgtacgtagccttatcagcccagccaatctctaccggccaagtggagagcgtggtgacttggataggttacttttgctttaccagcaatcccttcttctacgggtgtctcaatcggcagattcgcggagagctctcaaagcagtttgtctgtttttttaagcctgctccggaggaggaacttaggctgccttcacgcgagggctcaattgaggagaactttttacagttcctgcagggaacaggctgtcctagcgagagctgggtctcgaggcctttgccatccccgaagcaggaacctcctgccgttgattttaggattcccggacagattgccgaagagaccagcgaattcctcgaacagcagctgacttcggatataattatgtcagattcataccttcggcctgctgcctctcctagattggagagctag

SEQ ID NO: 117878 - DNA, 1107 bp, synthetic construct
  misc_feature 1..1107: note = Description of Artificial Sequence: Synthetic coding sequence
  source 1..1107: mol_type = other DNA
atggccaacagcactgggttgaatgccagcgaggtggctggatcactggggctaatcttagcggccgtggtggaagtcggagcactcctgggaaatggagcactgcttgtggtagtgttgcgcactcctgggttgcgtgatgctctgtatctagcccatctttgtgtggtggatctgctggctgctgctagcatcatgcccctagggctgctcgccgccccccccccaggcctgggacgggtacgcctaggtcctgcgccttgcagagctgcacgcttcttaagcgcagcactgctgcccgcttgtaccttaggtgtggctgccctgggccttgcaaggtatcggttgatagtgcatcctctcagacctggatccaggcccccccctgtgctcgtgctgacagccgtatgggctgctgcaggactgctgggcgctttgagtctgttgggcaccccgcccgctccaccaccggcacctgctcgctgctcggttcttgccggaggcctcgggcctttccggccgctctgggcactcttggcgtttgccctgccagctcttctgctcttgggagcctacgggggtattttcgtcgtggcacggcgcgcagccctgagacctcctagacccgcccgcgggtctcgtctccactcagacagcctcgattcacggctttctatcttacccccactacggccacggctgccaggcggcaaggccgcccttgccccagccctagccgtgggccagtttgcagcatgctggctgccatatggttgtgcctgcctggctccggcggcccgcgctgccgaagcagaggccgcagtcacctgggttgcctatagcgcattcgccgcacacccctttctgtacggtctcctgcaaagacctgtgaggctcgccttgggcaggctgagccggcgtgccctgcccggccccgtgagagcatgcactccccaggcctggcatccacgggctctgctgcaatgccttcagagaccacctgaaggacctgcagtcggcccttccgaagctccagaacagacccccgagctagctggaggtcgtagtcccgcctaccaggggccaccagagagctcactgagttag

SEQ ID NO: 117879 - DNA, 1434 bp, synthetic construct
  misc_feature 1..1434: note = Description of Artificial Sequence: Synthetic coding sequence
  source 1..1434: mol_type = other DNA
atggcaaatatgcaaggactggtggagcgccttgaaagggctgtgtcccgcctggagtcgctgagtgcggaatcccaccggccacccgggaactgtggagaagtaaacggggtcattgctggagtggcccctagcgtcgaagcattcgataagctgatggattccatggttgcagagttcctgaaaaacagtcggatccttgccggcgacgttgagacgcatgccgagatggttcacagcgccttccaagcacaacgggcgttcctgctgatggctagccagtatcaacaaccacacgaaaatgacgtggcagcgttgctcaagcctatttcagagaaaatccaggaaatccaaaccttcagagaaaggaaccgcggctctaatatgtttaaccaccttagcgccgtctctgaaagcattcctgcactgggttggatcgccgtgtctcccaaaccgggaccttacgtgaaagagatgaatgacgcggccacattctatacgaaccgggttcttaaggactataaacactcagacctgcgccatgtcgactgggtgaagagctatctgaacatctggagtgaactgcaggcatacattaaggagcaccacaccacggggctgacctggtctaaaacagggcccgtggcgtcgaccgtttctgccttttccgtcctgtctagcggcccaggtttgcctccaccaccccctcctctgccccctcctgggccccctcctctgtttgagaacgagggcaaaaaggaggagtcctcccccagtcggagcgcactgttcgctcagctaaaccaaggggaagctatcacaaagggcctgaggcatgtgacagatgaccaaaaaacatacaaaaacccctctctcagggcccaaggtggccagacccaatctcccactaagtcacatacacccagccctaccagcccgaaatcgtatcccagccagaagcacgctcctgtactggagctcgagggaaaaaagtggcgcgtggagtaccaggaggataggaacgatctggtgataagtgaaaccgaactaaagcaggtggcctacatctttaaatgcgaaaagagcaccattcagattaagggtaaggtcaacagcatcatcatagacaactgcaaaaaattaggcttggtgttcgacaacgtggtcgggattgtggaggtcatcaactctcaggacatacagatccaggtgatgggccgtgtcccaacgatctccattaataagaccgaaggctgtcacatatatctctctgaagatgctctggattgcgagatagtgtccgcaaaaagctctgaaatgaatatcctgatcccacaggatggggactaccgtgaatttcctatccccgaacaattcaaaacagcatgggatggctccaagcttatcacggagcctgctgagattatggcctag

SEQ ID NO: 117880 - DNA, 1260 bp, synthetic construct
  misc_feature 1..1260: note = Description of Artificial Sequence: Synthetic coding sequence
  source 1..1260: mol_type = other DNA
atggtgttctccgctgtgcttacagccttccatactgggactagtaatacaacctttgttgtctatgagaacacttatatgaatattacattgcccccccccttccaacatccagacctgtcgcctttactgagatatagtttcgagacgatggcgcctaccggattgtcctctctgaccgtgaatagtaccgccgtgcccaccactccggcagcatttaagagtttgaacctgcccctgcaaattacactgtccgcgatcatgattttcatcttattcgtaagttttctggggaacctagtcgtctgcctcatggtatatcagaaggctgccatgcgctcagccataaatatcttactcgcgtctctcgcctttgccgacatgctgttggccgtcttgaatatgcccttcgcgctggtgactatcttgacaacacgatggatattcggaaaattcttctgccgggtgtccgctatgttcttctggctcttcgtgatagagggggttgccatcttattgattatctcgatagatcgctttttaatcatcgtccaacggcaggacaagctgaatccctacagagcaaaggttctgatagctgtaagctgggctactagtttttgcgtggctttcccccttgctgtgggaaaccctgacctgcagatccccagccgtgccccccagtgtgtgttcggttatacaacaaacccgggatatcaggcatacgttattctgataagcctgattagtttctttatcccattcttggtcattctgtactcatttatgggtatcctcaataccctgcgccacaatgctcttagaatccacagctatccagagggcatttgcctgagtcaggcctctaaactgggcctcatgtcgctccagcgaccctttcagatgtccattgacatggggttcaaaacacgagcttttacaacaattctgatccttttcgccgtctttattgtttgttgggctccgtttacaacctacagcctcgtggcgactttttccaagcacttttattatcaacataatttctttgaaatttcaacttggcttctgtggctctgttatttaaaaagtgccctcaatccattgatttactattggcggattaagaaattccatgatgcttgcctggacatgatgccgaaatctttcaagtttctgccacaacttccaggccacacaaaacgccggatacgtcccagcgccgtgtacgtgtgtggcgaacacagaacagtggtctag

SEQ ID NO: 117881 - DNA, 1260 bp, synthetic construct
  misc_feature 1..1260: note = Description of Artificial Sequence: Synthetic coding sequence
  source 1..1260: mol_type = other DNA
atggtcttttccgcggtcttaacggctttccatactggcactagcaataccacttttgtggtttatgaaaatacgtatatgaacattacgttaccaccgccctttcagcacccagatctgtccccgctcctgaggtatagttttgagacaatggcgccaaccggactgtccagccttaccgttaattccaccgcggtccctaccacccccgccgcctttaagtctctgaacctgcccctacagatcactctttcagccattatgatcttcatcttatttgtttcttttttgggaaatttggtcgtttgcctgatggtgtaccaaaaggccgctatgcgatcagcgattaacattctactggcaagccttgcatttgccgatatgttactcgccgttttgaacatgccctttgcactggtcactattctgactacgagatggattttcgggaagtttttctgcagagttagcgccatgtttttttggctgttcgtcattgaaggggtcgccatcctgcttatcatatctattgacagattcctaatcatagtgcagaggcaggataaacttaatccttatagagccaaagtgctgattgcggttagttgggctaccagtttttgtgttgcttttcccctcgccgttggcaacccagatcttcagatccctagccgcgcaccacagtgcgtatttgggtacactaccaatcccgggtatcaggcttacgtgattcttatttcacttatctccttttttatcccgttcctcgtgatcctctattcattcatggggatactgaataccctgcggcataatgccctgcggatccattcttatcctgagggtatatgcctttctcaggcatcgaaacttgggttaatgagtctgcagcggccttttcaaatgtccattgacatgggtttcaaaactcgtgccttcacaactatcttgatactgttcgcagtcttcattgtttgttgggccccattcaccacctacagcttggtcgctacgtttagcaagcacttctactaccaacataatttctttgaaatcagcacatggctcctctggttatgttatttaaagtccgcgctgaaccccctgatctactattggagaattaagaagtttcacgacgcatgcttggatatgatgcctaaaagttttaagtttcttcctcagctccctggccacaccaaacgtcgcattaggcccagtgcagtgtacgtatgcggtgagcatcgtactgtagtgtag

SEQ ID NO: 117882 - DNA, 1332 bp, synthetic construct
  misc_feature 1..1332: note = Description of Artificial Sequence: Synthetic coding sequence
  source 1..1332: mol_type = other DNA
tattgttgcagcgtgctaaagtgcctaaaaaacagttgcatcagtgcttgcatttttcacccaacggagactatggtgtttagcgcagttcttactgccttccacactggtacaagcaatacaacctttgttgtgtacgaaaacacctacatgaacatcacccttccaccaccttttcagcatcccgacctctcgcctctcctgcggtacagctttgaaacgatggcccccacagggttatcctctcttactgttaacagcaccgcagtcccaaccacgcccgctgcatttaagagccttaatctccccctgcaaatcaccctcagcgccatcatgattttcattctgtttgtctcgttcttagggaatttagtcgtatgtttgatggtatatcagaaagcagccatgcgtagtgcaatcaacatcctcctggccagcctggcctttgccgatatgttgttagctgtgttgaacatgcctttcgctctggtaactatcctgacaacccgctggattttcggaaaattcttctgtcgcgtttccgcaatgtttttctggttattcgtgattgaaggagtggctatactcctaatcatcagtatagacagatttctgattattgtgcaaaggcaggacaaactgaatccttacagggcaaaagttctaatcgccgtctcatgggctaccagtttttgcgtcgccttcccactggcggttggcaaccccgacctgcagatacctagccgggctccccagtgcgtgtttggctataccacaaatcccgggtaccaagcatacgtgattctcatttccttaatcagtttctttatacctttcctggtgattctgtattcgtttatgggcatcttaaataccctcaggcacaacgccctgcggattcacagttatccagaggggatttgcctgtcacaggcctccaaattaggacttatgtctctacagcggcctttccaaatgtccatcgatatggggtttaagacccgagcatttactacaatactcattctttttgcagtgtttatcgtgtgttgggcaccttttactacttacagccttgtcgctaccttcagcaaacacttctattaccagcataacttcttcgagattagtacatggctgctgtggctttgctatcttaagtctgctctgaatcccctgatctattactggcgcatcaagaagtttcacgacgcctgtctagacatgatgcccaagtcttttaagttcctgcctcagctgcccggccacactaaaaggaggatcaggccgtcagctgtttatgtgtgcggggaacatcggacagtggtctag

SEQ ID NO: 117883 - DNA, 2697 bp, synthetic construct
  misc_feature 1..2697: note = Description of Artificial Sequence: Synthetic coding sequence
  source 1..2697: mol_type = other DNA
atggttttttcagtaagacagtgtggccatgtgggtcggaccgaggaggtactgctgaccttcaaaatattcttggtcatcatctgtctgcacgttgtactcgtgactagcctggaggaggacaccgacaacagttcgcttagtcctccccccgaggtggagacaaccagtcttaatgacgtgaccctaagtttgctgccatctaacgagaccggcgtaaagccccagaggaacatttgcaacctgtcttcgatctgtaatgactccgcctttttcaggggcgagataatgttccagtatgacaaggagtcaacggtgcctcaaaatcagcacatcaccaatggtaccttgacaggggtgctctccctatcagagctcaaaaggtcagagctgaataagacattacaaacactttctgagacatatttcatcatgtgcgcaacagcagaggctcagagtacactgaactgtacatttaccatcaagctgaacaatactatgaacgcctgtgccgttattgccgctcttgagcgggtgaagatcagacctatggaacattgctgctgctctgtacggattccttgtccttcaagcccagaggaattggaaaagctgcagtgcgaccttcaagatccgattgtgtgtctggctgatcatcctagaggtccccctttttcctcatcccagtcaatccctgtagtcccgagggctacagttctgagtcaagtacccaaagccaccagcttcgccgaaccacccgattattctccagtgacacacaacgttccatcccccatcggggaaatccagcccctgtcgccacagccgtcagctcctatagcctcttcgccagccattgatatgcctccgcaatccgagaccatcagttcccccatgcctcagacacacgtttcaggtactccaccccctgtcaaggcaagcttttcgagtccaacagtgagtgctcctgcaaatgtaaacaccacatcggctccacccgtgcagacagacatcgtcaatacttccagcatatctgaccttgaaaaccaggtactccagatggaaaaagccctgagtctaggaagtcttgaaccaaatcttgccggggagatgataaatcaggtgagcagactgctgcactcgcctccagatatgctggctcccctggcacagcgcttattgaaggttgtggacgatatcggtcttcagcttaacttttcgaacaccaccatcagcctcacttctccttcactcgccctcgctgtgatccgggtcaatgcctcttcatttaacacaaccacctttgtcgctcaggaccctgccaatctccaagatgagctgacggtacggtgcgttttttgggatttagggcgaaatggtggccggggagggtggagcgacaacggatgtagcgtgaaggaccggcggctgaatgagaccatatgcacctgttcgcatctgacgtctttcggagtcctcctggacctctctagaaccagtgtgcttccagcgcagatgatggcgctgacatttatcacctacattgggtgtgggctttcaagtattttcctgtcagtcactcttgttacgtatattgccttcgaaaagatcaggcgagattaccccagcaaaatcttaattcaactttgcgccgcgctgctgctcctgaatctcgtgtttcttttagatagttggatcgccctgtacaagatgcaaggcctgtgtatcagtgtcgccgtattcttgcattattttctgctggtgtccttcacatggatgggcctggaagcctttcatatgtatctggccctcgtgaaggtttttaatacatacatccggaaatacatcctcaaattttgtatcgtgggatggggagtacctgctgtggttgtgacgattatcctcactatatcacctgacaattatgggctgggctcttacggcaagtttccaaatggttcccccgacgatttttgctggatcaataacaatgccgttttctacatcacagtggtcggctacttctgtgtgatcttcctgctgaatgtgtctatgttcattgtggtcctcgtgcagctgtgccggatcaagaagaagaaacagctgggcgcacaacgaaagacgtcgatccaggacctcaggtctatcgctggcctgacgttcctactgggaatcacttggggattcgcgttcttcgcctggggtcctgtgaatgtaacgtttatgtatctgttcgccatcttcaacacacttcagggctttttcatattcatcttctactgtgtggcaaaagagaatgtgcgaaagcaatggcggaggtacctctgctgcggaaaattacgacttgcagagaacagtgactggtctaaaacggcaacaaatggcttgaagaagcagacggtaaatcaaggcgtaagtagctcttctaactccctgcaaagctcatctaactcgactaactctaccaccttgttagtcaataatgattgttctgttcacgcttccggtaacggcaatgcttctactgaacgaaatggtgtgtcattctccgtccaaaatggagacgtatgtctgcacgacttcaccggcaaacagcacatgttcaatgagaaagaagacagctgcaatggaaagggtcgcatggctctccgcagaacaagcaaacgcggatccttacacttcatcgaacagatgtag

SEQ ID NO: 117884 - DNA, 3006 bp, synthetic construct
  misc_feature 1..3006: note = Description of Artificial Sequence: Synthetic coding sequence
  source 1..3006: mol_type = other DNA
atggtgttttctgtcaggcaatgtggccatgtcggacggacagaagaagtcctactcacattcaaaatatttttagtgatcatttgtctgcatgtcgtcctggtcacctcactcgaggaggacacagacaattccagtctctctccgccgcccgacgaggagactggtgcgtgttccgacgtgacactatcactgctccccagcaatgagacagagaaaacgaagataactatcgtaaagaccttcaatgcttccggcgtgaagcctcagcggaatatatgtaatttatcaagtatatgcaacgatagcgctttcttccggggcgaaattatgtttcagtacgataaggaatccactgtaccccagaatcagcacatcactaacggaaccttaactggtgtccttagcctcagcgaactgaagaggtcagaacttaataaaacactgcaaacgctgtccgaaacgtactttattatgtgcgctaccgctgaagcgcagtctactctgaattgcacctttaccattaaactgaataataccatgaacgcatgcgccgttatcgctgccctggagagagtgaaaattaggcccatggagcactgctgctgtagtgtcagaattccttgcccttctagccctgaagaactggagaagttgcagtgtgacctccaggatcccatcgtctgcctggcagaccaccctcgcggaccgccattttccagcagccagtccattcccgtagtcccaagagcgactgttctgagccaggtgccaaaggccacaagcttcgctgagcccccagactatagccctgtcactcataatgtaccatccccaatcggtgagatacagccactttctccacagcctagtgcacccattgcatccagtcccgctatcgacatgcccccccagagcgaaaccatctcgtcccccatgcctcagacacacgtttcaggaacccccccaccagtgaaggctagttttagttctcctaccgtgtccgcacccgccaatgttaataccacatcagcccctcccgttcagaccgacattgtaaataccagttctattagtgacctggaaaatcaggtactccagatggagaaggctttaagtctcggatcactggagcccaatctggccggcgaaatgatcaaccaggtttcacggctcttgcattctccaccggacatgctagccccactggcacagagactactcaaggtcgtggatgatattggattacagctaaacttcagtaacaccaccataagcttgacatccccttcacttgcactggccgtgattcgcgtaaacgcttcctccttcaataccaccacatttgtagcacaagaccccgccaacttgcaggtaagcttggagacacaagcgcctgagaactctattgggacaattaccctcccctctagtctaatgaataacttgcctgcccacgatatggagttggcctcaagggtccagtttaacttttttgagactccagctcttttccaggatcctagcttagagaatctgagtcttatcagttatgtcatctcatcgtcagttgcaaatttgactgttcggaatttaacccggaacgtgaccgtgactctgaagcacatcaacccgtcgcaggacgaattaactgttaggtgtgtgttctgggaccttggcagaaacggagggagaggcgggtggagtgacaatggctgcagtgttaaagatagaaggctgaacgagactatctgtacctgctcccacctgacaagcttcggggtgctcctggacctgtcccgaactagcgttctccctgcacagatgatggctctgacgtttataacatacataggctgtggtcttagttccatcttcctgtccgtgacgttggtgacttatatcgccttcgagaaaatccggcgagattacccatctaagattttaatccagttatgcgccgcgttgctgttgctcaatctggttttcctgttagactcctggattgctctgtataagatgcagggtctgtgcatcagcgtggccgtgttcctgcattactttttgctcgtgtcattcacttggatgggactggaggcatttcacatgtacctagcccttgtgaaagtgtttaacacttacatccgcaaatacatccttaagttttgcatcgtgggatggggagtgcctgctgtcgtcgtaacgatcattctcacgatctctccggacaattatggcctgggttcctatggcaagtttccaaatggtagccccgacgatttttgttggattaataacaacgcagtgttttacattaccgtagtgggatatttttgcgtgattttcctgcttaacgtgtctatgttcattgtagtgcttgtacagctctgccgcattaagaagaaaaagcagctgggcgcacagaggaagaccagtatccaggatcttcggtcaatcgccggtttaacatttttgctcggtataacttggggtttcgccttcttcgcatggggaccagtgaacgtgacctttatgtatctctttgctatattcaacactctgcaaggcttctttatattcattttttactgcgtggcgaaagagaacgtgcggaaacagtggcgacgctatctctgttgtggaaaactacgattggccgaaaattctgactggagtaaaactgctacgaatggactgaagaagcagaccgtcaatcagggcgtatcctcctcatctaacagcctccagtcatcttctaatagcactaactcaactacccttttggtgaataacgactgttctgtgcatgccagcggcaacggcaacgcgtccactgagcgtaatggggtctctttcagtgtacaaaatggggatgtctgtcttcacgatttcacagggaagcagcatatgtttaacgaaaaagaggacagctgtaacggcaaaggcaggatggcactacggcgcacatccaaacgcggatcccttcatttcattgaacagatgtag

SEQ ID NO: 117885 - DNA, 3012 bp, synthetic construct
  misc_feature 1..3012: note = Description of Artificial Sequence: Synthetic coding sequence
  source 1..3012: mol_type = other DNA
atggtattctcagtgaggcagtgcggtcacgtgggtaggacagaagaagttctattgaccttcaagattttcttggtcattatctgtctgcacgtggttctcgtgacatctttggaggaagatactgacaacagcagcttgtcgccccctcctgcgaagcttagcgtggtgtccttcgccccaagcagtaacgggacccccgaggtggaaaccacttcactgaacgacgtcacgctaagtctgctgcctagcaacgagaccggcgtgaagccccagagaaatatatgcaacctttctagtatatgtaatgattcagcatttttccgtggagaaattatgttccagtatgataaggagagcactgttccccagaatcagcatataacaaacggcacgctgactggcgtcctcagcttatccgagctaaaacgtagtgagctaaataaaaccctacaaactttgtcggagacctattttatcatgtgcgccaccgctgaagctcagtccacattgaactgcactttcacgattaagctgaataacactatgaatgcttgtgcagttattgctgctctcgagagagttaagattcgtcctatggagcattgttgctgttctgtccgaatcccatgcccttccagtcccgaagagctcgagaagttacaatgcgacctgcaggacccaatcgtttgcctggcagatcaccctcggggaccacccttttcttcaagtcaatctattccagtggtgcccagagccaccgtgctatcccaggtgcccaaggcaacttccttcgcagaaccaccggattattcacccgtgactcataatgttcccagcccgatcggcgagattcagcccctgtccccgcagccctcggcaccaattgcatcctctccggccatcgatatgcccccccaatctgaaaccatatctagtccaatgccacagacccatgtgtccgggacaccccccccggtcaaggcctctttttcctccccaactgtgagtgccccagccaacgtgaataccacctccgcaccccccgtccagaccgacattgtcaacaccagttctatttcagacctcgagaaccaggttctgcaaatggaaaaagcactcagtctaggttctttggagcccaatctcgcaggggagatgattaaccaggtttctcgacttctgcacagcccacccgatatgctggccccccttgctcagaggctgttgaaagtagtggatgatatcggcctgcagttgaacttctcaaacaccaccatctccctgacatctccctctctcgccttggccgtgattagggttaacgccagttcctttaacacgaccactttcgttgcgcaggatcctgcaaacttgcaggtttccctagaaacacaggcacctgagaattcaatagggacgatcacactcccatcttcacttatgaacaatctgccagctcacgatatggagttggccagtcgagtccagttcaatttctttgaaacgcccgcgctatttcaggacccatcattggaaaacctgagtctgattagctacgtaatatcttcctccgtggccaatctgaccgtgcgcaatctgaccagaaacgtgacagtgaccctcaagcacataaatcccagtcaggacgagttaacggtaagatgtgtcttttgggatcttggccggaacggcgggcggggggggtggtccgataatggatgcagcgtcaaggacaggcgcctgaacgagacaatctgcacctgctcacatctcacgagttttggggttctgctggatctcagcaggacatctgtgctgcctgcccaaatgatggcattaactttcattacctacatcgggtgtggtctgagttctatcttcttatctgtcactctggttacctatatcgcattcgagaaaatacgccgggactacccctccaagatacttatccagctgtgtgccgctttgctgctgctcaatcttgtattcctccttgacagctggatcgctctctataaaatgcaggggctgtgtattagcgttgccgtcttcttgcattatttcctcctagtgtctttcacctggatgggcctcgaagctttccatatgtatcttgccctggttaaggtgttcaatacttacatccggaagtacatactcaaattctgcatcgtaggttggggagtgcctgccgttgtggtgactatcatactaaccattagccctgacaactatggcctggggtcatatggcaagttcccaaatggtagccctgacgatttctgttggattaacaacaatgccgttttctacattaccgtggtcgggtacttctgcgtcatcttcctcttgaatgtgagcatgttcatcgtcgttctggtccagctctgcaggatcaagaagaaaaaacagctgggcgcccagcggaaaactagtatccaggacctgagatccatcgctggcctgactttcctcctcggaataacgtggggattcgccttttttgcgtgggggccggtgaacgtgactttcatgtacctgtttgcaattttcaacacactgcaggggtttttcatattcatcttctactgcgtggctaaagaaaacgtgcggaagcagtggagacggtatctttgctgcggcaagctgagactggccgagaactccgattggagcaaaaccgcaaccaacggactaaaaaaacagaccgtgaaccaaggtgtgagctcatctagtaacagcctgcagagctcatctaatagcaccaattccactacactcttagtcaacaatgactgttctgtgcatgcctccggcaacggcaatgcctccacagagcgcaatggcgtgtccttttccgttcagaacggcgatgtgtgcctgcacgactttactggtaaacagcatatgtttaacgagaaagaggattcatgtaatggaaagggaagaatggcacttagaagaacatctaaacgcggaagtttacattttatcgaacaaatgtag

SEQ ID NO: 117886 - DNA, 2964 bp, synthetic construct
  misc_feature 1..2964: note = Description of Artificial Sequence: Synthetic coding sequence
  source 1..2964: mol_type = other DNA
atggttttctcggtcaggcagtgcgggcacgtgggtagaaccgaagaggtcctattaacattcaaaatcttcctggtgatcatatgccttcacgtggtgctggtgactagtctcgaggaagataccgacaattcctccctcagtcctccgcccgaagtcgaaaccacgtcgcttaacgatgttaccctgagcctgctcccctcaaacgaaacaggggtgaagccccagcggaacatttgtaatcttagttcaatttgcaacgacagcgctttttttagaggagaaattatgtttcaatatgacaaggaatcaactgtgccacagaaccagcatattacaaatgggaccctgacgggggtgctatccctttccgagcttaagaggtctgaactcaacaagaccctgcagactctgtctgaaacttactttattatgtgtgcaactgcagaggctcagagcacactgaattgcaccttcaccatcaagctcaataacactatgaacgcctgtgcagtgattgcagctctggaacgtgttaagataaggcccatggagcattgctgttgttccgttagaattccctgcccaagttcgccagaggagcttgagaaactgcagtgtgatctgcaagaccctattgtctgtctggccgaccatcccagaggtcctcccttttcctcctctcagtctatccctgtggttcctcgggctacggtcctatcacaggttcccaaagccactagctttgcggaaccccctgattatagcccggtcacccacaacgtccctagccccatcggagaaatccagcccctatctccacagccgtcggcacctattgcctcatcaccagccatcgatatgcccccgcaatctgagacgatctcttcaccaatgccacagacccatgtgtccggaaccccacctcccgtaaaggcaagtttttcttctccaaccgtatcggcccccgctaatgttaatacgacgagcgcacctccggtgcaaactgacattgtgaacacttcctctataagcgatctcgagaaccaggtgttgcagatggagaaggcactaagtctgggctccttagagcccaacctggctggagagatgatcaaccaagtgagcaggctgcttcattccccgcccgacatgttggctccgctggcccagcgcttgctcaaagtggtagatgatattgggctacaactgaacttcagcaatacaactatctccctcacttcgccaagcctggcactcgccgtgattagggtgaatgctagttcatttaatactaccaccttcgtggctcaggatcctgcaaaccttcaagtgtccctggagacacaggcgccggagaactccatcggcactattacgttaccttcaagtcttatgaacaacctgccagctcatgacatggagttggcttctcgagtgcagtttaattttttcgagactcctgccctgttccaagaccccagcctggagaacttgagtctcatatcgtacgtgataagctcttccgtggccaaccttaccgtgcgcaacctgacaagaaatgtgactgtaacactgaagcatatcaatccttcccaagacgagctgactgttcgctgcgtcttctgggatcttggaaggaatggcggacgcggggggtggtccgataacggatgttcggttaaggatagaaggctcaatgaaaccatctgtacgtgttcgcatcttaccagctttggcgtattgcttgacctgtctagaactagcgtgctgcccgctcagatgatggcactgacttttatcacctacataggatgcggcctttcctcaatctttctctccgtgaccctagtgacgtatatcgcattcgagaaaatcaggcgcgattacccaagcaagatccttatacagctgtgtgccgcactgctgctattaaacctggtattcctcctggacagctggattgccctgtacaagatgcaaggtctgtgcataagtgtggcggtgttcttgcattactttctcttagtctctttcacttggatgggactggaggcatttcatatgtatctcgcgctggtcaaggtgttcaacacctacatacggaaatacattcttaagttttgtattgtcggctggggagtgcccgccgttgtggtaactatcatactaactattagcccagacaactacggcttgggctcctacggcaaatttcccaacggcagccctgatgacttttgctggatcaacaacaacgcggtgttctatatcacggttgtgggctatttttgtgtcatcttcttgctgaacgtgtcgatgtttattgtggttctcgtccagctttgccgtatcaaaaaaaaaaagcaacttggggcccagaggaaaacttccattcaagatctgagaagcatagcaggcttgactttccttctcgggattacctggggctttgctttctttgcttgggggccagtcaatgttacatttatgtacctctttgcaatttttaacaccttgcaggggttcttcatcttcatattttactgcgttgccaaagaaaacgtaaggaaacagtggaggcggtacctctgttgcgggaagttgcgtttggctgagaactccgattggagcaaaaccgccaccaacggcttgaaaaagcaaacggtgaaccagggagtgtcctcctcttctaatagtctccagtctagtagcaattcaaccaactcaacaaccttactagtaaacaatgattgttcggtacacgctagcggcaacggcaatgcttcaacagagaggaacggggtgagcttcagcgtacaaaacggggatgtatgtctgcatgatttcacaggcaagcaacacatgtttaatgagaaagaggactcatgtaacggtaagggtaggatggcgctgcggcggacatctaagcgtggttctctacacttcatcgagcagatgtag

SEQ ID NO: 117887 - DNA, 3045 bp, synthetic construct
  misc_feature 1..3045: note = Description of Artificial Sequence: Synthetic coding sequence
  source 1..3045: mol_type = other DNA
atggtgtttagcgtgcgccaatgcggccacgttggcagaactgaggaggtgctgctgacatttaagatctttctggtgatcatctgtctgcacgtcgtgctggtgacctcacttgaggaagatacagataattcttcactgtcccctcccccagctaagctgtctgttgtctcttttgccccatcctcaaacgaagttgagacgaccagtttgaatgatgttacactctctctgctgcccagtaatgagactgaaaagaccaagatcactattgttaaaaccttcaacgcgagcggggtgaagcctcagagaaacatctgcaatctgtcctctatttgcaatgattccgctttctttaggggcgagatcatgttccagtacgataaagaaagcactgtgccccaaaatcaacatattacaaacggaacactgactggcgtgcttagtttgagcgagctgaaaaggagcgaactgaacaaaacactccagactctctctgaaacctatttcattatgtgcgccactgccgaagcccagtctacccttaattgtactttcactattaaactcaacaataccatgaatgcctgtgccgtgatcgcggccttggagcgtgtcaagatccgccccatggagcactgctgctgttccgtgcggattccctgcccctcctcacctgaagagctcgagaagctgcaatgtgaccttcaagatcccatcgtctgtctggcagaccacccccgtggacccccctttagcagctcgcagagcattcccgtcgtgccacgggcgacagtgcttagccaggtgccaaaagccacatcatttgctgaaccccccgactattctccagtgactcacaacgtccctagccccataggagagatccagccactgtcccctcagcccagcgcacccattgcttcttctccagctatcgacatgccaccacagtctgagaccattagcagtccaatgccccaaactcatgtgtcaggtacaccccctcccgtgaaagcttccttctcctcaccgaccgtctccgccccagcgaatgttaacaccaccagcgctccgcccgtacagacagatattgtgaacacatcgagcatatctgatctggaaaaccaggtgttgcagatggagaaagccctgagccttggctcactcgagccaaacttggccggtgagatgattaaccaagtgtcgaggcttttacactctcctccggacatgttagcacctctggcccaaaggcttttgaaggttgtggacgacatcggcctacagttaaatttctctaatacaaccatctccttgacctctccaagcttggccctcgccgtcatcagggtcaacgcctcaagcttcaatacaacaacttttgtagctcaggaccctgctaaccttcaggtttctctcgaaacacaagcccctgagaacagtattggcacgattactctaccaagctccctgatgaataatctaccagctcacgatatggaacttgccagcagggttcagttcaattttttcgagacccctgctctgtttcaggacccctcactagagaacctctcccttatcagttatgtgatcagttcttcagttgctaacttaacagtcaggaacctcacgcggaatgtgacagtgaccctgaaacatattaacccttctcaggatgaattaaccgtaaggtgcgtgttctgggacctgggccgaaacggcggccgggggggttggtctgataacggctgcagcgtgaaggaccgacgacttaatgagaccatttgcacctgcagtcacttgacatccttcggcgttctccttgacctcagcagaactagcgttttaccggcccaaatgatggccttgaccttcattacgtacatcggctgcggactctcctccatttttctgtcagtaactctcgtgacctatatagccttcgaaaaaatacggcgcgactacccatcaaaaatcctgatccaactatgtgccgctctgctcctcttgaatctagtcttcctccttgattcatggattgccttatacaagatgcaggggctctgcatctccgtggcggtgtttctgcattattttctgttagtgtcattcacatggatgggcctggaggccttccacatgtacctggccctggtgaaggtgttcaacacctacatccggaaatacatcttaaagttttgcatcgtgggatggggggtaccagccgtagtcgtaactatcatcctcacaattagtcctgataattatgggttgggttcatacggcaagttccctaacgggagccccgatgacttttgttggattaataacaacgctgtgttctatattacggtggtgggttatttctgcgtgatttttcttcttaatgtttccatgtttatcgtggtgctggtacagctttgcaggatcaaaaagaagaaacaactgggagctcaaagaaagacttccatccaggatctccgttctattgccgggttaacatttctgctgggtataacctggggcttcgccttttttgcctggggtcctgtgaatgttaccttcatgtacctgtttgcgatctttaacacactccagggcttctttattttcatcttctactgcgtagccaaagaaaacgttaggaagcagtggaggcggtatctgtgctgtggcaagttgcgactcgccgaaaatagtgattggtccaaaactgccacgaatgggctcaagaaacagaccgtaaatcagggagtgagttcatctagtaatagcctgcagtctagtagcaactcaaccaacagcacaacactgctggtcaacaacgactgtagcgttcacgcttctggaaacgggaacgctagtacagagcgaaatggcgtctcattctctgtgcagaacggtgacgtatgtctccacgactttactggcaagcaacacatgtttaatgagaaagaggactcctgtaacggtaaagggcgtatggccctacggcggaccagcaagcgaggttctctgcacttcattgaacaaatgtag

SEQ ID NO: 117888 - DNA, 2988 bp, synthetic construct
  misc_feature 1..2988: note = Description of Artificial Sequence: Synthetic coding sequence
  source 1..2988: mol_type = other DNA
atggttttctctgtgcggcagtgcgggcacgtgggacgcacagaggaggttttgctcactttcaaaatattcctcgtaataatttgtctccatgtagtgctcgtcacgtcactggaagaggataccgacaacagcagtctctcccccccgccagcaaaactgagtgtggtgagcttcgccccgagtagcaacggaacccctgacgtgacactatcacttctgccatctaatgagacaggagtgaagccccagcggaacatctgcaacttgtctagcatctgcaacgactcagcattcttcagaggagaaataatgtttcagtatgacaaggagtctaccgtgccacagaatcaacatatcaccaatgggaccttaacaggggtcttaagtctctccgagctcaaaaggtctgagctgaataagactctgcagacgctgtccgagacatacttcattatgtgtgcaactgccgaggcccagtccacgctcaactgtacatttacaataaagctgaacaacacaatgaacgcttgcgccgtgatcgcggccctagaaagagtaaagataaggccaatggaacactgctgttgcagcgtccggatcccctgtccctcatcgccggaagagctggagaagctgcaatgcgacctgcaagacccgattgtgtgcctggcggatcacccacgcggaccaccctttagctccagccagtccattccagtcgtacccagagcaacagttctgtcgcaagtgcctaaggccacaagttttgcagagccccctgattacagccctgtaactcacaatgtgcctagtcctatcggagaaatccagccgctctcccctcaaccatcagctcccatcgccagttctcctgccattgatatgcctccacagtcagaaaccatcagttctcctatgccacagacacatgtttctggcacacccccaccggttaaggccagtttcagctcccccacggttagtgcacccgccaatgtgaacactaccagcgcccctcccgtgcagaccgacattgtgaatacttcctccatctctgatcttgagaatcaagtcctgcagatggaaaaagctctctccctcggaagtcttgagccaaatctggccggtgagatgatcaatcaagtctcacggctgttacatagtccacccgacatgttggctcccttggcccagcgtttactgaaggttgttgacgatattggcttgcagcttaatttttccaataccacaatcagtttaacaagcccaagccttgccctggccgtcattagagttaatgcatcgagttttaacaccactacctttgtcgcccaagatccagccaacctgcaggtatctttggagacccaagctcccgaaaactcgataggtaccataacgctcccgagcagtctgatgaataatctgcctgcccacgacatggagctagcctctagggttcagtttaacttcttcgagactcccgccctgttccaggacccaagtctggagaatctctctctgatctcttacgtgatctcatcctcagttgccaacttgacagtgagaaacctaacccgtaacgtgaccgttactctgaagcacattaatccctcacaggacgagctaacagtgaggtgcgtcttctgggatcttggccgcaacggcggacggggaggctggtcagataatggctgctccgtcaaagatcgtcgactcaacgagacaatttgcacatgttctcaccttacctcgttcggagtgctgctggatcttagtcggaccagtgtgctgcctgcccagatgatggccctgacgtttattacctatatagggtgcggactgtcaagcatatttttgtctgtcactcttgttacctacatcgctttcgagaaaataaggagagattaccccagcaagattctcatccagctgtgcgccgccttgttactcttgaaccttgtcttcctgttggatagctggattgccctgtacaaaatgcagggtctctgcatctccgtggctgtgtttctgcactattttttacttgtttcatttacctggatggggctggaggcatttcatatgtacctcgcactggtcaaagtgtttaacacctatataagaaaatacatcctgaaattctgtatagtgggctggggtgtgcctgcagtggtagttacaatcatactaaccattagccccgataattacggtctagggtcttatggtaaattcccaaacggttcacccgacgacttctgttggatcaacaataatgctgttttttatattactgtcgtcgggtatttttgcgtgatctttcttcttaacgtctccatgttcattgtggtcctcgtccaactctgccgcatcaagaaaaagaagcaactgggggcccagaggaagacttcaatacaggacctgcggagtatcgctgggctaacattcctgctgggaattacttggggattcgcattctttgcatgggggcccgtgaacgttacattcatgtacctgttcgcaattttcaatactctccaaggcttttttattttcatcttttattgtgttgcaaaagaaaatgtgcggaaacagtggagacgctatctgtgctgcgggaaactgcggcttgccgagaattcggattggtctaagactgccacgaatggtctgaagaaacagacagtcaatcaaggggtgtcgtcttcctccaactcactccagagttcaagcaattcaaccaattcaacaaccctgcttgttaataacgattgctcggtccatgcaagcggtaatggaaacgcttccaccgaaaggaatggcgtctctttttcagtgcagaacggagatgtttgcctgcacgatttcacaggaaagcaacatatgttcaacgaaaaggaagactcatgtaacggcaaaggtaggatggccttgaggcgcacatcaaagcggggttcactgcattttatagagcagatgtag

SEQ ID NO: 117889 - DNA, 3054 bp, synthetic construct
  misc_feature 1..3054: note = Description of Artificial Sequence: Synthetic coding sequence
  source 1..3054: mol_type = other DNA
atggttttctctgttaggcagtgtggccatgtaggtcggactgaggaggtcttactgacattcaaaatattcctcgttattatttgtctgcacgtcgttctggtgacctcgctcgaggaagacactgataactccagcctgagtccaccacccgccaagctatcggtggtttcttttgctccctcctcaaacggcacgcctgaagttgaaaccacgagccttaatgatgtaacgttgtctcttctgccatccaacgagacagaaaagactaagataacaattgtaaagacgtttaatgccagcggtgtgaagcctcagcgcaacatctgcaatttgtcatctatttgtaatgacagcgcctttttcagaggagaaatcatgttccagtatgataaagaaagcaccgtaccacagaatcagcacatcaccaatggcactttaactggagtgctgagtttgtctgagctgaagagaagcgagttaaataagactctgcaaaccctttctgagacatatttcatcatgtgcgccacggccgaggctcaatccacccttaactgcactttcactatcaagctgaataatacaatgaatgcatgcgctgtaatcgcagcccttgagagagtcaagatcagacctatggagcattgctgttgctctgtgcggattccgtgtcccagcagccccgaggaactggaaaaactgcagtgtgatctccaggacccaatagtctgcctcgccgaccatcctcgcggtcccccattttcttcatctcagagcatccccgtggtgccccgtgcaactgtgctgtcccaggtaccaaaggccacctcttttgccgaaccgcccgattacagtcctgttacccacaacgtgccctccccaattggcgaaatccaaccactgtcccctcagcctagcgccccaatcgccagcagcccagctattgacatgccacctcaaagcgagaccataagttctcctatgccccagactcacgtcagtggcacccctccacccgtaaaagcatccttcagttcacctaccgtgagcgcccctgccaacgtaaatacaacaagtgcccccccagtacagaccgatattgttaacaccagtagtatctccgaccttgaaaatcaggtgttacagatggaaaaagccctgtcattaggatctcttgagccaaacctggccggagagatgataaaccaggtgtccaggctgctccatagcccaccagacatgctcgcaccactcgcacagaggttattgaaggtggtcgacgatatagggcttcagctgaatttcagtaacacaacaatctccctgacctcgccctcgctggccctcgctgtgatcagagtgaacgccagtagcttcaataccaccacttttgtcgcccaggaccccgccaatttacaggtaagcttagagactcaggctcccgagaactcaattggaaccattacattgccatcctctctgatgaacaatctgccggcccatgatatggagctggcgtccagggtgcaatttaacttcttcgaaactcccgccctgtttcaggatccaagccttgagaatctcagtttaatatcatatgtcattagttccagcgtggccaatctgacagtccgcaatttgacccgcaacgtgacagtcaccctcaagcacatcaacccctcccaagacgaattgactgtccgctgtgtattctgggacctgggacgaaatggaggaagaggcgggtggtcagacaacgggtgtagtgtcaaggatcgtaggctcaacgaaactatttgcacctgcagccacttgacaagtttcggtgtgttactggatcttagcagaacttcggtgctacccgcccagatgatggccctgaccttcattacttacatcggctgtggactaagcagtattttcctgtccgtgacgttggtgacgtacattgcctttgaaaagatccgacgggattatccttcaaagatcctgattcagttgtgtgcggcgctccttctactcaatctggtattcctcctggattcctggattgctctgtataaaatgcaagggttatgtatttccgtagccgtgttcttgcattatttcctgctggttagcttcacatggatggggctagaagccttccatatgtatctcgccctggttaaagtgttcaacacatacattagaaaatacattttaaaattctgtatcgtaggatggggtgtaccagctgtagttgtgaccatcatcttaactatcagccccgataactacggcttgggatcttacggcaaattccctaatggatccccggacgacttctgctggatcaataacaatgccgtgttttacataaccgttgttggatacttttgcgtcatatttcttctgaatgtttcgatgtttattgtggttctggtgcagctgtgccgaatcaagaaaaaaaaacaactcggagctcagagaaaaacatcaatccaagacctcagaagcattgccggtctgaccttccttctcgggataacttggggattcgcctttttcgcctggggtccagttaacgttactttcatgtacttatttgcgatctttaatacccttcaagggtttttcattttcatcttttactgcgttgccaaagaaaatgtgcgcaagcagtggcggcggtacctgtgctgtggcaagttgcggctggctgagaacagcgactggagcaagaccgctactaacggactcaagaagcagaccgtcaaccagggcgtctcgagctcctccaacagtttacagagctcctcaaactccacaaattctactacactgctggttaataatgattgcagcgtccacgccagcgggaatggaaacgcctccactgagcgtaatggtgtgagcttctcagttcagaacggagatgtctgtttacatgattttacgggcaagcagcacatgttcaacgagaaagaggacagctgcaacggtaaggggcggatggcgttgaggcgcacctccaagcgcggctccctgcattttattgagcagatgtag

SEQ ID NO: 117890 - DNA, 2901 bp, synthetic construct
  misc_feature 1..2901: note = Description of Artificial Sequence: Synthetic coding sequence
  source 1..2901: mol_type = other DNA
atggttttcagcgttcgacaatgcggccacgtaggcagaaccgaggaggtgttacttacattcaagatcttcctcgtgatcatttgtctgcatgtcgtgctggtgacttcactggaagaagacacagacaattcatccctgtcccctccacccgcaaagctttcagtggtctcctttgcccctagttctaatggcacgccagaggttgagaccactagcttgaatgatgtcacgctgtcgctcctcccttctaatgaaacagaaaagacaaaaatcacaatcgtcaagacttttaacgctagcggggtgaagcctcagcggaacatctgcaacttgtcttccatttgcaacgactctgcgttctttaggggcgagatcatgtttcaatacgataaggagtccacagtgccgcagaatcagcatataaccaacgggaccctcactggcgtgttgtccctgagcgaactcaagcggtcggaactgaataagacactccaaacactgagcgaaacatactttatcatgtgcgccactgcggaggcacagtctaccctgaactgcacgttcaccatcaaattgaataacacaatgaatgcatgcgcggttatcgccgcgctggagagagtgaagatacgacctatggagcattgttgttgctccgtgcggatcccctgtccctccagtccagaggagctggagaagttgcagtgcgatcttcaagatcccattgtctgcctggccgatcacccaagaggcccccctttttccagttctcaaagcatccccgtggtgccaagagccacagtgctgagtcaggtgcctaaggccactagttttgcggagcctcccgattacagcccagtcacacataacgtgcccagcccaattggcgagatacagccactgagtccacagccctctgcccctattgcctcatcacccgctattgatatgccaccgcagtctgagaccatttcgtccccaatgccacagactcacgtcagtggcacacctccgcccgtgaaagcaagtttttccagcccaaccgtctcagcccccgccaacgttaacacaacgtctgcccctcccgtgcagactgacatcgtaaatacgtcctcaataagcgacctggaaaaccaagtcctacaaatggaaaaggcactctccctgggttcactcgaaccaaacttagccggagagatgatcaaccaggtatccaggttgctgcactcgccgccagatatgctcgcccctttggcacaacggcttctcaaagtggtggacgatattggattgcagcttaattttagtaatacaactatctcactcactagtccaagtctggcgcttgctgttatcagggttaacgcgtcttcgtttaacacgacaaccttcgtggcccaagatccagctaatctgcaggtatcactcgaaacccaagccccagaaaacagcatcgggaccattacactccctagctcactgatgaacaatttgcccgcacacgatatggaacttgccagtcgcgttcagttcaacttcttcgagacccctgcactgtttcaagatccatccttagaaaacctgagtctcatttcatacgtgatctcatcctcggttgctaatctgactgtgcgaaatttgacaaggaacgttacagtgactctcaaacatataaatccttcacaagacgaactgacagttcgatgtgttttctgggacctgggcagaaacggtggccgcggcggctggagcgataatggatgctccgtgaaggatcggcggctcaacgagacgatttgcacgtgctcccacctcacgtcttttggcgtacttctggatcttagccggactagcgtgctgcctgcccaaatgatggccctgacgttcataacatacattggctgcgggctgtcttctatttttttatcggtgactctggtcacatacattgctttcgaaaaaattaggagggattatccgtctaagattctgatccagttatgtgccgctctgctgctcctgaatctggtgttccttttagatagctggattgccctgtataagatgcaggggctgtgcatctctgtggcggtcttccttcactactttctgcttgtatccttcacctggatgggattagaggccttccatatgtatcttgcactggtcaaggtgtttaatacctacatcaggaagtatattctgaaattttgcattgtgggttggggagttccggccgtggtggtcaccatcatcctcacaatatcccccgataactatgggcttggttcctacggcaagttccctaatgggtcccctgatgacttctgttggattaataataacgccgtcttttatatcacggtggtgggctatttctgcgtcatttttctgctcaatgttagcatgttcatagtggttctcgtccaactgtgccgcatcaaaaagaaaaaacagttgggcgcccagaggaaaactagtattcaggatctgagatcaattgctgggctgactttcctactcggtataacatgggggttcgcctttttcgcttggggcccggtgaatgtgacattcatgtacctcttcgccatcttcaatactttgcaggggttctttatttttattttttattgcgttgctaaagagaatgtgcggaagcagtggcgacggtatctgtgctgcggcaagttaaggctggcagagaacagtgggaatgctagtactgaacgaaatggcgtctcatttagtgttcaaaatggagatgtctgtttacatgactttaccgggaaacagcatatgtttaatgagaaggaggacagctgcaacggtaagggccgaatggctcttcggagaacatccaaaaggggaagtctccatttcattgaacagatgtag

SEQ ID NO: 117891 - DNA, 2982 bp, synthetic construct
  misc_feature 1..2982: note = Description of Artificial Sequence: Synthetic coding sequence
  source 1..2982: mol_type = other DNA
atggtgttctcagttcgacagtgtggccacgtcggccggaccgaggaggtgctgttaacttttaaaatttttctggtaatcatatgcctccacgttgtcctcgtcacctccctggaggaagacactgataatagtagcctttcccccccaccagacgtgaccctgtctcttcttcccagcaacgaaactgaaaagactaaaattactattgttaagacatttaacgccagtggggtgaagccacaacggaacatctgtaacctaagctcaatatgtaacgactcagccttctttcggggcgaaataatgtttcagtatgataaagagtctacagtgccccagaatcagcatattaccaacggcacccttaccggagtgctgagcctgagcgagctgaaacgttctgagctgaataagacactccagaccctctccgagacctactttatcatgtgcgcaactgcggaggctcaaagcacactaaattgcacatttaccatcaaactcaacaacaccatgaacgcctgtgctgttattgccgctctcgagagagtgaagatcagaccaatggaacattgctgctgctcagtgcgcataccctgcccgtcttcacccgaggaactggaaaaactccagtgcgacttgcaggaccccatagtttgcctggcagaccacccacgcggtcctccattttcatccagccagtctattcctgtggtgcctagggcaaccgtcctcagtcaggtgcctaaggctacaagttttgccgagccccccgattattctcctgtgacgcacaacgtgcccagccccattggcgaaatacagccgttatcaccacaaccatccgccccaattgcttcctcaccagcgattgacatgccacctcaatccgaaaccatttcttccccaatgccccaaactcacgtgagcgggacaccaccccccgtcaaggctagcttctccagccccactgtttcagccccagccaacgtcaataccacttctgctccacctgtgcaaactgatattgtcaatacctcttcaatatcagacttggagaaccaggtgcttcaaatggagaaggcactctccctcggatcacttgagcccaatttggcgggcgaaatgataaatcaggtgagtaggctgctgcattcacccccggacatgctggctccccttgcccagcgcttattgaaggtcgtggacgacatcggattgcagctgaattttagcaacacgactatctctctcaccagcccatcgctagccctggcggttatcagggtgaacgcaagctccttcaacaccaccactttcgtcgctcaagatcccgccaacttgcaggtttctctggaaacccaggccccagaaaactccattggtaccattacactcccttcatccctgatgaacaacctacctgcccatgacatggagctggccagccgcgtgcagttcaactttttcgagactccagctctgttccaggaccctagccttgagaatctctccctgatcagttatgtaatcagttctagcgtggccaatctcactgtcagaaaccttacacgtaacgttacagtgaccctcaagcatatcaatccttctcaggacgaactgacagttcgatgcgtgttctgggacctgggcaggaatgggggacggggcggttggtccgataatggttgctccgtcaaggataggagacttaatgagacaatctgtacctgcagccacctgacaagcttcggcgtcctcctggatctctcccgcacctctgtgctacccgcacagatgatggccctgacattcataacctacattggctgcggcctgtccagtatcttcctgtccgtaactctggtgacctacatagcctttgaaaaaatccgtagggattatccatcaaaaatcctgatacagttgtgcgctgcactcctgctactgaatttggtatttcttctggactcttggatcgctctctataaaatgcagggtctatgcatcagcgtcgcagtgttcttgcattatttcctcctagtgtcttttacttggatgggcctagaggctttccacatgtatctggctctggtcaaagtgttcaatacctacattcggaagtacatcctcaagttctgtatcgttggttggggggttcccgcagtggtggtgactatcatcctgacgattagtcctgacaattacggactaggaagttatggaaagtttccaaatggcagccccgacgacttttgttggatcaacaataacgcagttttctacattaccgttgtaggctatttctgtgttatcttcttgcttaatgtgtccatgtttatagtcgttctggtacagctctgccgtattaagaagaaaaagcagttaggagcccagaggaagaccagtatccaagacctaagatctattgctggacttacatttttgcttggcattacctggggattcgcctttttcgcttggggcccagttaacgtgacctttatgtacttattcgccatctttaatactcttcagggattctttatcttcatcttttattgcgtcgctaaagagaacgtacgcaagcaatggagaaggtatctttgctgtggaaaactccgtctcgccgaaaatagcgactggtcgaagaccgcgacaaacgggttaaaaaagcagactgtcaatcagggagtgagctccagttccaactccttgcagtcctcctcaaattctaccaattctaccacactcctggtaaataatgactgttctgtccatgcaagcggaaatggcaacgcttctactgagaggaacggcgtgtccttcagcgtgcagaatggcgatgtctgcctgcacgattttacagggaaacagcatatgtttaacgagaaagaagacagttgtaacggaaagggcaggatggctttgcgacggacatctaagcgtggatctctgcacttcatagagcagatgtag

SEQ ID NO: 117892 - DNA, 3006 bp, synthetic construct
  misc_feature 1..3006: note = Description of Artificial Sequence: Synthetic coding sequence
  source 1..3006: mol_type = other DNA
atggtatttagcgttcgacagtgtggccatgtcggacgcacggaggaagttttgctgaccttcaagattttcttagtcattatatgcctccacgtcgtgttggtgacctcactcgaggaagacaccgacaactcatccttatcgccaccccctgaggtggagactacaagcctgaacgatgtgacgctctcactgttaccttctaacgagacggaaaagacgaagatcaccatcgtaaagacatttaacgcctctggcgtcaagccacagcggaatatctgcaaccttagcagtatttgtaatgacagtgctttttttaggggcgagattatgtttcagtacgataaagagagtaccgtccctcagaaccaacatattactaatgggaccctgacaggagtactgtctctctctgaattgaagcggtctgagctgaacaagactttacagactctgtcagaaacatacttcatcatgtgtgctaccgctgaagcccagtccacattaaactgcacttttacaataaagctaaataataccatgaatgcctgcgccgtaatcgccgccttggaacgggttaagattcgccctatggagcattgttgttgtagtgttcggattccctgtccatcctcccccgaggaattagaaaagctccagtgcgacttgcaggatcctatagtctgcctggcagaccaccctcgcggtccacccttctcttccagccagtcaataccagtcgttccgcgggcaacagtcctgtcccaggtgccaaaggctactagcttcgcggagcctcctgactacagcccagtaacccacaatgtcccatcccccattggcgaaatacagccactatctcctcaacccagcgcaccgatagcgagcagtcctgctatcgatatgcctccacaatcagaaaccatctcttctcctatgcctcaaacgcacgtgtccggcacaccaccacccgtgaaggccagcttctcctctccaactgtgagcgcccctgccaatgtgaataccacatcagcaccacctgtgcaaaccgacatcgtcaatacttctagcatcagcgatttggaaaatcaagtactacagatggaaaaggcgctgtctttgggcagcctggaacccaacctcgccggcgaaatgattaaccaggtgtctcggctcctccattcacctccagatatgctcgctcccttggcccaaaggttgcttaaagttgttgacgatatcggactgcagctaaatttctccaataccacaatttccttgacaagccccagcctcgccttggcggtgattcgcgttaacgccagtagcttcaacaccacaacatttgtggcccaggaccctgccaatctgcaagtctcattggaaacacaggcacctgagaattctatcgggactatcaccctccccagctcgctcatgaataatttgcccgctcacgacatggagctggcctctcgggtccagtttaatttttttgaaaccccggcactctttcaggaccccagccttgaaaacctgagtctgatctcatatgtcataagctcttctgtggccaatctgaccgtccggaatctgacaagaaatgttacagtgaccttaaaacatatcaatccctcacaggatgagctgacagttcgctgtgttttttgggaccttgggcggaacggggggagaggaggctggtcggacaatggctgttccgtgaaggaccggagactcaatgagactatctgcacttgctcccatctgacctccttcggagtgttactggatctgagcagaaccagtgtcttacctgcacagatgatggccctgacatttattacctatatcggctgtggcctctcctcgatcttcctgagcgttacactggtgacatacattgcgttcgaaaagattcggcgggattacccatcaaagatacttatccagctgtgtgctgctctgcttctgcttaatttggtcttcctgcttgacagctggatagcactttacaagatgcaggggctctgcatttctgtggccgtgtttctccactacttcctgctggtgtcattcacctggatggggctggaagctttccatatgtacctggcacttgtgaaggtgtttaacacatacatccggaaatatattctaaagttttgtatcgtcggttggggcgtgcctgcggtggtggtgacaatcattttgaccatctctcctgataattatggattggggtcctatggaaagttcccgaatgggtcacctgatgatttctgttggataaacaacaacgctgtgttctacatcacagttgtaggctatttctgtgtcatcttcctcctgaacgtatccatgttcattgtggtgctagtgcagttgtgccgcatcaagaagaaaaagcagctgggcgcacaacggaaaacttccattcaagatctccgctctatcgccggactgaccttcctgcttggcattacttggggttttgctttctttgcctggggcccggttaatgtaaccttcatgtacctctttgcgatatttaacacccttcagggtttttttatcttcattttttattgcgttgcaaaggagaatgtgcgcaaacagtggagaaggtatctctgttgcggcaagctccgcctggcagagaacagcgattggtctaagactgcaacgaacggtctcaagaagcagacagtcaatcagggcgtgtctagctcatcgaattcgctgcagtcttcatctaattcaacgaattctaccaccctgctggtaaataatgactgttccgtgcatgcttctgggaacggcaacgcctccactgagcgtaatggagttagcttttctgtgcagaatggcgatgtttgcctgcatgactttacaggaaaacagcatatgttcaacgagaaagaggatagctgtaatgggaagggtcgaatggcactcagacggacgtccaagcgcggctctctgcacttcattgagcaaatgtag

SEQ ID NO: 117893 - DNA, 354 bp, synthetic construct
  misc_feature 1..354: note = Description of Artificial Sequence: Synthetic coding sequence
  source 1..354: mol_type = other DNA
atcctgttaaccatgcaacacattaataccggaatcgatatgctgaatcaactgggatgtgtcttcttcgctggcgtcaaaccccagcgaaacatctgtaacctttccagcatttgcaacgatagtgccttcttccgaggcgagattatgtttcaatacgataaggagtcaactgtgccgcagaaccagcatatcaccaacggaacattaacaggtgtacttagcttgagcgaattaaaacgcagtgagctaaataaaacgcttcagaccctctctgaaacatatttcatcatgtgtgccacagcagaggcccaaagacacatcaagttgtacatccataataagaccgaatag

SEQ ID NO: 117894 - DNA, 1014 bp, synthetic construct
  misc_feature 1..1014: note = Description of Artificial Sequence: Synthetic coding sequence
  source 1..1014: mol_type = other DNA
atgaattccacatgtatcgaggaacagcacgacctggaccactacctgttcccgattgtctacatcttcgtaattatcgtctccatcccagcaaacattggatctttatgtgtctcttttctccaggctaaaaaagaaagcgaactaggaatttacctgttcagccttagcctgtctgaccttctgtacgcgctgacacttcctctttggattgattacacctggaataaggataactggactttttctcccgccctctgcaaaggcagtgcatttttaatgtatatgaatttttactcaagcaccgccttccttacgtgcattgcagtggaccgttatctagctgtcgtgtatcccctgaaattttttttccttcggaccaggagatttgcgctgatggtctcactttcaatttggatccttgaaactatcttcaatgcagtgatgctgtgggaggacgagaccgtggtcgagtactgcgatgctgaaaaatcaaacttcaccctctgttacgacaaataccccttggaaaagtggcagattaacctgaatctcttcaggacgtgcaccggttacgctatccccctggtcactatattaatttgtaacaggaaggtctatcaagctgttaggcataataaggccactgagaataaggaaaagaaacggattattaagctcttggtaagcataacagttacctttgttctttgctttacaccttttcacgtgatgctgctaataagatgcatcctggagcacgccgtaaacttcgaagaccatagtaatagcggcaagcgtacatatactatgtatcgcatcaccgtggcgctgacttccctcaactgcgtcgctgacccaattctctattgcttcgtgacagagacagggcgctatgatatgtggaacatcctgaagttctgtaccggcaggtgtaacacctcacagcggcaacgaaagagaatcttatccgtgagtacaaaggatacaatggaactggaggtgctcgagtag

SEQ ID NO: 117895 - DNA, 1623 bp, synthetic construct
  misc_feature 1..1623: note = Description of Artificial Sequence: Synthetic coding sequence
  source 1..1623: mol_type = other DNA
atgaattcaacgggccacctgcaggacgcacccaacgccacaagcctgcatgtgccacatagccaagagggaaacagtaccagccttcaggaaggcttgcaggatttgattcacaccgccacgctggtgacttgcacttttctgttagccgtcatattctgccttgggtcttacggaaatttcatcgtattcctttcattttttgatcccgccttcaggaaattccggaccaattttgatttcatgattttgaatttgagcttctgcgatctgtttatctgcggggtcactgcacctatgtttacatttgtgttgttttttagttccgcctcgtccattccagacgctttttgtttcactttccacctgacctcaagtggcttcattatcatgagcctgaaaacagtcgctgtaattgccctgcacagactgaggatggttcttgggaaacagccaaatcgaacagcttcttttccctgcacggtcttgctaactttgctcctgtgggccacaagtttcactcttgcgacgctggcaacgcttaaaaccagcaagtcacatctttgtctgcctatgtcaagcctcattgccggcaaaggtaaggctattctcagtttgtacgtggtggactttaccttttgtgtcgccgtcgtgtccgtcagttacatcatgattgcacaaaccctccggaagaatgcccaggtgcgtaagtgccccccagtcatcacggtggacgctagtcgccctcagccatttatgggcgtacccgtgcagggcgggggagatcctatccagtgtgccatgcccgccctgtaccggaatcaaaattataacaagctgcagcatgtgcagactcgggggtacacaaagagtcccaaccagctggtgacacctgccgcgtcaagattgcagttagttagcgctatcaacctctctacggcaaaagactcgaaggctgtcgtgacatgcgtcatcatagtgttgagcgtactggtctgctgtttaccactgggtatcagtcttgtacaggttgtgttaagttcaaacggctcttttatcctctaccagttcgaactctttgggttcaccttaatcttctttaaatccggactaaatccgtttatttattccaggaattccgctggcctccgcaggaaggtgttatggtgtctccagtacatcggcttgggcttcttctgttgtaaacagaagacgaggcttcgcgccatgggcaaagggaacctggaagtgaaccgtaacaagtcttcacaccacgaaactaactctgcttatatgctttccccaaaaccccaaaagaaatttgtggaccaggcgtgcggaccttcacacagtaaggagtccatggtatcccctaagattagcgccggtcaccagcattgtggacagagtagcagtacaccaatcaacaccaggatcgagccttattactctatctataattcatccccaagtcaggaggaaagttcgccttgcaatctccagcctgttaactccttcggcttcgcaaatagctatatagcaatgcattaccatacaacaaacgatctggtccaggagtatgacagcaccagcgctaaacaaattccagtacctagcgtctag

SEQ ID NO: 117896 - DNA, 1092 bp, synthetic construct
  misc_feature 1..1092: note = Description of Artificial Sequence: Synthetic coding sequence
  source 1..1092: mol_type = other DNA
atgggccctggggaagcactgttagcaggactactggtgatggtgctggctgttgcgttgctgagtaacgcccttgttctgctctgttgtgcatactctgctgagctgagaactagagcttccggggttttgcttgtgaatttgagtctcggacatctcctgctcgctgcattggatatgccattcacactgttaggggtcatgaggggaaggacccccagcgctcctggcgcctgtcaagtgataggatttttggacacattcctggcgagcaatgcagccctttccgtcgccgccctgtcagccgatcaatggctggccgtgggattcccactgcgctatgctgggcggttacgtcccaggtacgcagggctgctcctgggctgcgcgtggggtcagagcctggcattttcaggcgcggccctcggttgctcttggctcggttattctagcgcgttcgcgtcatgttcactccggctacctcctgaacctgagcggccccgctttgctgcattcacagcaactctgcacgctgtgggctttgtcttaccgctggccgtactctgcctgacctctttgcaggttcatagagtagcccgcaggcactgtcagagaatggacactgtgaccatgaaggccttagccctgttagccgacctgcatcccagtgtcagacagagatgcctgatccaacaaaaaagaagacggcaccgggccactcgcaagattggcatcgctattgccacttttctcatatgcttcgcgccatacgtgatgaccagattggcagaattggtgccattcgtgactgttaacgctcagtgggggatcctcagtaagtgtctgacctactcaaaagccgtagccgaccctttcacctactctttactccgccgacccttccgtcaagtgctggctggcatggtacatagactcctaaaaagaacaccacggccagcctccacgcacgattccagcttagacgtcgctggaatggtgcaccaactactgaagagaacgcctcgtcctgctagcacacacaatgggtcagtcgataccgagaacgattcttgcctgcagcaaacccattag

SEQ ID NO: 117897 - DNA, 1011 bp, synthetic construct
  misc_feature 1..1011: note = Description of Artificial Sequence: Synthetic coding sequence
  source 1..1011: mol_type = other DNA
atgaataataatacaacttgcatccagccctccatgatttctagtatggccctgcctataatctacattctgctgtgcatcgtgggcgtgttcgggaatactctcagtcagtggattttcctcacaaagattggcaaaaagacctcaactcatatctacctgtctcacttagtgacggcaaatctgttagtgtgctcagccatgcccttcatgtctatttacttcctgaaagggtttcagtgggaataccagagcgcccagtgccgggttgtcaacttcctaggaactctgtccatgcatgctagcatgtttgtctcactgcttatactctcatggatcgccatcagtcggtacgccaccctgatgcagaaggacagttcacaggaaacgacatcttgttatgaaaaaatattttatgggcatctgctgaaaaagttccggcagcctaacttcgccagaaaactctgtatatacatttggggtgtagtccttggaatcattatcccggtcaccgtgtattacagcgtgattgaagcgaccgaaggagaggagagtctctgctacaaccggcagatggagctgggagcgatgattagccagatagcggggcttatcggcacaacgtttatcgggttctccttcctcgtcgttttgaccagttactattccttcgtcagtcatctgaggaagatcagaacctgtaccagcattatggagaaggatctcacctacagttcagtcaagcgacatctgctagtgatccagatcctcctgatagtgtgctttctcccctatagcatctttaagccaatcttttacgtactgcaccagagggataattgtcagcagctaaactaccttatcgagaccaagaatattctgacctgcctggcctcagccaggagttcgaccgatcccattatctttctgctcctggacaaaacgtttaagaaaactctttataacttgtttacgaagtccaactcagcccatatgcaatcatatggttag

SEQ ID NO: 117898 - DNA, 1272 bp, synthetic construct
  misc_feature 1..1272: note = Description of Artificial Sequence: Synthetic coding sequence
  source 1..1272: mol_type = other DNA
atggtaccccatctgctgttactgtgtctgttgcctctggtcagagccaccgagccgcacgaaggaagagcagatgagcagtctgccgaggctgccctggcagtgcccaatgcttcccacttcttctcgtggaacaactacacattttctgattggcaaaacttcgtgggcaggaggcgctacggagccgagagccagaatccgaccgtgaaagcgctgttgatcgtcgcatattccttcattattgtgttttccctctttgggaacgtgctggtgtgtcacgtcatattcaaaaaccagcggatgcattcagcgacatctttatttatcgtgaatttggcggttgccgatattatgataactctgcttaacactccctttactctagttcggtttgttaacagcacttggatctttgggaaggggatgtgtcacgttagtcgctttgctcagtattgttcgctgcatgtttcggctctgaccctcacagccattgctgtggatcgtcaccaagtcatcatgcatcccctgaagccacgcatttcgataacaaagggcgtgatttacatcgctgttatctggactatggcaacctttttttctctgccccacgccatctgccagaagctttttacctttaagtactcagaggacatcgtgcggtcattatgcctccccgactttccagagccggctgatctcttctggaaatacctcgatctggccacattcatccttctttacattctacccctcctgatcataagtgtggcgtacgcacgagtagcgaagaagttgtggctctgtaacatgattggggatgtgactaccgaacaatacttcgctctgcggaggaagaaaaaaaagacaataaaaatgttgatgctggtcgtcgtgctctttgctctttgctggtttcctctgaattgctacgtcctgcttctttcatccaaagtgattcgtactaataacgctctttactttgcatttcattggttcgccatgagcagtacgtgctacaacccattcatctactgctggctgaacgaaaatttcaggatagaattaaaagcactgttatctatgtgccagagaccacctaagcctcaggaagatcgccccccatcaccagtgcctagctttcgggtggcttggaccgaaaagaatgacggccagcgagctcctctagcgaataatctgctgccgaccagtcaattacaaagcggtaaaactgacctctccagcgtcgagcccatcgtcactatgtcctag

SEQ ID NO: 117899 - DNA, 1191 bp, synthetic construct
  misc_feature 1..1191: note = Description of Artificial Sequence: Synthetic coding sequence
  source 1..1191: mol_type = other DNA
atgtggaattcatcggatgcaaacttctcctgctatcacgaatcagtgctaggctatcgctatgtggccgttagctggggagttgtggtcgccgtgaccggtacagtcggaaacgtgctcacattgctggctttagctattcaaccgaaactccggacccgctttaacttgctcattgcgaatctgaccctggcggacctgttgtactgtactctgttgcagccattttctgttgatacctacctgcacctccactggagaaccggagcaaccttttgcagggtctttggtctgctactgttcgcttctaacagtgtttctatcctgaccctctgtctcatcgccctgggacgctacctgctgatcgcacacccgaaactcttcccacaagtgttcagcgctaagggtattgtgctagccctggtgagcacctgggtggttggcgtagcgtcctttgctcccctgtggcctatatacattttggtcccggtggtgtgcacctgttcctttgatcgaatcaggggacgcccctacacaaccatcctcatgggcatttatttcgtgctgggtctgtcctctgttgggatcttttattgcctgattcaccgtcaggtgaaaagagctgcccaggcacttgaccagtataagctccgacaggccagcatccacagcaatcacgtggccaggactgacgaagccatgccagggcggtttcaagagctggactctcggcttgcttctggcggaccgtcagagggtatcagcagtgagccagtgagcgccgcaacgacgcagaccctggaaggagattcatcagaagtcggggaccagatcaatagcaagcgagccaaacaaatggcagagaagagcccccccgaggccagcgcgaaagctcagccaataaaaggggcgcgacgggcccctgactccagttcggagtttggtaaagtgacgcggatgtgtttcgccgtcttcctgtgctttgctctttcgtacatccctttcctgcttttgaacatcctcgacgccagagtgcaagccccgagagtggtgcacatgctcgcggccaacctcacctggttgaacggatgcatcaaccctgtcctttacgccgctatgaaccggcaattccgccaagcctatggtagtatcctgaagcgcgggccgagaagcttccatcgcctccactag

SEQ ID NO: 117900 - DNA, 1191 bp, synthetic construct
  misc_feature 1..1191: note = Description of Artificial Sequence: Synthetic coding sequence
  source 1..1191: mol_type = other DNA
atgtggaacagcagcgacgccaacttttcatgctatcacgaatcagtcctggggtatcggtacgtggcagtgtcctggggagtggtggtggctgtaactgggaccgtcggcaatgttctgacgctccttgcactcgcgattcaacccaaactcagaaccagatttaaccttctaatagctaatctcaccctggctgacctgctctattgtactctactgcagccattctcagtcgacacatacctgcatttacactggcgaactggggccactttttgcagggttttcggcctcctgctgttcgcaagcaacagcgtgagcatattaactctctgtctcatcgccttgggaaggtatttgcttatcgctcatcccaagctctttccgcaggtgtttagtgctaaaggaattgtcctggcgttggttagcacctgggtagttggcgtcgcgtcctttgctccactatggcccatctacatattagttccagtggtatgtacatgttctttcgaccgaattagggggaggccatacaccacaattctcatgggaatctatttcgtgctggggctgtcaagcgtcggaatcttctattgcttgattcatcgccaagttaaaagggcagcacaggccttagaccagtataaattgcgccaggcttcaatccactcaaatcatgtggcccgcaccgatgaggccatgccagggcggttccaggagctcgattcacgtctggccagcggcggtccaagtgagggaatcagctcagagccagtctcagccgccacgacccagaccctcgagggggattctagtgaagtgggggaccagatcaattccaagcgggccaaacaaatggccgaaaaatcccctcccgaagccagtgccaaagcccagcctatcaaaggggcacgaagagcccctgatagctcttccgaattcgggaaggtcactcggatgtgttttgcagtgtttctgtgtttcgcgctctcatatatcccattcctcctgctgaacatcctggacgcacgggtgcaggccccccgcgtcgttcatatgcttgcggcaaatttaacctggctgaacggatgcattaatccagttctgtacgctgccatgaatcggcagtttagacaagcatatggatccattctaaagagaggccctcgaagcttccacaggttgcactag

SEQ ID NO: 117901 - DNA, 1113 bp, synthetic construct
  misc_feature 1..1113: note = Description of Artificial Sequence: Synthetic coding sequence
  source 1..1113: mol_type = other DNA
atggctaattactcacacgccgctgacaacatactacaaaacctctcacctttaaccgctttcctcaagctgacatcactgggtttcatcatcggtgtgtccgtggtgggaaacctactgatatccatcctgctcgttaaggataagactctgcacagagccccttactactttcttctcgacctctgttgcagtgatattctgcgcagtgccatctgtttcccctttgtcttcaacagcgtgaagaatggcagcacctggacttacggaactcttacatgtaaggtaatcgcattccttggcgtgctctcctgcttccacactgcatttatgctgttttgtatctctgtaacaaggtacctggctatcgctcatcatcgcttttatacgaagagactcacattctggacttgtctcgctgtcatatgtatggtatggacgctctcagttgctatggcatttccccccgtgctggatgtgggcacatattctttcatcagggaggaagaccagtgtacttttcagcatcgatcattcagggccaatgacagcctcgggtttatgctattattggccctgatcctgttggcgactcagctggtctaccttaagctgatcttctttgtgcacgatcgcaggaagatgaagccagtgcagtttgtggccgcagtatcgcagaactggaccttccacggacctggagcctccggacaggcggcggcgaattggctggctggctttgggaggggcccaacgccaccaacactgttggggatccgacaaaatgctaatactactggcagacgtcgactcctcgtcttggatgagtttaagatggaaaaaaggatttctaggatgttttatattatgactttcctcttcctgacactttggggaccgtacctggtggcctgctactggcgggtgttcgcaaggggtccagtcgtacctgggggtttcctgacagcggccgtgtggatgagttttgcacaggcaggcattaacccctttgtgtgcatcttctctaaccgggaactgcgtcgatgtttttcaacaacactgctgtactgcagaaaaagtcggcttccacgggagccttactgtgtcatatag

SEQ ID NO: 117902 - DNA, 1113 bp, synthetic construct
  misc_feature 1..1113: note = Description of Artificial Sequence: Synthetic coding sequence
  source 1..1113: mol_type = other DNA
atggcaaattacagtcacgcagccgacaacattcttcagaatttgtctccactgaccgcattccttaaactaacttcactgggattcatcatcggggtgagtgtcgtcggaaacctcctcatctccatcctgttggtgaaagataagacccttcaccgggcaccttactactttctgttggacctctgttgttctgatatcctccgtagtgcgatatgcttcccgtttgtgttcaattcagtaaagaatggttcaacatggacttacggaactctgacatgcaaagtgatagcattcctgggtgtgctgtcatgtttccacacggcattcatgttgttctgtatctctgtcacacgatatctggccatcgctcaccaccgcttctacacaaaaaggttaacattttggacatgcttggctgtgatttgcatggtctggacgctgtctgtggcaatggcattccccccggtcctggatgtgggtacttactcttttatccgtgaagaggatcaatgtacctttcagcatcgatctttcagagctaatgatagtctgggattcatgctattgctcgctttaatcctgttagccacacaactggtatacctcaagttaatctttttcgtacacgaccggcgaaagatgaagcccgtccagtttgttgccgccgtctctcagaactggacattccacggaccgggggcatcagggcaggccgccgcaaattggctggccggtttcggacgaggcccgactccacccactctgctcgggatcagacaaaatgcaaacactactggtaggagacgcctgctggtcttagatgagtttaagatggaaaagagaattagtcgcatgttctacattatgactttcctgtttttgaccttatgggggccatatctggtggcctgttattggagagtctttgctcgcggccccgtcgtgccaggagggtttctgacagcagccgtgtggatgagctttgcgcaggcagggataaacccctttgtctgcattttttcaaatcgcgaactgcgcagatgtttcagcactacactgctgtattgtcgtaagtcgcggttacctagggagccatattgcgtgatttag

SEQ ID NO: 117903 - DNA, 216 bp, synthetic construct
  misc_feature 1..216: note = Description of Artificial Sequence: Synthetic coding sequence
  source 1..216: mol_type = other DNA
atggctaattacagtcacgccgctgacaacatcctccaaaacctctctccactcaccgcctttctgaagctgacatccctggggtttatcatcggcgtctccgttgtcggcaacctgctgatcagcatactgctcgtgaaagataagacattgcatcgagcaccttactactttctgctagacctgtgctgcagtgatatccttcgatccgcctag

SEQ ID NO: 117904 - DNA, 1113 bp, synthetic construct
  misc_feature 1..1113: note = Description of Artificial Sequence: Synthetic coding sequence
  source 1..1113: mol_type = other DNA
atggccaactattcccacgccgccgataatattcttcagaacctcagccccctcactgccttccttaaactcacttctttgggattcatcatcggggtcagtgtggtgggtaatttgctgatttctatcctactcgtaaaggacaagacccttcaccgcgcaccttattacttcctgttggacctgtgttgcagtgatatccttcggtctgccatttgctttccttttgtctttaatagtgtgaagaatggctctacttggacatatgggacgctaacttgtaaagtgatagcctttttgggggtgctttcgtgctttcatacagcgtttatgctcttttgcataagcgtcacacgttacttagcaattgcacatcaccggttctacactaaacggcttaccttctggacttgcctggctgtgatctgcatggtttggacgctgtctgtggctatggcttttccccctgtgctggacgtaggcacttacagctttatcagggaggaagaccaatgtacattccaacatcgtagcttccgggccaacgacagcttgggtttcatgctgctgctggctctcatcctgctggcgacccaactagtgtacttgaagttgatctttttcgtgcacgatcgacggaaaatgaagcctgtccagttcgtcgccgccgtgtctcagaactggacatttcacgggcctggcgcctctggacaggccgctgccaattggctcgcgggcttcggaagaggccccacaccaccgacgctactgggaatccggcagaatgcaaacaccacaggtcgcaggaggttgctggtgcttgacgagtttaagatggagaagcgtatttctcgcatgttttacataatgacattcctctttttaaccctctgggggccttatctcgtcgcctgctactggcgtgtgtttgccaggggtccggtggttcctggaggattcttgaccgctgctgtgtggatgtccttcgcacaggccggtatcaaccctttcgtctgcatattcagtaatagggagctacggaggtgcttctcaaccactttactctattgtagaaagagtcgattaccacgcgaaccatattgcgtgatatag

SEQ ID NO: 117905 - DNA, 366 bp, synthetic construct
  misc_feature 1..366: note = Description of Artificial Sequence: Synthetic coding sequence
  source 1..366: mol_type = other DNA
atggcaaattactcacatgctgcagataacatactccagaatcttagtccactgaccgctttcttaaaacttacctctctcggcttcatcattggagtcagtgtagtgggtaatcttctaattagcattttattggtgaaggacaagacactccatcgggcgccttactactttcttttagatttgtgctgctccgacatactacgcagcgccatctgctttccttttgtctttaattccgtgaaaaatggtagtacatggacctacgggaccctcacttgtaaagttatcgccttcctgggcgtgctttcgtgctttcacaccgcttttatgctgttttgtattagcgtaaccaggtatctgtag

SEQ ID NO: 117906 - DNA, 1113 bp, synthetic construct
  misc_feature 1..1113: note = Description of Artificial Sequence: Synthetic coding sequence
  source 1..1113: mol_type = other DNA
atggcaaactattcgcacgccgcggataacattcttcaaaatctgagccccctgactgcattcctgaaactgacctccttaggcttcatcatcggagtgtctgtcgtggggaaccttctcattagtattctgctcgtgaaggataaaactctgcatcgggcaccatattatttcttgctagatctgtgctgcagtgacatacttcgcagcgcgatctgttttccattcgtatttaatagtgtgaagaatggttcaacatggacctacggaacattgacatgcaaggttatcgcctttctgggggtgctaagctgcttccacaccgcttttatgcttttctgcattagcgtgacgcggtacctcgccattgcacaccatcggttttatacaaagcgtctgaccttctggacatgtctcgccgttatctgcatggtgtggaccctgagcgtagctatggcctttccaccagtcctggacgtgggcacctactccttcattagagaggaggaccagtgtaccttccagcataggagttttagagcgaacgattctctggggttcatgctgctgctggctcttatactgctcgccacacagctcgtctacttgaagctaatattcttcgtccacgacagacggaaaatgaaaccagtccaattcgtagctgcggtgtcacaaaactggacttttcatggcccaggcgcttcagggcaggctgctgctaactggctggctgggtttggtcgcggtcccacaccgcctaccctgctggggatcaggcagaacgctaatacaacaggccggcgacgactgcttgtccttgatgagttcaaaatggaaaaacggatttcccgcatgttctacatcatgacctttctttttctgaccctgtggggcccttatctcgtcgcctgttattggcgggtgtttgccaggggtcccgtcgtgcctggcggcttcctgactgccgccgtgtggatgtcgtttgcacaggccggaattaacccctttgtgtgcattttttccaatcgtgaactgaggagatgcttctccactacactcttgtattgccgcaagtctcggctgccccgcgaaccgtattgtgtgatctag

SEQ ID NO: 117907 - DNA, 1077 bp, synthetic construct
  misc_feature 1..1077: note = Description of Artificial Sequence: Synthetic coding sequence
  source 1..1077: mol_type = other DNA
atgggctttaacctcacacttgctaaactcccgaataatgaactccacggccaagagagccacaactccgggaatcggtccgacggccccggcaagaataccacactccacaatgagttcgacactatcgttctgcctgttctgtacctcattatttttgttgcatctattctcttgaacggcctggcagtgtggatcttcttccacatccggaataagacatcttttattttttatttaaaaaacatagtggtagcagatcttataatgacgctcaccttccctttccgtatcgtgcatgatgccgggttcggaccatggtactttaagttcatcctgtgtcggtacacctcagtgctgttttacgctaacatgtacacaagcatagtcttcctcggattgatctcgattgataggtaccttaaagtggtcaaacctttcggagattccaggatgtactctatcacgtttactaaggtcctgagcgtctgtgtctgggttatcatggctgtccttagcctacccaacattattctcactaatggccagccaacagaggataatatccacgactgctccaagctgaaatcacctttaggcgtgaagtggcacacagctgtgacttacgtgaactcttgcctgtttgtggccgttcttgtgatccttatcggatgttacatcgccatttctcgctatatacacaaaagtagtaggcagttcatatcacagtcttcccggaagcggaaacacaaccagagcatccgcgtggtggttgcggtgttctttacttgctttctgccataccacctgtgcagaattccttttacattttctcacctggaccgactcctcgacgagtcagcccagaagattctttactactgtaaagagattactttatttctgtcagcgtgcaatgtatgcctggatccaatcatctatttcttcatgtgtcgctccttcagtcgaagactgttcaagaagagcaatatacgcacacgctctgagagcatccgaagcttgcagtccgtgaggagatctgaggtacggatatactacgactacaccgacgtgtag

SEQ ID NO: 117908 - DNA, 1368 bp, synthetic construct
  misc_feature 1..1368: note = Description of Artificial Sequence: Synthetic coding sequence
  source 1..1368: mol_type = other DNA
atgtcctttcttatcgattcatcgattatgatcaccagtcaaatattatttttcggatttggttggctctttttcatgcgccagctgtttaaggattacgaaatccgtcaatacgtcgtccaggtgatcttcagcgttacgttcgccttctcttgtaccatgttcgaactcattatctttgaaatactgggcgtgttgaattcgagcagccgctacttccattggaagatgaacctttgtgtcattctgctgatcctggtctttatggtacccttttacatcgggtacttcattgtctccaatattcgcctcctccataagcaacggctactgttttcctgtcttctgtggttgacctttatgtactttttttggaaactgggagacccgttccccattttaagccctaagcatggtattctctctatagagcagctcattagcagggtgggagtgataggagtgacccttatggctctcctgtctggatttggagcagtcaactgtccttatacctatatgagctacttccttcggaacgttacagatacggatatcctggccctcgaacgcagactgttgcagacaatggatatgatcatttcaaaaaagaagagaatggcgatggcaagaaggactatgttccagaagggcgaggttcataacaagccttctggattctgggggatgatcaagagcgtgacaacttctgcttcaggcagcgagaatctgacactgattcagcaagaggtggatgccttagaggagctctctaggcagctgtttctggagactgctgacctatatgcaacaaaggagcggattgagtattccaaaaccttcaaagggaagtactttaacttcttaggctattttttcagtatctattgtgtgtggaagatctttatggctaccatcaacatagtctttgaccgcgtgggcaagacagaccctgttaccaggggtattgagatcactgtgaattatctcggaatacagttcgatgtgaagttttggtcacagcacatttccttcatccttgtcggcattatcatcgtaacatccattagggggctactgatcaccctgacgaagttcttctatgccatttccagcagcaagtcatcaaacgttatcgttttactgctagctcagattatgggaatgtatttcgttagctctgtcctgctgataagaatgagtatgcctcttgagtaccggacaataataactgaggtcttgggtgagctgcagttcaacttttaccacagatggttcgacgtgatattcctggtatccgcattgagctctatcctgtttctgtatctggcacacaagcaggctcctgaaaagcagatggccccctag

SEQ ID NO: 117909 - DNA, 1008 bp, synthetic construct
  misc_feature 1..1008: note = Description of Artificial Sequence: Synthetic coding sequence
  source 1..1008: mol_type = other DNA
atgtacttcttttggaagctgggagatccatttccaattctgagcccaaagcacggtattctctctatagaacagttgatctccagggtgggagttatcggggttacactgatggccctgctatccggctttggggccgtgaactgcccctacacttatatgtcatattttcttcggaatgtcactgacactgacattctagctctggagcgtcggcttcttcagacaatggacatgatcatatccaaaaagaaacggatggccatggcaaggcggacaatgtttcagaagggtgaagtacacaacaagccctccggtttctggggaatgatcaaaagtgttacaacctctgcttctgggtccgagaacctgactctgattcagcaggaggttgacgccctcgaagaattgtctcgacagttgtttctcgaaacagctgacctttatgctacaaaagaacgaatcgagtattcaaaaacctttaagggcaagtattttaacttcttgggctacttcttctccatttactgtgtgtggaagattttcatggctaccattaacattgtgtttgatcgcgtgggaaagacagaccctgttactagaggaattgagattaccgtgaactatcttggtatccaatttgacgttaaattctggagccagcacatcagcttcatcctggtggggattattatcgtcacttcgattcgcgggctcctaatcacacttaccaaatttttttacgcaatctccagcagcaagtcctcaaatgtaattgttctgctcctggcgcagattatgggaatgtatttcgtgtcctcggtcttactcatccgtatgtctatgccacttgaatatcgcacaattattactgaggtgctgggcgagctgcagttcaatttctatcaccgatggttcgacgtgatctttctggtgtcagctctgtcttctatcctgtttctttatctggctcataagcaggcccctgagaaacaaatggccccctag

SEQ ID NO: 117910 - DNA, 1368 bp, synthetic construct
  misc_feature 1..1368: note = Description of Artificial Sequence: Synthetic coding sequence
  source 1..1368: mol_type = other DNA
atgagttttctcatcgattcctctatcatgattactagccagatcctctttttcggctttgggtggttgttctttatgcgtcaactcttcaaggactacgagattaggcagtacgtagtacaggtaatcttcagcgtcacctttgccttttcctgtactatgttcgagctgattatttttgaaatcctcggcgtgctcaattccagctcccggtactttcactggaaaatgaacctctgtgtgatcctcctgattctagtttttatggtgcctttttatattggctatttcatagtctcaaatatccgcttgctacacaagcagcggctcctcttcagctgtctgctatggttgacttttatgtactttttttggaagttaggagacccgtttcccattttatcaccaaagcacgggattctctcaattgaacagcttatctcacgagtgggagttattggggttacactgatggctctgctgtccggcttcggagccgttaactgtccttatacctatatgagctacttcttgcgtaatgtgactgacacagatattctagccctcgagcggcgattgctgcaaacaatggacatgattattagcaagaaaaaacgtatggccatggccaggaggaccatgttccagaagggtgaagtacacaacaaaccttcaggcttttggggcatgattaagagcgtcacaacatcagcctcgggaagcgaaaacctgacactgatccaacaggaagtagacgctctcgaggagctcagccgtcaactgtttctcgaaacagccgatctctacgctactaaagaaagaatcgaatacagcaagactttcaaagggaagtactttaattttcttgggtatttcttctccatctactgtgtgtggaagatcttcatggcaacaattaacatcgtgttcgaccgggttgggaaaacagatccagttactcggggaatcgaaattacagtcaattacctgggcatccagtttgatgtcaaattttggtcccaacatattagcttcatcttggtcggcatcattatcgtgactagcattcgcggcttgttaatcactttgacgaaattcttctatgcaattagctcaagcaagagctctaatgtcatcgtgcttctgctggcacaaattatgggaatgtatttcgtatctagcgtactccttatccgcatgagtatgcccttagagtacaggaccatcattaccgaagtgcttggcgagctgcagttcaacttttatcataggtggtttgacgtcattttcctggtctctgccctgtcgagtatcctctttctctacctggcccacaaacaggcccccgagaagcagatggccccgtag

SEQ ID NO: 117911 - DNA, 18921 bp, synthetic construct
  misc_feature 1..18921: note = Description of Artificial Sequence: Synthetic coding sequence
  source 1..18921: mol_type = other DNA
atggatatcttcctggtgttggggatgcccagtgcatcactcttagtgaacctgctttcggccctgctgatccttttcgtgttcggggaaaccgaaatccgattcacaggccagacagagttcgtggtaaacgagacatccactactgtgattcgcttaattatagaaagaatcggggaacccgcaaacgtaactgccatcgtgtcgctgtatggggaagacgccggagatttttttgatacatatgccgcagcctttatccctgcaggggagaccaataggactgtctacatagccgtttgtgatgacgatttacccgaaccagacgagacctttatctttcacctgacactgcagaagccgtctgcgaatgtcaaactggggtggccccggacagtgacagtaactatcctctccaacgataacgcctttggaatcatctctttcaacatgctgccatctatcgctgtgtccgagcccaaggggagaaacgagtctatgcccttgacacttatacgagagaaaggtacatacgggatggtcatggtgactttcgaggtggagggcggacctaatccaccagacgaagatctgtcccctgtgaagggaaacataacctttccaccaggcagagctacagtcatatataacttaactgtcttagatgatgaagtgcctgaaaatgacgagatcttcttgatacagctcaagagcgttgaaggcggtgccgagatcaacaccagccgtaacagcattgaaatcatcatcaagaaaaacgattcgccagtgcgattcctacagtctatatatctcgtgcccgaagaggatcacatactgattatccctgtggttcgcggaaaggataataatggaaacttaattggatcagacgaatatgaagtgagcattagctacgccgtgactaccggcaattctactgcccatgcccagcagaacctggacttcatcgaccttcaacctaataccactgttgtgttccctccattcatccatgaatcccatctgaagtttcagatcgttgacgacacaattccggaaattgctgaatcatttcatataatgttgctgaaagatactctgcaaggcgatgccgtgttgatcagtccgtcagtggttcaggtgacaataaagccgaatgacaaaccatacggtgtgctctcttttaatagcgtgctttttgagcgcactgtcatcattgacgaagaccgcattagccgttatgaggaaataacagtggtacggaatggtggcacccacgggaacgtttccgcaaactgggtgttgacgcgaaattcaaccgacccgtcacctgtgacggcagacattcgcccatcctctggggtgctgcactttgcccagggacagatgttggcaaccattcccctcactgtcgtggatgacgaccttcctgaggaggccgaagcataccttttacagatcctgccacataccatccgcggaggggctgaagtgtccgaaccggccgagctgctgttctatatccaggatagtgacgatgtttacggactcataaccttttttcccatggagaaccagaagatcgagagttcacctggggagaggtacttatctttgtccttcaccagactcggaggtactaagggtgacgtaaggctgctctattccgttttatacattcccgcaggagctgtggatccccttcaggctaaggagggtatcctgaacataagtagaagaaatgatctgatctttccagagcagaagacgcaggtcacgaccaagctgcctattcgcaatgatgccttcctccagaacggagcccacttcttagtgcagcttgagactgtcgaactgctgaacatcatcccgctcatccctcccatctctcccagattcggcgaaatctgtaacattagcttactagtcacgcccgctatcgccaatggagagatcgggtttttaagcaacctgcccattatcctgcatgaacctgaagattttgccgccgaggtagtgtatatacctcttcaccgcgacggaacggacggccaggcaacagtgtactggagtctgaagccatctggcttcaactctaaagccgtgacaccggacgatatcggaccctttaatggctctgtgctcttcctctccgggcagtctgacactaccataaacattaccatcaagggcgacgacattccagaaatgaacgagactgtgaccctctcattggaccgagtgaatgtcgagaatcaggttctcaagagtgggtatacatctagggatctaatcattttagagaatgatgacccaggcggagtgttcgagttttcacctgcctctcgcggtccttacgtgataaaggagggggagtcggtggagctgcacattatccgatctagagggagcctggttaaacaatttctgcactacagggtcgaacccagagattcaaatgagttttacggaaatactggtgtactcgagtttaagcctggggagagagaaatagtaatcacactactggcccgcctcgacggaattcccgaactggacgagcactattgggtcgttctttcatcacatggggagcgggagagtaaactcgggtctgcgaccattgtgaacatcacaatactcaagaacgatgatccgcacggcatcatcgagtttgtgtcagacgggttgatagtgatgattaatgaatccaaaggtgacgccatctatagcgcagtatacgatgttgtccggaaccggggtaatttcggagacgtgagcgtatcatgggttgtgagtcctgacttcactcaggatgtgtttcccgtgcagggaactgtggtgttcggagatcaggaattctccaaaaatattactatctattccttgcctgacgagatccctgaggagatggaagaatttacggtcattctcctgaatggaacaggaggcgctaaggtgggcaaccggactacagccacccttcggatccgacggaacgacgaccccatctatttcgccgaacctcgggtcgtgcgcgtgcaggaaggcgagactgccaacttcacagtgttgaggaacggcagtgtggatgtcacctgtatggttcagtacgcaacaaaagacggcaaggccactgccagagaaagggatttcatacctgtggagaagggcgagacactcatcttcgaagttggaagtagacaacaaagcatctccatcttcgttaatgaagatggtattcctgagaccgacgaacccttctacatcatcctgctaaatagcaccggggacaccgtggtctaccagtacggtgttgccaccgttattatcgaggcaaacgacgatcccaatggcatattttcactcgagccaattgataaagccgtggaggaagggaaaacgaatgctttctggatactccgccaccgggggtattttggctccgttagcgtgagttggcagctatttcagaacgactccgctctgcagcctggacaggagttttacgagacctccggcaccgttaattttatggacggcgaggaagcaaagcctatcatactgcacgcttttccggataaaattcccgaattcaatgagttttactttttgaagcttgtgaatatctcaggcggctctcctggacccgggggacagctcgctgagaccaatctccaggtgacggtcatggtccccttcaatgacgacccttttggcgttttcattcttgaccctgagtgcctcgagagggaggtggctgaagatgtgctgagcgaggacgacatgtcatatatcacaaacttcacaatcctgcggcagcagggcgtgttcggcgacgtgcagctggggtgggaaattcttagctcagaatttcctgcaggcttgcctcctatgattgacttccttctagtgggaatcttccctaccaccgtccatctgcaacagcacatgaggagacaccatagcggcaccgacgcactttactttaccggtcttgagggggctttcggcacagtaaatccaaaatatcacccatcacgcaacaataccattgccaattttaccttttcggcatgggtgatgccaaatgccaataccaatgggtttattattgccaaagacgacggcaacggatctatttactacggcgtcaagatccaaacgaacgaaagtcacgtgactttgtccctgcattacaagacactaggctccaacgccacttacatcgccaaaactacagtcatgaagtacttggaagaatccgtttggctgcatttactgattatcctggaggatggaataattgagttctacctggacggtaatgctatgcccagggggataaaatctttgaaaggcgaagcaattacagacggcccgggaatcctgcgcattggcgctggtatcaacggcaacgacaggttcacaggtttgatgcaggacgtgagatcctatgagcgtaagctcaccctggaggagatatatgagttacatgccatgccagctaagagcgacctccatcctataagtggatatctggaattcaggcagggggagacgaataagtccttcattatttctgccagggacgataacgacgaggaaggggaagagctgttcattttaaagttagtctcagtttacggaggagctcgcatctcggaagaaaacacaaccgcccggctaaccattcaaaagtccgacaacgctaacgggctgttcggcttcaccggcgcttgcatccccgagatcgccgaagagggctcaaccataagctgcgttgtcgagaggactaggggcgctctcgactacgtgcatgtgttctataccatcagtcagatagagacggacggaattaattacttggtcgatgactttgctaacgcttcggggacaattacctttctcccttggcaacggtcagaagtgctgaatatctacgtcctggatgatgatatcccggagctcaacgagtatttccgagtaaccttagtgagtgctatccctggcgacggaaagctgggttctaccccaacctccggagccagcatagaccccgaaaaggagactacggatattacaatcaaagccagcgatcatccatacggcttgctgcagttctccaccggcctgccaccgcaaccgaaggacgccatgacactgcccgcatcctcagtgccccatatcacagtagaagaggaggacggggagatcagactcctagtgatccgcgcccagggactgttgggcagagtgacggctgagtttagaaccgtttcactgacagcgttttcccccgaagactatcaaaacgtggcaggcacactggaatttcaaccaggggagcgctataagtacatatttatcaacatcaccgacaattccatcccagaactggaaaagtcattcaaggtcgagctccttaacctcgaaggtggtgtagcggagctctttagggttgacggatcaggttctggagatggggacatggagttcttcttacccactatccataaacgggccagcctcggagtggcttcccaaatcttagtgacaatcgcagcctccgaccacgcccacggggtgtttgagttttctccagagtctttgtttgtctccggtactgaacccgaggacggctattccactgtgaccttgaatgttataagacaccacgggaccctgtcccctgtcacgctccactggaatatcgactctgacccagacggcgaccttgcattcacttctggcaacatcactttcgaaatcgggcagacatccgcgaatataactgtcgaaatcctgcccgatgaagatcctgagctagataaagcattctcagtctcagtgttgagcgtctcaagtgggtctttgggagcccacatcaacgcaacactgacagtgcttgcttctgatgatccctacggaatttttatcttctctgagaaaaacagaccagttaaagttgaagaggctacgcaaaatattacactgtccatcataagattaaagggcttaatgggcaaagtgcttgtgagctacgcaactctagacgacatggaaaaacctccctactttcccccaaatctcgccagagcaacccagggtcgcgactacattccggcatcaggcttcgccctatttggagcaaatcagtccgaagcgacaattgcgatctctatcttggacgacgatgagccagaaagatcagagagtgtgtttatcgagctgctaaattcgactctggtggccaaggtgcagtctcgatccattcccaacagtccaaggttaggccctaaagtggagacaatcgcacaacttattatcattgccaatgatgatgcctttggcacgcttcagctgagcgcccccatcgtgagagtcgccgagaaccacgtgggccctatcatcaacgttacacgcactggcggagcattcgcagacgtgtcagtgaagttcaaggcagtccctattactgcaattgctggggaggattactctatagccagttctgatgttgttctgctggaaggggagacttcaaaagctgttccaatctacgtcatcaatgacatataccccgagttggaggagtccttcttggtgcaattaatgaatgaaaccactggaggagccagactcggggcgcttactgaggctgtcattatcattgaggcttcagacgatccctatggactattcgggtttcagattactaaacttatcgtagaggagcccgaatttaacagcgttaaggtgaatcttcctattatcagaaactctgggacgctgggaaacgttactgtgcagtgggtggccacaatcaatggacaacttgctaccggggacttaagagtcgtgtcgggtaacgtaaccttcgccccaggagagaccatccaaaccttgctgcttgaagtactggcagatgacgtgccagagatcgaggaggtcatccaggttcagctgacagacgcctccggaggcggaactatcggactggatagaatcgccaacatcattatccctgcaaatgacgatccctacgggaccgtggccttcgcccagatggtgtacagggttcaagagccattggaacgatctagctgtgctaatattacggtgagacggtcagggggtcattttggcaggctgctgctcttctactccaccagtgacatcgacgtcgtcgctctcgctatggaggagggacaagatctcctgtcatactatgagtctccaatacaaggcgtacccgacccattgtggcgtacttggatgaacgtttctgccgtcggcgagcccctgtatacatgtgcaacgctgtgtctcaaggagcaggcctgttcggccttcagctttttttctgcttctgaggggccgcagtgcttctggatgacatcctggatttcaccagcagtaaacaactctgatttctggacatatcgtaagaatatgacacgcgtcgccagtttattctcggggcaggctgtcgccggttcagattatgaacctgtgaccagacagtgggcgatcatgcaggagggcgatgaatttgctaacttgactgttagtattttgccagacgacttccccgaaatggacgagagctttttgatttccctgctggaagtgcacctgatgaatatctccgcctcacttaaaaatcagccaacgatcgggcagcccaacatttccactgtggtcatcgctctgaacggcgacgcattcggggtgtttgtgatttacaatattagcccaaatacctctgaagacggactgtttgttgaagtgcaggagcagccacagactcttgtagagttgatgatacacaggaccggcggctccctgggccaggttgcagttgagtggagagtggtgggtggcacagctaccgaaggactggattttatcggtgctggcgaaatcctcacttttgctgaaggcgagacaaaaaaaacagtaattctaaccattctggatgatagtgagcccgaagacgatgagtctatcattgtatcactcgtctatacagaaggaggatctcgtatcttaccatcgtctgacacggtgcgtgtgaatattctggccaacgacaatgtggccggcatcgtgagctttcaaacagcctctcgctccgtgatcggacatgaaggtgagatactgcaatttcacgtgatcagaacctttcctggaagaggcaacgtaactgtcaattggaagattattgggcagaatctggaattgaatttcgcaaactttagtggccagctcttctttcctgaaggctccctcaacactacgctatttgtccatctattggatgacaacattcctgaagaaaaagaggtctaccaggtcatactgtacgatgtccggacgcagggcgtgccccctgctgggatcgctctgctagacgcccagggatacgcagcagtattgactgtggaagcaagcgacgaaccccatggagtgttgaattttgccctttcaagtaggttcgtcttgcttcaggaagccaacattacgattcagttattcattaatcgggaatttggctctttaggagcaatcaatgtcacatacactaccgtgcctggtatgctgtcactgaaaaatcagactgtcggtaacctcgcagagcccgaggtggacttcgtcccaatcatcggatttctgatactggaggagggtgagaccgctgccgcgatcaacatcacaattctcgaggatgacgtgccagagctggaagaatattttctcgtcaacctcacgtatgtgggcctgacaatggccgccagtaccagcttcccccccagactcgatagtgagggactgacagcccaagtgatcattgacgccaacgacggggcgcgcggcgttatagaatggcaacagtctcggttcgaggttaatgagactcacggatcactgaccctggtcgctcagagaagtcgagagccactgggccatgtcagcctgtttgtgtacgctcagaatttagaagcccaggtaggactcgattatatttttacgcccatgatccttcattttgctgacggagaacggtacaagaacgtgaacataatgattcttgatgatgatattccagaaggtgacgagaaattccagctcatccttaccaacccgtccccaggcctggaactggggaagaacactatcgccctgatcattgtgctggcaaacgatgatggaccaggagtgctcagcttcaacaattccgagcacttttttcttagagagcctaccgctttgtatgtccaggaatctgttgctgtgttgtatattgtcagggagcccgctcagggactcttcggaactgttacggtgcagtttatcgtcaccgaggttaactcttcaaatgagagcaaagacttgactccatcaaaaggctatatcgtgttagaggaaggggtgaggttcaaagcattgcagatcagcgctattctggacacagaacccgagatggacgagtattttgtctgcaccttgttcaatccaactgggggggccaggcttggcgtccacgtacaaaccctgataacagttctgcaaaatcaggcaccgctgggtctctttagtattagcgcagtggaaaacagagcgacatcaatagacatcgaggaagcaaataggaccgtttatctgaatgtcagcaggacaaatggaattgaccttgcagtatccgtgcagtgggaaactgtgtccgagacagcgtttggcatgcgaggaatggacgtcgtgtttagtgtgtttcaatccttcttagatgagtctgcttcgggctggtgcttctttacacttgaaaacctcatctacggcatcatgctacgcaaatccagtgtgactgtgtatcgctggcaaggaatctttatccccgttgaggacctgaatatcgagaaccctaaaacgtgcgaagcttttaatattggttttagtccatacttcgttattactcacgaagagagaaacgaggaaaaaccttcccttaacagcgtgtttacctttacctctggtttcaaactgttcctggtgcagactatcattatccttgaaagctctcaggtacggtactttactagtgactcacaggattatctgatcattgcctcccagcgggatgactccgaactgacacaggtatttcgatggaacggaggaagctttgttttgcatcagaaactccccgttaggggagtcctaacagtagccctgttcaacaaaggcggatctgtattccttgccatatcacaagccaatgcacggcttaattctcttctgtttaggtggtctggatcgggctttattaatttccaagaagtgccagtgtccggaactaccgaggtggaagccctgagctcagctaacgacatttatctaatcttcgccgagaacgtgttcctgggcgatcagaatagtattgatatctttatatgggaaatgggccagtcctcattccgttacttccagtcggttgatttcgctgcagtcaataggatccactcattcacacccgccagtgggatcgctcacatcctgctcatcggtcaagatatgagcgccctatactgttggaattcagaaagaaaccagttttcgttcgtgctggaagtccctagtgcttacgatgtagcatctgttaccgtcaagtcgctgaattcctccaagaacctgattgccctcgtgggcgctcattctcacatttacgaactcgcgtatattagtagccatagcgacttcatccccagttccggagaacttattttcgaaccaggggagagggaggccactatcgccgtgaatatcctcgatgatacggtgcctgagaaggaagagagttttaaggtacagcttaaaaacccgaaggggggtgccgagatagggattaacgacagtgtgacaattaccattctgagtaacgacgatgcatacgggatcgtggctttcgcacaaaatagtctttataagcaggtggaggagatggaacaggattcactcgttaccctgaatgttgaaagactgaaaggcacgtacggacggatcactattgcctgggaggcggatggatcaatctccgatattttcccaacatcaggagtgattctgttcaccgagggtcaggtgttatccaccataacgctgacgatcctggcagacaacattcctgagctgtcagaggtggttatagttaccctcactcggatcaccaccgaaggggtggaagattcctacaaaggtgccactattgaccaagaccgctccaagtcagtcataacaacactgccgaacgacagtccattcggacttgttggctggcgagcagcgagtgtgtttattcgcgtggcagaaccgaaggaaaataccacaactctccagttgcaaattgctagagacaaaggactcctcggcgacattgccatccacttaagggctcaacccaattttctgctccacgtcgataaccaggcgacagagaacgaggattacgtgctacaggagactattattatcatgaaggaaaacattaaggaagcacatgccgaggtgtcaattctgcccgatgacttgccagagctggaggaaggcttcatcgtaactatcaccgaggtgaatctggtaaacagcgatttcagcacggggcagccttctgttcggcgccctggcatggagattgctgagattatgattgaagaaaatgacgatcctcgcggaatttttatgttccacgtaacgcggggggccggagaggtcattacagcctatgaagttcctcccccccttaatgtgctccaggttcctgttgtacgcctcgccggatcatttggcgccgtgaatgtctactggaaggcaagccctgactcagccggtctggaagacttcaagccatcacacgggattctggagttcgccgataagcaggtgacagcaatgattgagatcaccataatcgatgacgccgagtttgagctaactgaaacatttaatatctccttgatatctgttgctggcggagggaggctgggtgacgacgttgtcgtgaccgtggtaatccctcagaacgatagtccttttggcgttttcgggtttgaggaaaaaactgtcatgattgatgaatcactcagttctgacgatccggattcctacgtaacgctaactgtggttcgatcacccggaggtaagggcacggtgcgtctggagtggactattgatgaaaaggcaaaacacaacctgtctccgctgaatggtaccttacattttgacgagacagaatctcagaaaaccattgtccttcatacccttcaggacaccgtgttggaggaggatcgcaggttcaccatccagctcatcagtattgatgaggtcgaaatctctcccgtcaaggggtcagcctccatcattatacgcggggacaaacgggcaagtggagaagttggcatcgcccctagcagccggcatatcctgataggagagccctccgctaagtacaacgggacagcaatcatttcattagtgagaggacccgggattctcggtgaggttacagtcttctggcgaattttcccaccttctgtcggagagttcgccgagaccagcggaaagctaacgatgcgcgatgagcagagcgccgtgatcgttgttattcaggcactgaacgatgacatcccagaggagaagtctttttatgagtttcagctgactgctgtgagcgaaggcggcgtgctgtccgaaagtagtagcaccgccaatattacagtagtggcgtccgacagtccttacgggcgcttcgcattctctcacgagcagttgagggtgtctgaagctcaacgggtcaatattacaatcatccgctcttcaggggacttcgggcacgttagactgtggtacaagaccatgtcaggcactgctgaagccggtcttgattttgtccccgccgccggtgagcttttattcgaggctggcgagatgagaaagagtctccatgtcgaaatcctcgacgacgactacccagagggccccgaggaatttagtcttacgattaccaaagttgaactccaggggagagggtatgatttcactattcaggagaacggcctgcagatcgatcagcccccagaaatcggcaacatcagcatcgtgagaatcatcattatgaagaatgacaacgctgagggaataatagagttcgatccgaagtataccgcatttgaggtggaggaggatgttgggttgatcatgatccctgtggtcagacttcacgggacctacggctatgtcaccgccgatttcatcagtcagagctcctccgccagccctggaggggtggattacatccttcatgggtccacagtgactttccagcatggtcaaaacctatccttcatcaacatttccatcattgacgataatgagtccgagtttgaggaacccatcgagattctcttaacgggggcaaccgggggagctgtgcttgggcgccacctggtgtcacgaattataatagccaagagcgactctcctttcggcgtgatccgttttttgaaccagtcaaagatctccattgccaaccctaactcaactatgatcctttccttggtgttggagcggactggcggccttctcggtgaaattcaggttaactgggagaccgtagggcctaacagccaggaggcattgctgccacagaatagggatatcgcagatcctgtttccggcctcttctatttcggtgagggagaaggcggcgtaaggactattattttgaccatttacccacacgaggaaattgaagtggaggaaacatttatcattaagctgcacctcgtcaagggcgaagcaaagctggatagcagagctaaggatgtgacgttaaccatccaggaattcggggaccctaatggcgtcgtccaatttgccccagagacactatctaaaaagacctattctgagccattggccctcgagggccctctcttaattactttttttgtaagacgggtgaagggcacctttggggagatcatggtgtattgggaattgtcctccgaattcgatattactgaagactttctgtcaacatcaggttttttcactatcgcagatggtgaatccgaggcatccttcgacgtacacttgttaccagatgaggtcccagaaattgaggaagactatgtcattcaactagtgagcgtggaagggggcgctgagctagacctcgagaagtctattacctggttctccgtgtatgcgaatgacgatccccatggcgtgttcgcattgtactccgatcggcaaagtatcttgataggacagaacttaatcaggtcaattcagatcaatataacacgattagccggcaccttcggtgacgttgccgtaggattacggatctcctctgatcacaaggaacaacccatcgtgaccgaaaacgcagaaaggcagcttgtcgttaaggatggggccacatataaggtcgacgtggtgcctattaagaaccaggtcttcctgagcctgggctcaaacttcacactgcaactcgtgactgttatgctggtgggaggtcgcttttacgggatgcctaccatcttacaggaagcaaagtctgctgtgctgcctgttagtgaaaaagctgctaatagccaggttggtttcgagtcaaccgctttccagttgatgaatatcacggccgggacgtcccatgttatgatttcccgacgggggacttatggcgctctgtccgttgcctggaccaccggctacgcacccgggcttgagattcctgagttcatcgttgtgggaaacatgacgcccacactcggcagcctatcattctcccacggtgagcagcggaagggggtgttcctctggacttttccctctccagggtggccagaggccttcgtccttcatttgtcaggtgttcaatcctcggctcccggcggggctcagctccggtcaggcttcatagtggccgagatcgagccaatgggtgtgtttcagttcagcaccagctctcgaaatatcatcgtgagtgaggacacccagatgatccgactgcatgtgcagcgacttttcggatttcacagtgacctgatcaaggtcagctatcagacgaccgcgggcagtgctaaacccctggaggacttcgaaccagttcagaacggcgaactattttttcaaaagtttcaaacggaggtggattttgagatcactatcattaacgaccagctcagtgaaatagaggaatttttttacatcaatctgacgagtgtggagattcggggtttgcagaagttcgacgtaaattggtcccctcggctcaatctggactttagtgtagcagtgatcacaatcttagacaacgacgatctggccggaatggatatctcctttccagagactaccgtcgcagtcgccgttgacaccactctgattcccgttgaaactgaatctacgacatatctgtccacatctaagactaccacgatcctgcagcctaccaacgttgttgccatcgtcaccgaggccacaggagtttcagctatccctgagaaactggtcaccttacacgggacccctgccgtgtcagagaagcctgacgtggccaccgtaacagctaatgtgtctatccatggaactttctcactgggacccagcatcgtgtacattgaagaagagatgaagaacggcaccttcaatacagctgaagttctgattagacgcacggggggatttactggaaatgtatcaatcacagttaaaacatttggggagcggtgtgctcagatggaaccaaacgccttacctttcagaggaatctacggtatttcgaatttgacctgggccgtagaagaagaagacttcgaagagcaaactctcacgcttatcttcctggatggagaacgcgagagaaaggtaagtgtgcaaatcctggacgacgacgaacccgaaggccaggaattcttttacgtctttctgaccaatccccaaggcggggcgcagatcgtggaggaaaaggatgacaccggattcgcagccttcgccatggtgattatcactggatcagatctgcacaacggaataatcggattttcagaggagtcacaatcaggactggaactgcgggagggcgctgtgatgcgccgcctgcacctcattgtgacccgacaacccaatagggcgtttgaggatgtcaaagtgttctggcgagtcacgctaaacaagactgtggtggtgcttcagaaagacggcgtcaacctcgtcgaagaactccagtccgtttcagggactaccacctgcaccatggggcaaaccaaatgttttatctcaatagaacttaaacccgagaaagtcccccaggtggaggtctatttcttcgtggaactgtatgaggcaaccgccggcgcagcaatcaacaacagtgcacgctttgcgcagatcaaaatcctggagagcgatgaatcccagagcttggtttacttcagcgtgggctctcgtctagctgtcgcccacaagaaggccactctgatcagcctgcaggttgccagagattccgggacaggcctaatgatgtctgtcaactttagtacccaggagctcagatcggccgaaactattggaagaacaattatcagccccgctatctctgggaaagacttcgtaattacagagggaaccctcgtgttcgagcctggacagagaagcacggtgctggatgtcatactcacaccagaaactggtagcttaaactcattccctaagagattccagatcgtcctgtttgatcctaagggcggcgctcggatcgacaaggtttacggaacagccaatatcactttggtgtcggacgctgattctcaggccatttggggcctcgcagaccagctccaccagcccgtcaacgacgacatactgaatcgcgttctgcatacaattagcatgaaagtagcaaccgagaataccgacgagcaactttccgcaatgatgcaccttattgagaaaattacgaccgagggaaaaatacaggctttctcagtggcttccagaacgttgttttatgagatcctgtgcagccttattaaccctaaaagaaaggatacccggggattttcgcatttcgctgaagtgaccgagaattttgctttcagcttgctcacaaacgtcacgtgcggatctccgggcgaaaaatcaaaaaccatcctggattcttgtccttatctgtcaattctggctctccactggtacccccagcagatcaacgggcataaatttgaaggaaaagaaggggactacatccggatccctgaacgcttgcttgatgtgcaggatgcagagatcatggccggcaaatcaacctgtaagcttgtgcaatttaccgagtattcttctcaacagtggttcatctccggcaacaacctgcctaccctgaagaacaaagtgctgtccctctccgtcaagggacagagttcacaactcttgacaaacgataacgaagtattgtacagaatctatgccgccgagccccggatcatcccacagacgagcctctgtttgttgtggaatcaggctgcggcctcttggttgtccgacagccagttctgcaaggtcgtcgaggagacggccgactatgtggaatgtgcttgtagtcatatgtctgtgtatgctgtttacgcaaggactgataacctgtcctcatataatgaagcattcttcacaagcggtttcatctgcatcagcggactatgtctagcagtgctcagccacattttctgcgccaggtactccatgtttgctgccaaactgctgacacacatgatggccgcaagcttgggaacacagatactatttctggcttccgcttatgcctcacctcagctcgctgaggaatcctgctccgcgatggccgctgtaacccactacctttacctgtgccagttttcatggatgttgatacaaagtgttaatttctggtacgtgctggtaatgaatgacgagcataccgagcgacgctacctgctctttttcctcttgtcatggggtcttcccgcgtttgtcgtgatccttctgatagtgattctgaagggaatttatcatcagagtatgtcccagatctacgggctaattcacggagatttatgcttcatccccaatgtctacgccgcgctgtttacggcagcgcttgtccccctgacatgccttgtggttgtctttgtggtattcatccacgcttatcaggtgaaaccgcaatggaaggcatacgatgacgtattccgcgggcgcactaacgcagccgaaattccccttatcctttatctcttcgctctaatctccgtgacttggttatggggtggcctccacatggcataccgacatttctggatgttggtcctcttcgtgatatttaacagcctccagggactgtacgtgtttatggtctatttcatcttgcataatcagatgtgctgccctatgaaagcctcctacactgtggagatgaacggacaccctggaccgagcacggcattcttcaccccagggtctggaatgccgccggcgggcggtgaaattagtaaatcaacccagaatctgatcggagctatggaggaggtcccaccagactgggagcgggctagttttcagcaaggctcccaggcatcccccgaccttaaaccatctccccaaaatggagcaactttcccatcctctgggggctatggccaaggatctctgatcgcggatgaggaatcccaggaattcgacgacctcatctttgccctgaaaaccggagcaggcttgtctgtctccgacaacgaatccggtcaggggtctcaagaaggaggaactctgacggactcacaaattgtggaactcaggagaatccccatcgctgatacccacctatag

SEQ ID NO: 117912 - DNA, 6921 bp, synthetic construct
  misc_feature 1..6921: note = Description of Artificial Sequence: Synthetic coding sequence
  source 1..6921: mol_type = other DNA
gtggatgtgttcatgttcctcggcatgccatcagcttcattgctagttaatttactgtccgcactattgattctgtttgtattcggagagactgagatccgattcacaggtcagacggagttcgtggtgaacgagacaagcactacagtcattcgcttgattatagagaggattggggagccagctaatgtgacggcaatcgtctccctgtatggggaggatgcaggtgattttttcgatacctatgcagcagcatttatccccgccggagagactaaccgaacagtgtatatcgccgtatgcgacgacgatctgccggagcctgacgagacgttcatcttccacctcaccttgcagaagccttccgctaacgtcaagctgggttggccccgcacagtgacagtgacaatcctgagcaacgacaatgcctttgggatcatatcttttaacatgctccccagtattgccgtgagcgaaccgaagggacgaaatgagtcaatgccactgacattgatccgggagaagggaacgtatggaatggttatggtgaccttcgaggtcgaaggcggacctaatccccctgatgaggatctgtcgcctgtcaaaggcaacatcacttttccgcccgggagagccaccgtcatttataatctgactgtccttgatgatgaggtcccagaaaacgatgagattttcctgatccaactgaagtctgtggagggcggcgctgaaatcaatacaagcaggaactccatcgaaattatcatcaaaaaaaacgattctcccgtcaggttcctgcagtctatttatctggtgccggaggaagaccacattttgataatccccgtggtgcgagggaaggataataacggcaatctgataggcagcgatgaatacgaggtatccattagctatgccgtgacaactggaaacagcaccgcccatgcccagcaaaatctggatttcatcgacctgcagccaaacacaacggttgtattccccccgtttatccatgaaagccacctcaagtttcagatagtcgacgatactattcctgagatcgctgaatccttccatattatgctgctcaaggataccctgcagggcgacgccgtgcttattagcccctcggtcgtccaagttaccatcaagcctaacgacaaaccctatggtgttcttagtttcaactcagttctgttcgaaaggacagtcatcatcgacgaagatcgcattagcaggtatgaagagattaccgtggtccgtaacggggggactcacggtaacgtgtctgcaaactgggtccttaccaggaattctaccgatcccagccccgttactgctgacatacgcccttctagtggagttttgcattttgcgcagggtcagatgctggcgacaatcccgctgacagtggtggacgatgaccttccagaggaggcggaagcctacctgctacaaatccttccgcacactatccgcggcggcgctgaggtcagcgaaccagctgaactgctcttctacatccaggattccgatgacgtttacggactcattacctttttcccaatggagaatcagaagatcgaaagtagccctggtgagcgctatctgtccctctccttcacccgacttgggggcacaaaaggggatgtgcggcttctgtactctgtgctctacatccccgccggcgccgtggatcccctgcaggctaaggagggcatcctgaatatttcccgacggaatgacctgatcttccccgaacagaagacccaggtcacaaccaagctgcctatccggaacgacgcttttctgcaaaatggcgcccatttcctggtgcagctggagacagtggagctcttgaatatcattcctctgattccacctatctccccgcgatttggcgagatatgcaatatcagcctgcttgtcaccccagcaatcgctaatggggaaatcgggtttctctccaacttacctatcattctgcatgaacccgaggactttgccgccgaggttgtgtacattcctttacatcgtgacggtaccgatgggcaggccaccgtgtactggagcctcaaaccttcaggctttaatagcaaggccgtcactcctgacgatatcgggccgtttaacggatccgtgctgttcctgtctggacagtctgacacgaccatcaatattaccattaagggggacgatatcccggaaatgaacgagactgtcaccctgagtcttgatcgcgtgaatgtagagaaccaagttctcaaaagcggctatactagccgggatttgatcatcctcgagaatgacgaccccggtggggtcttcgagttcagccccgcctccagggggccctatgtgatcaaggagggagagtccgttgaattgcacattatacggagcagagggtcgttggtgaaacagtttcttcattacagggtcgagccgcgcgattctaacgagttttatgggaataccggcgtgttagagtttaagcctggcgagcgcgagatagtcatcacactgcttgcacggctcgacggcatcccggaactcgatgagcattactgggtggttctatcctcccatggggagcgtgaatctaaacttgggtcagcgacaatcgtaaacattactatcctgaagaacgacgatccccatggtattattgaattcgtttcagatggcctgatagtcatgattaatgaatccaagggcgatgccatctatagcgccgtctacgacgtcgtcagaaacaggggtaacttcggcgacgtgtctgtatcatgggttgtctctcctgactttacacaggacgtgtttccagtgcagggcacagtagtgttcggggatcaggaattttcaaagaacattactatatattccttgcctgatgaaatcccagaagagatggaagaattcacagttatcctgctgaatggaaccggaggggcgaaggtggggaacaggacaacggcaaccctgcgaatccgcagaaatgatgatcctatttacttcgcggagccaagggtggtgagagttcaggagggagagaccgctaactttactgtgctgagaaatggttcggtggatgtcacttgcatggtacagtacgctacaaaagacgggaaggccactgctagagagcgagacttcatacctgtggagaagggcgagaccctgattttcgaagttggctccagacagcaatccatatctatttttgtaaacgaggatgggattcccgagacagacgagccattttacattatcctcctcaacagcactggagacacagtggtgtatcagtatggcgtcgccaccgtcattattgaggccaacgacgaccctaacggcatttttagcctcgagcctatcgacaaagctgtggaggagggcaagaccaatgccttttggatcctgcggcaccggggctacttcggttccgtaagtgtgtcttggcaacttttccagaatgatagcgccctccagcctgggcaggaattctatgagacttctgggacagtgaactttatggacggggaagaagccaagcctattatcctgcacgctttccccgacaaaataccagagtttaatgagttctacttcctgaagctggtcaacatctcaggagggagcccaggacctggcgggcagctcgccgaaacaaacctgcaggttaccgtcatggtgccttttaatgacgatcccttcggggtctttatcttggatccagagtgcttagagcgagaggtcgccgaagacgttctatccgaggacgacatgagctatattacaaattttacgattcttcggcagcagggggtgttcggagatgttcaactgggctgggaaattttgtcatctgaatttcctgccggcctgcctccgatgatcgacttccttctggtaggcatttttccaaccacagtgcatcttcagcaacacatgagacggcatcactctgggacagacgctctctattttactggtctagagggtgcctttggcactgtcaatcccaaatatcacccttcacggaataatactatcgcaaatttcaccttcagtgcctgggtcatgcccaacgcaaataccaatggcttcattattgccaaggatgatggaaatggaagcatctattatggggtcaagatccagaccaacgagtcacacgtcacactaagtctgcactacaagactctcggtagcaatgcgacgtatatcgccaagaccacggtgatgaagtatctagaggagtcagtttggctccacttgctgattatcctcgaagacggaatcatagagttctacctggatgggaacgccatgccccgaggcatcaagtctcttaaaggcgaagccatcacagatgggccaggaattctgagaataggcgctggaatcaacgggaacgatagatttaccggtcttatgcaggatgtgaggagctatgagaggaaattgacattggaggaaatatacgaattgcacgccatgccagcgaaatccgatttgcatccgatctccggttacctcgaattccgccagggggagaccaacaagtcctttattatttctgccagagacgacaacgacgaggaaggagaggagctattcattttgaaattagtttcggtttacggcggggcgcgcatatcagaggaaaacaccactgcccgattaacaattcagaagagcgacaacgcaaacgggttattcggtttcactggagcctgtattcccgagatcgctgaggaagggtccactataagttgcgtggtggaaagaacacggggggccctggattatgtacacgtattctatactatcagccagattgaaaccgacgggatcaattatttggtggatgactttgctaatgccagcgggacaattacatttttgccttggcagagatcagaagtgctaaatatctacgtgctcgacgacgacatccccgaactgaacgaatactttcgggtgaccctggtgtctgcaattccaggcgacggaaaactaggatcgacacccacgagcggcgcctctattgatccagaaaaggagactacagacataacgatcaaagcctctgatcacccttacggcctcctgcaattcagcacaggattgccacctcagccaaaggatgccatgacacttcccgcaagtagcgtcccccatataaccgtggaggaagaggacggcgagatccgactgctcgtcatccgcgctcagggactgttgggccgggtgactgccgagtttaggacagtctctctgacagccttttctcccgaagattaccagaatgttgcaggcacgcttgagtttcagcccggggaacgttataagtacatctttattaatatcacggacaacagcattccagaattagaaaaatcctttaaggtggagctgctcaacttagaaggcggggtggcagagctctttcgagttgacgggtcggggtctggagacggagacatggagtttttcctcccaacaatccacaaacgggcctctctgggagttgcttctcagatactggtcacaatcgcggcgtcagaccatgcacacggtgtgttcgagttctcccccgaaagcctgttcgtctccggcactgaacctgaggatggatactctacagtgaccctgaatgtcatccgtcaccacggcactctctcacctgtgacactccactggaatatagacagtgaccccgacggcgacttggcatttacgagcggtaatatcacattcgagatcgggcagacttcagcaaatataaccgtggagatcttaccagatgaggatcccgaactggataaagccttttcagtctctgtcctgagcgtcagttcgggctcccttggtgctcatattaatgccactttgaccgtgttggctagcgacgatccctatggtattttcatcttttctgaaaaaaatcggcccgttaaggtggaggaggcaacccagaatataaccctgtccatcatcagattgaaggggctgatgggcaaagtgctggtgtcctacgccacactcgatgacatggaaaagccaccatattttcccccgaacctggccagggctacacagggccgcgattacattcccgccagtggcttcgctctgttcggtgcgaaccagtcagaagccaccatagccatctctatactggacgacgacgagcctgagcgcagcgagtccgtttttatcgagctgttaaactccacacttgtggccaaagtgcagagccgaagcattccaaattcgccccggctaggtcccaaggttgagaccattgctcagctgattatcatcgccaatgacgacgcctttggcacattgcaactgagtgcaccaatagtgcgggtggcggaaaatcacgtgggccccattattaacgtcacgcggacagggggcgcttttgccgacgtctcagtgaaattcaaggctgtccccatcacagccatagctggagaggactattccatcgctagtagcgatgtggtgttgctggagggtgaaacaagtaaggccgtacccatttacgtcatcaatgatatttatcccgagctagaggagagtttcctagtacaactgatgaacgagaccaccggcggagctaggcttggggccctgacagaggctgtgattattatcgaggctagcgacgacccttatggtctcttcggcttccagatcacaaaactaatagtggaagagccggaattcaactccgtgaaggttaacctgccaattatcagaaactctggcaccctggggaacgttacggtccaatgggttgcaaccattaatgggcagctagccacgggagatctgcgggtcgtatccggcaatgtgaccttcgcccccggcatgagctcctaccccagtgccaccaactag

SEQ ID NO: 117913 - DNA, 18921 bp, synthetic construct
  misc_feature 1..18921: note = Description of Artificial Sequence: Synthetic coding sequence
  source 1..18921: mol_type = other DNA
atgagtgtttttcttggccccggtatgccctccgcctccctgctggtgaatctgctcagcgctctactaattctcttcgtatttggggaaactgaaattcgctttaccggtcagaccgaattcgtggtgaatgagaccagcactactgttatccgactcatcattgagcgtatcggagagcctgccaatgtcactgcaattgtgtccctgtacggagaggacgcgggggacttctttgacacatacgccgccgcctttattcctgcgggcgaaactaatcggactgtttatattgccgtatgtgatgatgacctacctgaacccgatgaaacatttatttttcacctgactctgcaaaagccaagcgccaatgttaagctggggtggcccagaactgtgaccgtgactattctgtctaacgacaacgctttcggcattattagctttaacatgctgccctcaattgctgtgagcgagccaaaaggtcgcaacgagagcatgccccttacgctcattcgggagaaaggaacctacggtatggtgatggtcaccttcgaagtggaagggggacccaaccctccagatgaagatctgtccccggtgaaaggtaacattaccttccctccggggcgcgccacagttatttacaatttaactgttttagacgatgaggtgcccgaaaatgacgagatctttctaatccaactgaaatccgtggaaggcggagctgagataaacacgtctcggaactctatcgagataattatcaagaaaaatgactctcctgttaggttcttacaatccatctatttggttccggaggaggaccacatcctcatcattcctgtggtgcgcggaaaggataacaatggcaatctcatcggctccgatgaatacgaggtgtcaatttcctacgccgtcactactggcaacagtacagcccatgctcagcagaacctagatttcattgacttacaacccaatactacagtggtttttccccccttcatccacgaatcccatcttaagtttcagatcgtggacgacactataccagagatcgcggaaagttttcacattatgctgctgaaagatacactccagggcgatgccgtgttaattagcccttccgtggtgcaagttacgataaaaccaaatgacaagccctatggggtactgagtttcaattcagtgctgttcgagcggaccgttataatcgacgaagaccggatttctcgctacgaggaaataaccgtggtaagaaacggcggaacgcacgggaacgtcagtgcaaattgggttcttacaaggaactccactgacccttctcctgtcacggccgacattcgacccagctctggcgtgttgcatttcgcgcagggccagatgcttgccacaatccccctgacagtcgtagatgacgacttgcccgaggaagccgaagcatacctgctccagatcctgccccataccatccgtgggggagcagaagtcagcgaacccgctgaattgttattctacatccaagacagtgatgatgtatatgggctgattacatttttccctatggaaaaccagaaaattgaaagcagtccgggggagaggtacttgtccctgagtttcacaaggctcggaggtacaaagggcgacgtcagactgctatattcagttctttatatcccagccggggctgtggaccctctgcaggctaaagaagggattctgaatatctccagaagaaacgacctgatcttccctgaacagaagacccaggttacgacgaagctgccaattagaaacgacgctttcttgcaaaatggtgcgcacttccttgtgcaactggagactgtggaattgctgaatattatccctctaatcccacccatatcccctcgctttggggagatttgcaatatctccctcctggtcactccggccatagctaacggagaaatcggtttccttagtaacctgcctataatcttacacgaaccagaggactttgccgctgaggtcgtgtatatccccctgcaccgcgatggcaccgatggacaggccacagtatactggagcttaaagccgagtggctttaactctaaggccgttaccccagatgatatcggacctttcaatggaagcgttctgttcttgagcggacaaagtgatactacgattaatataacgatcaaaggagacgacattcccgagatgaacgagactgtgaccctgtcactggaccgagtgaatgtggagaatcaggttctcaagtctgggtatacatctcgggatctgatcatcctagaaaatgatgatcctggcggcgtgttcgagttctctccagcttcacgtggaccgtacgtgattaaagagggcgagtccgtagaacttcatatcataagatctcgaggcagcctggtgaagcagttcctgcactacagggtcgagccaagggatagtaatgaattctacggtaacacgggggtcctcgagttcaagcccggagaacgcgagattgtcatcacattgctggctcggcttgacggcataccagaactggacgagcattattgggtggtgctttcatcccacggggagagagaatccaagctaggcagtgcgaccattgtcaacattaccattctaaagaatgacgatccccacggcattattgaattcgtgagcgacggcctgatcgttatgattaacgagtccaaaggcgacgcaatatactccgccgtctatgacgtggtacgcaaccgtgggaacttcggcgatgtcagcgtgtcatgggtggtgtcccccgatttcacccaagacgttttccccgttcagggtaccgtggtgttcggcgatcaagaatttagtaagaatattaccatttattccctgccagacgagatccccgaagaaatggaggagtttactgtcatactcttgaacggtacaggcggggccaaagtcggaaacaggaccacagccactctgagaatcagaaggaatgatgaccccatttactttgccgagcctcgggtggtgcgggtgcaggagggtgagaccgcgaacttcaccgttttacgcaatggttctgttgatgttacttgtatggtgcagtatgctaccaaggatgggaaagccaccgcccgcgagcgggatttcattcctgtggagaagggggagacactgatctttgaggtaggctctcgacagcagagtatttctatttttgtaaatgaggacggaatccctgaaaccgacgagcctttctacatcattctattaaactcaacaggtgacacggtagtctatcaatacggcgtagccactgttattatcgaggctaatgacgatcccaacggcattttcagcctcgagccaattgataaagccgtggaagagggcaagacaaatgcattttggatcttgaggcatagggggtattttgggagcgtgagtgtgtcctggcagctctttcagaacgatagtgcactgcagccaggacaggagttctacgagaccagcggcacagttaactttatggatggagaagaagctaagcctatcatcctgcatgctttcccagataaaatcccggagtttaatgaattctactttttgaagctcgtcaacatctcaggtggatcaccagggcccggtggccagctcgccgagaccaaccttcaggtcacggtgatggttccattcaacgatgatccatttggcgtctttattctggatcccgaatgcctagagagagaagtcgccgaagacgttctctctgaagacgacatgtcctatatcaccaattttacaatcttgcggcagcagggcgtctttggtgacgtgcagttgggctgggaaattttaagctccgaattcccagccggcctgccccctatgatcgatttcctcttggtggggatctttcccaccactgtacaccttcaacagcacatgagacgacaccactccggaacagacgctttgtatttcaccggacttgagggggctttcgggactgtaaacccgaagtatcacccttccaggaacaatacgattgctaattttaccttctccgcttgggtaatgccgaacgccaatactaatggattcattatcgccaaagacgatgggaacggttcaatatactatggtgtgaaaattcagactaatgaatcccacgtgacgctgagcctacactataagacactcggaagcaacgccacttatattgccaagacaactgtcatgaaatacctcgaggagtctgtgtggctccatctcctcataattcttgaagacggtatcattgagttctatttggacggtaatgccatgcccagggggatcaagtccctgaagggcgaagccatcaccgacggtcctgggatcttgcgcatcggggcagggattaatggaaacgataggttcactggtctgatgcaggatgttaggtcttatgagcgcaagctgacactggaggagatttacgaattacacgccatgccggctaagagcgatttgcatcccatatcaggatacctggaattccggcagggtgaaacgaacaagtcttttattatcagcgctcgcgacgacaatgacgaggaaggcgaagagctgttcattctgaagctcgtgtctgtatacggaggggctcggattagtgaggagaacaccaccgcgaggctcaccatacagaaaagcgataatgctaatggactgttcgggtttaccggcgcgtgcatccccgaaattgccgaggagggctcaacaattagctgcgtagtcgagcgaacgagaggcgccctcgattatgtacatgtattctacactatatcacagatagaaactgatggcataaactacctcgttgatgactttgccaatgcaagcggtaccatcacctttttgccctggcagcgctccgaggtccttaatatctatgtgctagacgatgatattcctgaattgaatgagtattttagggtgacccttgtgtccgccatcccaggcgatggtaagctgggctccacccccacctcgggcgccagtatcgaccccgaaaaggaaacgacagacatcaccatcaaagcaagcgaccacccctatggattgctccagttcagtaccgggttacctccgcagcccaaggatgcgatgactcttcctgccagctcagtgccgcacatcactgtggaagaggaggatggcgaaatccgacttctggtgattcgtgcccagggcctgctcgggcgagtaacagcggagttccgcacagtgagcctgaccgctttctcgccagaggactatcagaatgttgctgggacactggagttccagcccggagaaagatacaagtacatattcatcaacatcaccgataactcaatccccgagcttgaaaagtctttcaaggtggaattgctgaatttagaaggcggagttgcagaactcttccgcgttgatggctccggttcaggggatggggacatggagtttttccttccaaccatacacaaaagagccagcttgggcgtggctagccagatcctggttactattgctgcctccgaccacgcacatggggtatttgagttcagccccgaatcactatttgtgtcaggaacggagcccgaagacggctatagtactgtaactcttaacgtaattcgacatcatgggacattatcacctgtgaccctccattggaacattgatagcgaccccgatggcgacctcgctttcacgtccggcaacattacctttgaaattggacagacgtcagcaaacattacagtggagatactgccagatgaagacccagagctggataaagcgttttctgtaagcgtgctgagcgtttctagcggtagcctgggagcccatatcaacgctaccttgacagtccttgccagtgatgacccttatggcatttttattttctccgagaaaaatcgccctgtcaaggttgaggaggccacacagaacatcacgctgtccattattaggctaaaaggactcatggggaaggtgctggtgtcgtatgctactctcgatgatatggaaaaacctccgtacttccccccaaatcttgcgagggcgacccaaggtagagattatataccagccagcggctttgccctgttcggtgcaaatcaaagcgaagccaccatcgcgatttcaatccttgacgacgacgaacctgagaggtccgagtccgtgtttatagaactcctcaactctactttggtcgccaaggtgcagtcccgctccattcctaattcacccagacttggtcctaaggtcgaaaccattgctcagctcataataatcgctaacgacgacgctttcggaaccctccagctgagcgcccccatcgttagagtcgcagagaatcatgtggggccaatcataaatgtcaccagaactggcggcgcttttgccgatgtgagcgtgaagtttaaggctgtgcctatcactgctatcgcaggagaagattactccatcgcgtcaagcgatgtggtacttttagaaggggaaacgtcgaaagcagtgccaatttacgtgattaacgacatatacccagagctggaagagtcttttcttgtgcaactgatgaacgaaactaccggtggtgctcgcttgggggccctgacggaggccgtgattattatagaagccagcgacgatccctatggattgtttggctttcagattaccaaactgatagtcgaggagcctgagtttaattcagtgaaagttaacctccctattattaggaacagtggcactcttggcaacgtcactgtacagtgggtggcaaccatcaacggacagctagccaccggggacttgcgggtggtcagtgggaatgtgacctttgcacctggcgagaccatccagaccctgctcttggaagtcctggcagacgacgtccccgagatcgaagaggtgattcaggtgcagctgaccgacgcgagtgggggaggcaccattggcttggatcggatcgcgaatattattatccccgccaacgacgacccttatgggacagttgctttcgcccagatggtatacagggtgcaagagcccctagagcgaagctcctgtgccaatatcaccgtgagacggtccgggggtcattttggcagattactgctcttctacagcacatccgatatcgacgtggtggcacttgctatggaagagggtcaggacctgctgtcctactacgaaagcccgattcagggcgtacctgatcctttgtggagaacttggatgaacgtgagtgctgtgggggagcccctgtatacctgtgcgacactctgtttaaaggagcaggcgtgtagcgccttctccttctttagcgcttccgagggtcctcagtgcttttggatgacaagctggattagccccgccgtcaataattctgacttctggacttaccgtaaaaacatgacacgagtggcctccctcttctccggccaggcagtcgctgggtcagactacgagcctgtgacaagacagtgggcaataatgcaagagggggacgagttcgcaaaccttacagtgtctatcttacctgacgactttcccgaaatggacgaaagcttcctcataagtctgctggaagtgcacctcatgaacatctccgccagcctcaagaatcagcccactatcgggcagcctaatatctctactgtggttatagcactgaatggcgatgctttcggtgtcttcgtgatatacaatatctcgcctaacacgtctgaggatggcctcttcgtagaggtccaggaacagccacaaaccctagttgagctaatgatacacagaactgggggatctctgggtcaggtggctgttgaatggagggtggtcggcggtaccgcaacagagggattggattttattggggccggtgagatcctgacattcgctgagggggaaactaagaaaacagtgatcctgactattttggatgacagcgagccagaggacgacgagtccataatcgtgagtcttgtatatacagagggcggatccaggatccttcccagctctgacactgtcagagtgaatattctcgccaatgacaatgtggctggtatcgtgtccttccagactgcctccagaagtgtcattggacacgagggcgagattctccaattccacgtgattaggacttttccgggtcggggtaatgttaccgttaattggaaaataattgggcaaaacctcgagctgaattttgctaatttctcaggccagctgttttttccagaaggctccctgaataccacactgtttgtgcatctgctggatgataatattcccgaagaaaaggaggtgtaccaagtcatcctgtacgacgtgagaacgcagggagtgccccctgccggaattgcactcctggacgcacaagggtatgcagctgtactcacagtcgaggcaagcgacgagccacacggggtgctgaatttcgcactgtctagcaggtttgtgctgctgcaagaggccaatattaccatccaacttttcatcaatcgggaatttggctctctcggcgccatcaatgtgacatatacaaccgttcctggcatgctgagcctcaagaaccaaacagtggggaatttggcagaacctgaagtggactttgtgccgattatcggcttccttatccttgaagaaggcgaaactgcagcagccattaatattactatactggaagacgatgtgccggagctcgaggagtacttcctggtaaacctaacctatgtagggctgaccatggcggcctctacatcattcccacctcgtctcgatagcgaaggactgacagcccaggtgatcattgacgcaaacgacggcgctcgcggcgtgatagagtggcagcagtcaaggtttgaagtcaatgaaacccacgggtccctaaccctggtggcccaacgatcgcgcgaacctctgggacatgtcagcttgtttgtctacgcacagaatctcgaagcccaggtcgggttagattatatcttcacgcccatgatactgcattttgcggacggcgagcgatacaaaaacgtgaacatcatgattctcgatgatgacattcctgaaggcgatgagaaattccagctcattctgacaaatccttcaccaggcctggagctgggaaagaacaccatcgcgctcattattgtcctggcgaacgacgacggccccggagtactgtctttcaataactccgaacattttttcctacgagaacctaccgcgctgtatgtgcaggaatccgtggccgtactctacatcgtccgagagcctgctcaggggctgttcgggacggtcaccgtgcagtttattgttactgaggtcaactcctccaacgaatctaaggatctgacaccaagcaaaggatacatagttctggaagagggggtgcggtttaaagcgctccagatctcagctatcctggacactgagcccgagatggatgaatacttcgtgtgcactctgtttaaccccacaggcggggctagactcggcgtgcacgttcagaccctgatcacggtgctccagaaccaggccccgttggggctgtttagcattagtgcggtggaaaaccgggccacctctatcgacattgaggaagcaaatagaactgtttatctcaacgtcagtcgtaccaacggcatcgacctggctgtctctgtccagtgggaaacagtctcggaaacggcttttggaatgagggggatggacgttgtgttcagcgtgtttcagagcttcctcgacgagagcgcttctggctggtgcttcttcaccctggaaaatcttatatatggaataatgcttagaaagtcaagcgttaccgtgtacaggtggcagggaatatttatcccagtggaagatctcaatatagagaaccccaagacctgcgaggcttttaacattggcttctctccatattttgttataacccacgaggagcgcaacgaagagaagcccagcctcaacagcgtgtttacattcacctccggctttaaactttttctggtgcagaccatcatcatcctggagtcgagccaggttaggtactttacatcagactctcaggactacctgatcattgcctcacagcgggatgactctgaattgactcaggtttttaggtggaatggaggctctttcgtcctgcaccagaagctccccgtgcgcggcgtacttaccgtggccttgttcaacaaaggtggaagtgtttttctcgcaatttcccaggccaacgctcgcctgaactccctattatttcgctggagcggttccggattcatcaactttcaagaagttcccgtgtcgggaactaccgaggtggaggcgttgtcctctgccaatgacatctatctgatttttgccgagaacgtctttttgggagatcagaactccatcgatatctttatttgggaaatgggccagtcttctttccggtatttccagagcgtggatttcgcggctgttaacagaatccacagttttacacctgcttcggggattgctcatattcttctgattggtcaagatatgtcagcactgtattgctggaatagtgagaggaatcagttctctttcgtgttggaggttccctctgcctatgacgttgcatccgtgactgtgaaatccctaaacagctctaaaaatttgatagctcttgtgggcgctcacagtcatatctatgagctagcctacatctctagccactctgacttcattccatcatctggtgaactaatatttgagccaggggagcgtgaggccacgatcgctgttaacattcttgatgatacagtccccgagaaagaagagtctttcaaggttcagctgaagaacccaaaaggcggtgccgagattgggatcaatgatagcgtcacaatcactatcctctccaatgacgacgcctatggtatcgttgcattcgcccagaacagtctatataagcaggtagaagagatggagcaggacagcttggtcaccctgaacgtggagcggctgaaaggtacctacggaaggattaccatagcctgggaagccgatggttctatcagtgacatcttccctaccagcggcgtgattctgttcacagagggccaggtgctgtccacaatcaccctgacaattctcgccgataatatcccagagctgagtgaggttgtgatcgtgacacttactaggatcacaaccgagggggtggaggacagttacaaaggcgctaccatcgatcaggatcggtcaaagtctgtaattaccactcttcccaatgatagcccatttggtctggtggggtggagagccgcctctgtgttcattagagtggccgagcccaaggagaacaccaccacgcttcagcttcaaattgcacgggacaagggcctcctaggcgatatagctatccacctacgcgcccaacctaactttttactccacgtcgacaatcaagccacggagaatgaggattatgttctccaagaaaccattatcataatgaaggaaaacatcaaagaggcccatgcagaggtcagtattctacctgatgatctccccgagctcgaggaaggcttcatagtaacgatcaccgaagtgaaccttgtcaacagtgacttttccactggacagccctctgtccgccggccaggcatggagattgccgagattatgatagaagaaaatgatgatccccgaggaatctttatgtttcatgtaactcgcggcgccggggaagtaattacagcttatgaggtgccaccgccgttaaacgtgcttcaggttcccgtcgtgaggctggctggatctttcggagcagtgaatgtctattggaaagccagcccagacagcgccggactggaggattttaaacctagccacgggattctggaattcgctgacaaacaggtgacagccatgatcgagattaccatcatagatgacgccgagttcgagctgacagaaacgttcaacatttctttgatctcagttgccggcggaggtagacttggagacgacgttgtggtgacggtggtgattcctcaaaatgacagcccattcggcgtgttcgggtttgaagagaagaccgtcatgatcgatgaatccttgagcagcgatgacccagattcatacgtgacccttactgtcgttcgtagtccaggagggaaggggacagtgaggctcgagtggacaatcgatgaaaaagccaaacacaacctcagccctttgaatgggacactgcattttgatgagaccgaatcgcagaagaccatagtactgcacacccttcaggacactgttcttgaggaagaccgccggtttactattcagctgatcagcatcgatgaagttgaaataagtccggtcaaggggtccgcctcgattattattaggggtgacaagagggcttcaggagaagttggtatcgcccccagcagcaggcacatccttatcggtgagccatcagccaagtacaatgggacagccattattagcttggtccgcggtccaggaattctgggcgaagttacggtcttttggaggatctttcccccatccgtgggcgagtttgcggaaacctccggcaaattaaccatgagggatgagcagtctgctgttatagtggtcatccaggcacttaatgacgacatacccgaagagaagtctttctacgagttccagctgacagctgtgagcgagggcggcgttctatctgagtcttctagcactgccaatatcacagtggtagcgtctgatagtccctatgggcgatttgccttcagtcatgagcagttgcgggtctccgaggcgcaacgcgttaacatcacaatcataagatcctccggcgacttcgggcatgttcgcctgtggtacaagactatgtctggaacagctgaggcggggctggacttcgtccccgcagcaggagagctgctttttgaagccggcgagatgcggaagagcctccacgtagaaatcctcgatgacgactacccggagggtccggaggaattctctctcacaattaccaaggtcgagctccaaggccgcggatatgatttcaccattcaggagaatggcctacaaatagaccagcctcctgaaatcggcaatatctccattgtccgcatcatcatcatgaaaaacgataacgccgaaggtatcatcgaattcgatccaaagtacaccgcattcgaggtggaagaagacgtaggattgataatgatcccagtggtccgcctgcacggcacatatggctatgtgactgctgattttatcagtcagagctcctcagcctcacccggtggggtggactatatcctccacgggagcacagtcactttccagcatgggcagaacttatcgtttattaacataagcattattgacgacaacgaaagtgaatttgaggagcccatcgaaatcctgttaacaggagcgaccggcggggcagttctcgggaggcacctggtgtcaaggatcatcattgccaagagcgattccccttttggagttattaggtttctcaatcagagcaagatctccattgctaatcccaactctacaatgatcctctcactcgtactcgagcggaccgggggtctgctgggcgaaatccaagtgaactgggagactgtcggaccaaattcacaggaggccttactgccacaaaatagggacatagcagatcctgtcagtggtcttttttattttggcgagggagagggtggagtgcgcacaatcatactgaccatatatccccatgaggagattgaagtcgaggaaaccttcatcatcaagctacatttggttaaaggcgaagcaaaactggacagcagggctaaggacgtgaccctgaccatccaggaattcggcgaccccaacggagtggtccagtttgcccctgagacactgtcgaagaaaacttactctgagccgcttgctctggagggccccctgctaatcacgttctttgtgcgacgggttaagggtacatttggcgaaatcatggtctactgggagcttagcagtgaattcgatatcacagaggactttctgagcacctcagggtttttcacgatcgccgacggtgagtccgaagcttcattcgatgtgcaccttctgccggatgaggtacctgaaatcgaggaagactacgttattcaactggtgtcagtcgagggcggcgccgaacttgacctggagaagtccatcacttggttttccgtctatgccaatgacgacccacatggagttttcgccttgtacagcgaccggcagtctattctgatcgggcagaatctcattaggagtatccagatcaacataacacgcctggcgggtacttttggcgatgttgctgttggactcagaattagcagcgaccacaaagagcagcccatcgtgacagagaatgcggaaaggcaattagtcgtgaaggacggagccacctataaagttgacgtagtacccatcaagaaccaggtgtttttgtcactcggctccaactttaccttacagctggtaacagtgatgcttgtgggtgggcgcttttacggcatgccaacgatcctccaagaggctaaatcagcagttctgcctgtgtcagagaaggcagctaacagccaggtggggttcgagagcacagcattccagttgatgaacattaccgccggcacttcccacgtcatgattagccgccggggtacctatggcgcactgtctgtcgcttggacgacaggctatgctcccggcctggaaatccctgaatttattgtagtgggtaacatgacacccaccttgggcagcctatcctttagccacggcgaacagcgaaagggcgtgttcctgtggacatttccttcaccagggtggcctgaggccttcgtgttgcacctctcaggcgtgcaaagctctgcccctggaggcgcccagctcagatccggtttcattgtggcagaaattgaaccaatgggggtatttcagttttccacatcttctcgcaacatcattgtgagcgaggatactcagatgatccggttacacgtgcagaggctctttggattccatagtgatctgatcaaagtctcctaccagacaactgctggcagtgccaagccgcttgaggactttgaacccgtacagaatggtgagctgttcttccagaaatttcagactgaagtggacttcgagatcacaattattaacgatcaactatctgaaattgaggagtttttctacatcaacttgacatcagtggagatcaggggcctgcagaagttcgacgtcaactggagtcctagactcaacctcgacttttctgtcgctgtcataacgatactggataacgatgatctggccggcatggatattagcttccctgagaccactgtggcagtggctgtcgacactactttaatcccagtggagaccgagtccaccacctatctgagcacctctaagaccaccacaattctccaaccgacaaacgtcgtcgctatagtgacggaagccacaggggtttctgctattcctgagaaacttgtgacactgcatggtactccagccgtaagcgaaaagcctgatgtggccaccgttactgccaacgtttctatacacggaacctttagtctgggacctagtatcgtctatattgaggaagaaatgaagaacgggacattcaatacagcagaggtgctgatccgaagaaccgggggtttcaccgggaacgtgtcaataactgtaaagactttcggggaacggtgtgcacagatggaacccaacgccttgccattccgaggaatctacggaatctccaatctcacctgggccgtcgaggaggaggacttcgaggaacaaaccctgacactcatttttttggacggggaacgggaaagaaaagtgtcagttcagatcctcgatgacgacgagccagaagggcaggaattcttttatgtgtttttgaccaacccccagggtggcgcccagatcgtggaggaaaaagatgatacggggttcgcagcctttgcaatggtgatcataaccggctcagatctccacaatggcattattgggttttctgaagagagccagagcggattggaattgagggagggagcagtcatgcggcgcctgcatctaattgtcaccaggcagcccaatagagccttcgaggatgtgaaagtgttttggagagtgacacttaacaaaactgtggtggtcctccagaaggatggagtgaacttggtggaagaactgcagagtgtatccggaacaacaacttgtaccatgggccaaacgaaatgcttcatctcgattgagctgaaacccgagaaggtgccccaggttgaggtctacttcttcgttgagctgtacgaggctaccgccggagctgcaatcaacaactccgccaggttcgcccagataaaaatccttgaatcggatgagtcacagtctctggtatacttcagtgtcggatctcgtctcgctgtggcccacaagaaagccactctgatttctcttcaggtggccagggatagtggcactggcctgatgatgtctgtgaacttcagcacccaggagttgcgcagcgctgagacaatcgggcgcacgattatttctccagctatcagtggcaaggacttcgtgatcaccgaggggaccctagtgtttgaaccaggtcaacggtccacagtgctggatgtgattttgactccagaaacgggctctctgaactccttccccaagcgcttccagattgtgctgtttgatcccaaaggaggggctcgtattgataaggtctatggaacagccaatatcaccttggtcagtgacgccgacagtcaagcaatttggggcctggcggaccagctgcaccaacccgtgaatgatgacattctgaaccgcgtgctgcacacgatcagtatgaaggtggccacagagaacaccgacgagcagctgtcggccatgatgcatctaatcgaaaaaattaccaccgagggaaagatccaggcattctctgtggcaagccggacactgttttatgagatcctgtgctctcttataaaccccaaaaggaaggacacacgaggtttcagccactttgcagaagtaaccgagaacttcgcatttagtttactgacaaacgtgacatgcggctctccaggagaaaagagcaagaccattcttgactcatgtccgtatttatccattttggctcttcactggtaccctcagcagatcaatgggcacaaattcgaggggaaggagggagattatatacgcattcccgaacggctgttggacgtacaagatgccgagatcatggccggcaagtccacgtgtaaattggttcagtttaccgaatactctagtcaacagtggtttatttcaggcaataacctcccaactctgaagaacaaggtgctaagtctgtccgtgaagggccagtcatcacaattactcacaaatgacaacgaggtgttataccgaatctacgccgccgagccacgaatcatcccacagacatccctttgtctgctgtggaatcaggccgccgcctcctggctgtccgattctcagttctgcaaggtcgttgaagaaaccgccgactatgtggaatgtgcttgttcgcatatgtccgtctacgccgtatatgccaggactgataacttgtcgagctataacgaggccttctttacctccggcttcatttgtatttcgggcctctgcctcgctgttctatctcatatattttgcgcccgatactctatgtttgctgccaaactcctgacccacatgatggcagcttcactgggcacacagatcctgtttttagccagcgcatatgcatccccgcagctggcagaggagagttgttctgccatggcagccgtcactcattatctctatctctgtcagttctcctggatgcttatccagagcgtgaacttctggtacgttcttgtcatgaatgacgaacacaccgaacgtaggtacctactgtttttcctcctttcctggggactgcccgctttcgtggtgatcctcctgatcgtcattctgaagggcatctaccaccaatctatgagccagatctatggtctcatacacggcgacctatgcttcatcccaaatgtgtacgcagccctcttcacggcagctctcgtaccacttacatgcctggtcgtcgtctttgtggtttttatccatgcctaccaagtcaagccccagtggaaggcttacgatgatgtgtttcgaggccgaactaacgccgctgaaattcccctgattctctatttgttcgcactaatcagtgtgacctggttgtggggcggcctgcacatggcgtatcggcatttctggatgctggtactgttcgtcatattcaattctctgcaaggtttatacgtgttcatggtctactttattctacataatcagatgtgctgtcccatgaaggcctcctacactgtcgaaatgaacggccatccaggtccgtccacggctttctttacacctgggtccggtatgccacctgctggtggggagatatctaaaagcacgcagaatttgatcggagcaatggaggaagtgcctcccgattgggaaagagcttctttccagcagggaagtcaagcctctcctgatctgaaaccttctccacaaaatggggccacattcccttcttcaggaggctacgggcagggatcactgattgcggacgaagagtcccaggagttcgatgatctgattttcgcactgaaaaccggtgccggcctgtcagtgtccgacaatgaatccgggcagggatcacaggagggtgggaccctcactgactcacaaatagttgaactcagacgaattccaatagccgatacccatctttag

SEQ ID NO: 117914 - DNA, 4188 bp, synthetic construct
  misc_feature 1..4188: note = Description of Artificial Sequence: Synthetic coding sequence
  source 1..4188: mol_type = other DNA
atgactggcgcggagatagagagtggagctcaggtgaaacccgaaaaaaaaccaggagaagaggttgtcgggggagccgagattgaaaacgacgtgccactggttgtcaggcccaaggtgcgcacacaagcccagattatgccaggtgccaggcccaagaacaaaagtaaggtaatgcccggcgcctcaacaaaagtggagactagcgcagtcggaggcgctagacctaagtccaaggccaaggctatccccgtgtcccgatttaaagaggaggcccagatgtgggctcagcccagattcggggctgaacggcttagcaagacagagaggaattcccagaccaacattatcgccagtcctctggtctcaacagactccgtgctcgtggcaaaaactaagtatttgagcgaagacagggaactcgtgaacaccgatacggagtctttcccgaggcgcaaggcacactatcaagctgggtttcagccatcatttagaagcaaggaggagactaacatgggttcctggtgttgtccccgtcccacctccaagcaagaagcctctccaaactcagactttaagtgggtcgacaagtctgtgagctccttattttggtcaggcgacgaggtcacagctaaattccaccccggcaatagggtgaaggattcgaaccgatcaatgcacatggccaaccaggaggctaatacgatgagcaggtcccaaacaaaccaagagctatatattgccagtagttccgggagtgaagacgagtccgtcaagacgccatggttttgggcccgcgacaagaccaacacatggagcggtcctagagaggaccctaattcacgctccagatttcgcagcaagaaggaggtgtatgttgaatcaagttcagggtctgaacacgaggaccatctggaatcctggttcggcgcaggaaaggaagcgaagttccgcagcaaaatgagagctgggaaggaggctaacaatagggcccggcatcgggcaaaacgcgaggcttgtatcgatttcatgccggggtccattgatgtgatcaagaaggagtcctgtttctggcccgaagaaaacgccaacacgttctcccggcctatgattaaaaaagaggcccgagcgcgagcaatgacaaaggaggaggccaaaacaaaggcacgtgcccgagctaagcaagaggcccgaagcgaggaggaagccttgattggaacctggttctgggctaccgacgagtcaagtatggcagatgaagctagcatagaatcctctctgcaagtggaggatgaaagtataatcggctcatggttctggaccgaggaagaggcttcaatgggtaccggagcctcctcgaagagccggccccgcacggatggggaacgcatcggagactctctcttcggggcccgcgagaagacatctatgaaaacaggggcggaagcaactagcgaatcaattttggccgcagatgacgaacaagtgattattgggtcatggttttgggccggggaggaggttaatcaagaagctgaggaagagaccattttcgggtcatggttctgggtgatcgatgccgcctcagtggagagcggcgtgggcgtaagctgcgagtctcgcactaggtctgaggaggaagaagttattggaccctggttctggagcggggagcaggttgatattgaggcaggcataggggaggaagcgcgccctggagcagaagaagagacgattttcggatcttggttctgggccgagaatcagacgtatatggattgccgggccgagacaagctgtgatacaatgcagggagcagaggaagaggaaccgattatcggatcctggttctggacgagagtggaagcatgtgttgaaggagatgtcaattctaaatcttcgttggaagacaaagaggaagccatgattccctgtttcggcgccaaagaagaagtaagtatgaaacacggaaccggggtccgttgtagatttatggctggcgccgaggagacaaataacaaatcctgtttttgggccgagaaggagccatgcatgtacccagcggggggcgggagttggaagagccggccggaggaagaagaggatatcgtgaactcttggttttggtccaggaaatataccaagcccgaagccataatcggatcctggttatgggccacggaagaatctaacatcgacgggactggggagaaggccaagctgctgacagaggaggaaaccattattaacagctggttttggaaagaagatgaggccataagcgaggcaacagaccgggaagagtctagaccagaggccgaggaaggcgacattattgggagctggttttgggctggagaagaagaccggctggagcccgctgcagaaacacgcgaggaggaccgtctcgccgcagaaaaggaggggattgttgggtcttggtttggcgcccgagaagaaaccatccgtagagaagcaggttcatgttccaaatcttcccccaaggccgaggaagaggaggttataatcgggtcatggttttgggaggaagaggctagccctgaggccgtggccggggtggggtttgagagcaaacccgggacagaggaggaggaaattacagtcggatcttggttctggcctgaggaggaagcatctatccaggctggttcccaggcagtcgaggaaatggagtccgaaacagaagaggagactattttcggaagctggttctgggatggaaaagaagtgtccgaggaagcaggcccatgctgtgtgtctaaacccgaagacgatgaggagatgatcgtcgagtcatggttttggtcccgagataaagctataaaggaaaccggcaccgtagcaacatgtgagtccaaaccggaaaacgaagagggggccatcgtgggcagttggttcgaagcagaagatgaagttgacaaccggaccgataatggaagcaactgcgggtcccggacacttgctgacgaagatgaagcaatcgtggggtcttggttctgggccggtgacgaagcccacttcgagagcaacccgtcacctgtctttagggccatttgccggagcacctgcagcgtcgagcaggagcccgatcccagccgacggccacagagctgggaggaggtgacagttcagttcaaaccaggtccttggggaagggtggggttcccttctatatcccccttcagatttcctaaagaagctgcgtccctcttttgtgaaatgtttggcggcaagccaaggaatatggtgcttagcccagagggcgaggatcaggagagcttgttacagccagatcagccaagccccgaattcccgttccagtacgacccttcttatagatctgtccaagagatcagggagcacctgcgagccaaagagagtaccgaaccagagagttccagctgcaactgcattcagtgtgaactcaagataggctctgaggaattcgaggagctgttgcttctgatggagaagatcagggacccatttattcatgaaatatccaagatagccatgggcatgcgcagtgcctctcaatttacgcgcgacttcattagggattcgggggtcgtctccttgatcgagaccctcctgaattatccaagtagtagagttcgaacgtccttcttggaaaacatgattaggatggcaccgccctaccctaatctgaacatcatccaaacatacatctgcaaggtgtgtgaagagacgttggcatattcagtcgatagtcccgagcagctgtcgggcattagaatgatccgccatctgacaactaccactgactatcatactttagttgctaactatatgtcaggctttttgtcactcttggcaacaggcaacgccaagacacggtttcatgtcctgaagatgctgctgaacttatcagagaatctcttcatgaccaaggaactgttgtccgctgaggctgtgtccgaatttatcgggctcttcaacagagaggagactaatgataatatacagatagtcctagcgatctttgagaacattggcaacaacataaagaaagagacagttttttcagacgatgactttaatatagaaccactgatttctgcgtttcataaagtggaaaaattcgccaaggagctacaaggtaagacagacaatcagaatgaccctgagggcgaccaggaaaactag

SEQ ID NO: 117915 - DNA, 4188 bp, synthetic construct
  misc_feature 1..4188: note = Description of Artificial Sequence: Synthetic coding sequence
  source 1..4188: mol_type = other DNA
atgactggtgccgaaatcgaatcaggagcccaggtcaaaccagagaagaagcccggagaagaagttgtggggggggcggagattgaaaacgacgttccgctagtggtgaggccaaaagttcggacgcaggcccagatcatgccaggggctcgccccaagaataagagtaaagttatgccaggcgcgtccaccaaggtcgagaccagtgctgtggggggagcacgcccaaaatctaaggcaaaagccatccctgtgtcaaggtttaaggaagaggcgcagatgtgggcccagccccggttcggcgccgaacgcttgagcaagacggaaagaaattctcagacaaatataatcgcatcacccctggtctccactgattccgtcctggtcgccaaaaccaaatacctgtctgaggacagagaactcgtgaacaccgacactgagtcattcccacggagaaaagcgcactatcaggccggatttcagccaagcttccgcagcaaggaggaaaccaacatggggagttggtgctgtcctcggcccacatcaaagcaggaggcctccccaaattccgacttcaaatgggtggataagtccgtcagcagcctcttctggtctggagatgaggtgactgccaagttccaccctggtaatagagtgaaggatagtaataggagtatgcacatggcaaatcaagaggcgaatactatgtcgcgatcccagactaaccaggagctgtacatcgcatcgagcagtgggtccgaagatgagagcgttaagaccccatggttttgggcccgagataagaccaatacctggtctgggcccagagaagaccccaattcgagatcccgcttcaggtctaaaaaagaggtgtacgtcgagtcttcttctgggtcagaacatgaggaccacctggaatcatggttcggagctgggaaggaagctaagtttcgaagtaaaatgagggcagggaaagaagcaaataaccgcgcaagacaccgcgcaaaacgtgaggcttgtatcgactttatgccaggatcgatcgatgtgatcaaaaaagaaagctgcttctggcccgaggagaatgctaacactttctcgcggccaatgatcaagaaagaagcccgcgcaagagccatgactaaggaggaagccaagaccaaggcaagagcgagagcgaaacaggaggcacgttctgaggaggaggccctgatcgggacctggttttgggcaaccgacgaatcttcgatggcagacgaggccagcatcgaatctagtctgcaggtggaagatgagagtatcatcggatcgtggttttggactgaggaagaggctagcatgggaacgggggccagctccaagagtcgtccacggactgacggggaaaggataggcgactcacttttcggggcgagagagaaaacgtccatgaagacgggcgctgaagcgacatctgagtcaattctggctgcggatgacgagcaagtcatcatcgggtcctggttctgggctggggaggaggttaatcaagaagctgaagaggagactatcttcgggtcatggttctgggtgatcgatgctgcatccgtcgagagtggtgtaggggtgtcgtgtgaatcccgcaccagatccgaggaggaggaagtaatcgggccctggttctggagtggggagcaagtggatatcgaggcaggcatcggggaagaggccagacctggtgcagaggaagagaccatcttcggatcctggttttgggccgagaatcagacatacatggattgccgtgcagagaccagttgcgacaccatgcagggtgcggaggaagaggaaccaatcatagggtcctggttttggaccagagtagaggcttgcgtggagggagacgtgaattctaaatcctcactggaagacaaggaggaggcgatgattccttgctttggggcaaaggaagaagtcagcatgaaacacggaacaggtgtacgctgtagatttatggctggagccgaagagaccaacaataagtcatgtttctgggctgaaaaagaaccttgcatgtatccggctgggggagggagttggaagagcaggccagaggaagaagaggatatcgtgaacagttggttttggtcccgcaagtacacgaagcccgaagctatcatcggctcgtggctctgggcgaccgaagagtctaacatcgacggcactggcgagaaggccaaattacttacagaagaagaaacgatcatcaattcatggttctggaaagaggacgaggccatttccgaagccactgatagagaggagtcgagaccagaagcagaagaaggtgacatcattgggagctggttttgggcaggggaagaggatcggttagagcctgctgcggagactcgcgaggaggataggctcgctgccgaaaaagagggcatcgtcggatcctggttcggggccagggaggaaaccattcgtcgggaagccggtagttgttccaaaagtagtcccaaagccgaggaggaggaggtgattattgggtcctggttctgggaagaggaagccagccccgaggcagtggccggtgttgggttcgaatccaaacccggcactgaagaagaggaaatcaccgtgggttcctggttctggcccgaagaggaagcctcaatacaggctggcagccaggctgtggaagaaatggagagtgagacagaagaagagaccatcttcggttcatggttctgggacggaaaagaagtttctgaagaggccggtccttgctgcgtgtcaaaacccgaagacgatgaggaaatgattgttgagtcctggttctggtctcgggacaaggctatcaaagaaaccggcacagtcgccacctgcgagtcaaagccggaaaacgaggaaggggccatagtcgggtcttggttcgaggcggaggacgaggtcgacaaccggacggataacgggtccaattgtggttctcggacacttgccgacgaggacgaggctatagtggggtcttggttctgggccggtgacgaggcccatttcgagtcaaatccttcgcctgttttccgggccatctgcagatcaacttgtagtgttgaacaggagcccgacccgtcgagaagacctcagagttgggaggaggtcaccgtgcagttcaaacccggcccctggggcagggtcgggtttccctccattagtccctttaggttccccaaggaggccgcgagtctgttctgtgagatgttcggcggcaagcccagaaacatggtgttgagtccggaaggcgaagatcaggagagtctcttgcagcccgaccagccttcgcccgagtttccgttccagtatgacccttcgtatcggtcagtacaggaaatcagagagcacctgcgggcaaaagagagcacagaacccgaatcgagcagttgtaactgtattcagtgtgagctaaagataggctccgaggaattcgaggagctccttctgttgatggagaagatacgagatccctttatccacgaaatatccaaaatagcaatgggaatgcggtccgcctctcaattcacccgggattttattagggactctggcgtagtgtccctgattgaaacactgctcaactatccgtctagcagagtcaggacatccttcttggaaaatatgatcaggatggcacccccttaccctaacctgaatatcatccagacctacatttgcaaggtgtgtgaggaaacgctcgcctacagtgttgactcgccagagcaactgtctggcatcaggatgatcagacatctaacaactaccacagattaccatacattagtggccaattatatgtcaggctttctatctttgttggctacaggcaacgcgaagacaagatttcacgtcctgaagatgcttttgaatctgtctgagaacctctttatgactaaggaactattgtccgccgaagccgttagtgaatttataggcctttttaatagagaggaaaccaacgacaacatccagattgtcctggctatcttcgagaacataggaaacaacatcaaaaaggaaacagtgttcagcgacgatgactttaacatagagccactgatctctgcatttcataaagtggagaaatttgctaaggagttgcaaggaaagactgataatcagaatgaccccgaaggggatcaggagaactag

SEQ ID NO: 117916 - DNA, 4188 bp, synthetic construct
  misc_feature 1..4188: note = Description of Artificial Sequence: Synthetic coding sequence
  source 1..4188: mol_type = other DNA
atgactggcgctgagatcgagtcaggcgcacaggtgaagccagagaagaagccaggggaggaggtcgttgggggtgccgagatagagaatgatgttcccctggtggtccgtcccaaagtcagaacgcaagcgcagatcatgccaggtgccaggccgaagaataagtccaaagtgatgccgggggccagtactaaagtggagacatctgccgttggtggggcccggcccaagtcaaaggctaaggctatccccgtttcaagatttaaggaggaggcacagatgtgggctcagccccgctttggcgctgaaagactctctaagacggagagaaactcccaaactaatatcatagcctcccctctcgttagtactgattccgttctcgtcgccaaaacgaaatatctgtctgaagacagggagctggtgaatactgacacggaatcatttcccagaaggaaggcccactatcaggccggtttccaaccatctttccgcagcaaggaagagaccaacatgggctcgtggtgctgtccaagacccacatctaagcaagaagccagccccaactccgactttaagtgggtcgacaaatccgtgtcgagcctcttctggtccggagacgaagtgacggccaagtttcacccagggaatcgggtaaaggacagcaatagatcaatgcatatggcaaaccaggaagcaaacacgatgagccggtcccaaactaatcaggaactctacatcgcctcctcatcgggctccgaagacgaatccgttaaaactccttggttctgggcgcgagataaaacaaacacctggagcggacccagggaagaccccaattcgagaagtcgctttcgatcaaagaaggaagtctatgtcgaaagctcttccgggagcgagcatgaggatcatctcgagtcatggttcggggctgggaaagaggctaagttccgttccaagatgcgagcgggtaaagaggccaataatcgtgccaggcatcgcgccaaaagggaggcctgtatcgactttatgcccggctctatagacgtaattaaaaaagaaagttgtttttggcccgaggagaacgccaacactttttctcggccaatgattaagaaagaggccagagctagagcaatgactaaggaggaagccaagacaaaagctagagctcgtgctaagcaggaagctaggtccgaggaagaggcgctgattggcacatggttttgggcaaccgacgaatcctccatggctgacgaggcgtccattgaatcttccctccaggtcgaggacgagtccattattggttcttggttttggacggaggaagaggcctcaatgggaaccggcgcatctagcaaaagcagacctcgcactgacggcgagcggatcggtgactctctgtttggggctagagagaagacatcaatgaagaccggcgctgaagctacatccgaaagtattctggcagccgacgatgaacaggtgattatcggatcctggttttgggccggggaagaggttaatcaggaggctgaagaggagaccatttttggtagttggttttgggttattgatgccgcctcggtggagtctggtgtgggggtctcatgcgaatctaggaccaggtctgaggaggaggaggtaatcggtccttggttctggtcaggcgaacaggttgatattgaagcggggatcggcgaggaagcaagacccggcgctgaggaagagactatctttgggtcttggttctgggcagaaaaccagacttatatggattgccgcgccgagacctcctgtgacactatgcagggagccgaggaggaagagccaatcatcggtagctggttttggacccgggtcgaagcatgcgtagagggagatgtgaatagtaaatctagcctggaagacaaagaagaggccatgattccatgcttcggcgcaaaagaagaagtgtcaatgaaacacggaacgggagtgcgttgtagatttatggctggcgcagaggaaacaaataataagtcttgcttctgggctgaaaaagaaccctgcatgtaccctgctgggggaggcagctggaagtcacggcccgaagaggaggaggatatcgtcaattcttggttttggagccgtaaatacacaaagcccgaggctatcattggcagctggctgtgggccactgaagagtccaatattgatggcaccggggaaaaggccaagctattgaccgaggaagagacaatcatcaactcctggttctggaaagaggatgaggccatttctgaggccaccgatagagaagagagccgcccggaagctgaagagggtgatataataggctcctggttttgggcgggggaggaggaccgcttggagcctgccgcggaaacaagagaggaagaccggctcgccgccgaaaaggaaggaatcgtgggaagctggtttggcgccagagaagagaccatccggcgcgaagctggctcgtgcagcaaatcttcacctaaagccgaggaagaggaagttataattggctcttggttctgggaagaagaggcatcgccagaggcagttgcgggggtgggctttgaaagtaagcccgggacagaggaggaggagattacagtcggcagctggttctggccggaggaggaagcgtccatacaggcgggtagccaggctgtggaggaaatggagagcgaaactgaggaggagaccatcttcggttcatggttttgggacggtaaagaggtgagtgaagaagctggaccgtgctgcgtctcaaagcccgaggacgatgaagagatgatcgtcgagtcatggttctggagcagagataaggccattaaagagactggaactgtggccacttgcgagtccaagccagaaaatgaagaaggcgctattgtgggatcttggtttgaagccgaggatgaggtcgataatcgcaccgacaatggatcaaactgtgggtcacgtacgcttgcagatgaagatgaggccatcgtgggtagttggttctgggctggcgacgaggctcactttgaatcaaacccttcacccgttttccgtgccatttgccgcagcacctgcagtgtggagcaagagcctgatcccagccgcagacctcagtcatgggaagaggtgaccgtccaatttaagcctgggccgtggggacgcgttggattcccctccatcagtcccttcagattccccaaggaagctgcatcattgttttgtgagatgttcggcggtaaaccgcggaacatggtgctttctcctgagggcgaagaccaggaaagtcttctgcagccagaccaaccgtcacccgagttcccattccaatatgatccgtcgtaccggtctgtacaggaaattagggaacacctccgggcaaaggagtcaaccgagccagagtcttctagctgcaattgcatccaatgcgagctgaagataggtagcgaggagttcgaggagttactgttacttatggagaagattagggatcctttcatacatgagatctcaaaaattgctatgggaatgcgctctgcttcgcagttcacccgggactttatccgggacagtggggttgtgagcctcattgaaaccttgttgaattatccctcaagtagggtcagaacgagcttccttgaaaacatgattagaatggccccgccttatcccaacctgaacatcatccaaacttacatctgtaaggtgtgtgaggagaccctggcatattccgtggacagccccgagcaactctcaggcattaggatgattcgtcacttgaccacaactaccgactatcatacgctggtagccaactatatgtcgggattcttgtccctgttggccacagggaatgccaagacgaggttccacgttctcaagatgctgctcaatctgtctgaaaacttattcatgactaaagaacttctttccgctgaggctgtctcagagtttataggactgttcaatcgcgaggagacaaacgacaacatccagatcgttctggccatattcgaaaacatagggaacaacataaaaaaagaaactgttttctccgatgacgactttaacattgaacctcttatcagcgcatttcataaggttgagaagttcgccaaggagcttcaaggcaagacggataatcagaacgacccagaaggtgaccaggagaattag

SEQ ID NO: 117917 - DNA, 4188 bp, synthetic construct
  misc_feature 1..4188: note = Description of Artificial Sequence: Synthetic coding sequence
  source 1..4188: mol_type = other DNA
atgacgggggctgagatagagtccggtgcgcaggttaagccagagaagaagccaggcgaagaggtagtggggggcgctgagatcgagaacgacgtcccgcttgtggtcaggcctaaggtacggacccaggctcagataatgccaggggcacgacccaaaaataaaagtaaggttatgccgggtgccagtaccaaggtggagacatctgctgtcggaggggcacggcctaagtccaaggccaaagccattccagtgagccgcttcaaggaagaagcgcagatgtgggcccagccacggtttggtgcagaaaggctgtctaaaactgagcgtaactcacaaacgaatattatcgcttctccccttgtgagcacagactccgtcctggtcgccaaaaccaaatacctgtcagaagatagagagctggttaatacggacacagaatctttccctcgtagaaaagcccattaccaggccggattccagcccagcttcaggtccaaagaagaaacaaacatgggctcgtggtgttgccctcgaccgacaagcaagcaggaggctagcccgaattccgactttaagtgggttgacaagtctgttagttcactcttctggagtggcgacgaagtgactgcaaagttccaccccggcaaccgcgtcaaggactcaaatcgcagtatgcacatggccaaccaggaggcaaatacaatgtcaagatctcaaacaaatcaagaactttatatcgctagctcttcaggctctgaagacgaaagcgtcaaaaccccctggttctgggccagggataaaaccaacacatggagcggcccacgtgaagatccaaacagtaggtcacggttccgcagcaaaaaagaagtctacgtcgagtcctccagcggcagcgaacacgaagaccatctggagtcttggtttggcgcaggcaaagaggctaaatttagaagcaagatgcgggctggaaaggaagctaacaaccgggctcgtcatcgtgccaagcgggaagcatgtatagattttatgcccgggtccatagacgttattaaaaaagaaagttgcttttggcccgaggaaaacgccaacacattttcccgcccaatgatcaagaaagaggctcgggcgagagcgatgaccaaagaagaagcaaagacaaaggccagggcacgggccaagcaggaagcacgaagcgaagaggaggcactcattggtacatggttctgggcaaccgatgaaagtagcatggcagatgaagcgtccattgagagttccctacaggtggaggatgagtcgattatcggatcgtggttttggactgaagaggaagccagtatgggaaccggcgcctccagtaagtctagaccaagaacagacggagaaagaattggggattctctattcggcgcccgtgagaagacatctatgaagacaggtgctgaagccacgtcagagagtatcttggccgctgacgacgagcaggtgattattggaagctggttctgggccggcgaagaggttaatcaggaagcagaagaggaaactatttttggctcatggttttgggtcattgacgcagcttcggttgaatccggtgttggcgtaagctgtgaaagtaggacccgatccgaggaagaagaggtaattggaccctggttttggtccggagaacaagtggacatcgaagctgggatcggtgaggaggccagaccgggagcggaagaggagaccatctttggatcatggttctgggcagaaaatcagacatacatggactgccgggctgagacgagctgtgacacgatgcagggtgccgaagaggaggagccgattatcggttcgtggttttggacccgggttgaagcctgtgtagagggcgatgtgaattcaaagagcagtctggaggacaaggaggaagccatgatcccatgtttcggggccaaagaggaggtaagcatgaagcatggcacaggcgtccggtgtcgattcatggcaggagccgaggagaccaataataagtcttgtttttgggcggagaaagaaccctgcatgtaccccgccgggggggggtcttggaaaagtagaccagaagaagaggaggatatagttaactcttggttctggtcacgcaagtataccaagccggaggcaattattggtagctggctctgggctacagaagaatccaacatcgatggcaccggtgagaaggccaaactgctgacggaggaggagacaatcattaatagttggttttggaaggaggatgaagctatttccgaagcaactgaccgcgaggagtcacggcctgaggcggaggagggtgatataattgggagttggttctgggccggggaagaagacaggctcgagccagctgcggagaccagagaggaggaccggttagctgctgaaaaagagggcattgtaggatcctggtttggtgcaagagaagaaacgataagacgtgaagcaggttcttgtagcaagagttcacccaaggccgaggaagaggaagtaattattggctcgtggttctgggaggaagaagcaagcccagaagctgtcgcgggagtaggtttcgagtctaagcccggaacagaggaggaagagattaccgtgggtagctggttttggcccgaagaggaagctagcatacaggctggctcacaagccgttgaggaaatggagtccgagactgaagaagagactatattcggtagttggttttgggacggcaaggaggtgagcgaagaagcagggccttgttgcgtttccaaacctgaagacgacgaggaaatgatcgttgaatcctggttttggagccgtgataaggcaatcaaggaaacaggcaccgtagccacctgcgagtctaaaccggaaaacgaagagggggcaattgtcggcagctggtttgaagcagaggacgaggtggataatcggaccgacaatggcagcaattgcgggtctaggactctggccgatgaagatgaggctattgttggatcatggttttgggccggagacgaggcgcatttcgaatccaatccctcacccgttttcagggccatttgcagatcaacctgctccgtcgaacaggaaccagatccatctagaagaccacagagttgggaggaggtgacagtgcagtttaaaccaggaccatggggacgagtcggttttcctagtatttccccctttagatttccaaaggaggccgcctctctgttctgtgagatgttcggaggcaaaccaagaaatatggttctgagcccagaaggagaggatcaagagtcactgctgcaaccagaccaaccttcaccagagtttcccttccagtatgacccaagttacagatcagtgcaggagattcgggaacatctgagggcaaaggagtcaactgagccggaaagctctagttgcaattgcatccagtgtgaattgaaaatcggatccgaagaatttgaagaattgttgctccttatggagaagatccgtgacccattcattcacgagatcagtaaaattgccatggggatgcgaagcgcctctcagttcacacgggacttcataagggattccggtgtggtgagtctgattgagaccctgcttaactacccttcctcacgagtccggacttcgtttcttgagaatatgattagaatggcacctccctacccaaacctgaacataattcagacgtacatctgcaaggtttgtgaggagacactggcctacagcgtagacagccctgaacagctgtctggtattaggatgattagacacttaaccacaactaccgactaccatacacttgtcgcaaattacatgagcggctttctctcgctcctggccacaggaaatgccaagactcggtttcacgttttaaaaatgttgctaaatctgagtgaaaatttgtttatgactaaagagctgctgagtgcagaagctgtttcagagtttatcggcctctttaatcgcgaagaaacaaacgataatatccagatcgtgttggccattttcgagaatattgggaacaatattaaaaaagagactgttttttcggatgacgacttcaacattgaacctctgatctccgcttttcacaaggtggaaaagtttgcaaaggaactccagggtaagaccgacaaccagaatgacccggaaggagatcaggagaactag

SEQ ID NO: 117918 - DNA, 1692 bp, synthetic construct
  misc_feature 1..1692: note = Description of Artificial Sequence: Synthetic coding sequence
  source 1..1692: mol_type = other DNA
atggacttcggcagtctggagactgtcgtcgcgaacagtgcgttcatcgcagcacgaggttcgttcgatgggagctcttctcaaccatcaagggataagaagtacctagccaagctgaaactccctccgcttagcaaatgcgagtccctccgcgattctctgtctctggagtttgagagtgtttgcctcgagcagccaatcggaaaaaagctcttccagcagtttttacagtcagctgagaaacatctgcccgctttagagctgtggaaagatatcgaagattatgataccgctgacaatgacctgcaaccccagaaagcccaaaccatactagctcagtacttagacccccaggccaagctcttttgttcattcctcgacgaaggtattgtcgcaaagttcaaggagggaccagtagaaattcaggacggcctattccagccactcttgcaggccacccttgctcacttgggtcaggcaccattccaagagtacttaggatctctgtattttctcagattccttcagtggaaatggcttgaagcccaaccaatgggcgaggattggttcctagactttcgcgtactggggaaaggtgggttcggcgaagtctctgcctgccagatgaaggcaacaggaaaactctacgcttgtaagaaactaaacaagaagaggctcaaaaaaagaaagggataccagggcgccatggttgaaaagaaaatattaatgaaggtgcatagtagattcatagtaagcttggcttacgcctttgagactaaagctgatctgtgtctggtgatgacaattatgaatggaggggatatacgctaccacatctacaacgtcaacgaagagaatcccggcttcccagaaccccgagcgctcttctatactgcgcagataatatgcggtctagagcatctgcatcagcggcgaatcgtgtaccgagatctgaaacctgagaacgtccttcttgataacgatggcaatgtgcgcatttccgaccttggtctggctgttgaattgcttgatggccagagtaagactaaggggtatgcaggaacgccagggtttatggccccagagctgctccaaggagaagagtatgatttctccgtggattatttcgctctaggggtaaccctttatgagatgatagccgcacgagggccctttcgggctcgcggggaaaaggtggaaaataaagagctgaagcatcgtataatatctgagcctgtcaagtatcccgataaattcagccaagcttcaaaagatttctgtgaagctctgttggagaaggatcctgagaaaagactcggcttccgggatgaaacatgcgacaaacttcgggcgcaccccctgtttaaagatctgaattggaggcaactggaggccggaatgctgatgccccctttcattccagatagcaagaccgtttatgccaaagacatccaggacgtgggggcattcagtacggtaaagggggttgcgtttgataagaccgatacagagtttttccaggaattcgcaacggggaactgtccaatcccttggcaagaggagatgatcgagacgggcatctttggagaacttaacgtgtggcgttcagatggccagatgccggacgacatgaaagggattagcggcggctctagctccagctctaagagcggtatgtgccttgtttcttag

SEQ ID NO: 117919 - DNA, 285 bp, synthetic construct
  misc_feature 1..285: note = Description of Artificial Sequence: Synthetic coding sequence
  source 1..285: mol_type = other DNA
atgattgctgccaggggccctttcagagcgcggggggagaaagtggagaacaaggagctgaagcatagaatcatctccgaacccgttaagtatcctgataagttttcacaagcaagtaaagacttttgcgaggctctcctggaaaaggatcctgagaaacgcttagggtttagagatgagacctgtgacaaactccgggcgcatccactctttaaagacctcaattggaggcaactggaagcaggaatgctgatgccaccctttatacctgattctaagacttag

SEQ ID NO: 117920 - DNA, 228 bp, synthetic construct
  misc_feature 1..228: note = Description of Artificial Sequence: Synthetic coding sequence
  source 1..228: mol_type = other DNA
atggagttggaaaacattgtggcaaacacagtcctcctgaaagccagagagggaggcgggggtaaaagaaagggaaaaagcaaaaaatggaaagagatactgaaatttccacacatatctcagtgtgaagatctgcgtcgcactatcggggaactttccggaagcctcattagctggagtagctcaacaaaggagcacgggaggcccactgaaataaagatgaggtag

SEQ ID NO: 117921 - DNA, 1458 bp, synthetic construct
  misc_feature 1..1458: note = Description of Artificial Sequence: Synthetic coding sequence
  source 1..1458: mol_type = other DNA
atgactaaatacctgacaccaaagagtcccgtcttcatcgcccaggtgggacaagatctcgtcagtcagaccgaagagaaactcctacagaagccgtgtaaggaattgttctctgcttgcgcacaaagcgtccacgaatacctgaggggagaaccttttcatgagtatctcgacagcatgtttttcgatcggttcttgcagtggaaatggttagaacggcaacccgtgacaaaaaacaccttccgtcagtacagggtactcggcaagggaggtttcggcgaggtctgtgcttgtcaagtccgagccaccgggaaaatgtatgcttgcaagcgcctcgagaaaaagcggataaaaaaaagaaaaggtgagagcatggcacttaatgagaagcagatactggaaaaagtcaactcacagttcgtggttaatctggcttacgcttacgagaccaaagatgctttatgcctggtgctcacaatcatgaacggcggggatctcaagttccatatttacaacatggggaaccccggctttgaggaggaacgcgccctcttctacgccgcagaaattttatgcgggctggaggacttgcatcgggaaaacacagtatatcgagatctgaagcctgagaacatactgctagacgactacggacatattcgaattagcgacctcggtcttgcggtgaaaatacccgagggcgaccttattcgaggccgggttggaaccgttggttacatggcccccgaggtccttaacaaccagagatacggattgtctcccgattattgggggcttggatgtctgatttacgagatgatagagggccaatcacccttccgcgggcggaaggagaaagtgaagagggaggaagtggatcggcgcgtgctggagaccgaagaggtttactctcataagttctcagaggaggcgaaatctatatgtaaaatgcttctcactaaagacgccaagcaacgactgggatgccaggaggaaggtgctgcagaggtcaagaggcaccccttttttcgaaacatgaactttaagcggttagaagccggaatgctggaccctccatttgtcccggacccacgggccgtgtactgcaaggatgtcttggacatcgagcagttttccactgtgaaaggggtgaacttggaccacacagacgacgacttttactctaagttttcgactggctctgtctcgattccctggcagaatgagatgatagaaactgagtgctttaaggagctgaacgtgttcggcccaaatggcaccttaccaccggacttgaatagaaatcaccctcccgagccgccaaagaaaggtttactgcaacgcctgtttaaaaggcagcatcagaataattcaaagtcctccccttcctcaaagacctccttcaaccatcacataaactccaaccacgtttcctccaactcaacaggatccagctag

SEQ ID NO: 117922 - DNA, 1773 bp, synthetic construct
  misc_feature 1..1773: note = Description of Artificial Sequence: Synthetic coding sequence
  source 1..1773: mol_type = other DNA
atggagttagaaaacatcgtcgccaataccgtgctccttaaggctagggaagggggcgggggaaaacgtaaagggaagtccaaaaaatggaaagagattttaaaatttccacacatctcacaatgcgaggacctgagacgcactatcgatcgggactactgttccttatgtgacaagcagcctataggccggctgctgttcaggcagttctgcgagacacgacccggtctggagtgctacatccaattcctcgattccgttgctgagtacgaggtgacaccagacgagaaactgggtgagaaagggaaagagatcatgacgaagtacttgactcccaagagtccagttttcatcgctcaagtcggtcaagacttagtgagtcagaccgaggagaaactgttgcagaagccatgcaaagaactgttttctgcttgtgcccaatctgtccacgaatatctgcgcggggagcctttccatgagtacctggacagcatgttttttgacagattcctgcagtggaaatggctggaacgccaacccgtcacaaaaaatacctttcggcagtatagagttctgggaaagggtgggtttggcgaagtctgcgcctgtcaggtgagggcaacaggaaagatgtacgcctgtaagcgccttgagaagaaaaggatcaaaaagaggaagggcgagtctatggcattgaacgagaagcaaatcctggagaaagttaatagtcagttcgtggtcaatttagcgtatgcctatgaaacgaaagatgcattgtgcctggtcctcacgataatgaatggcggggatctcaaatttcacatctacaatatgggtaatccaggcttcgaggaggaacgtgcacttttctacgccgctgagatactgtgcggactggaggacttacatagggaaaataccgtctaccgcgacctgaagcctgaaaacatcctgctggatgattacgggcatatccgcatttccgatctgggcctcgccgtgaagatcccagaaggagacctgatccgcgggcgcgttgggacagtgggttacatggcccctgaagtgctgaataatcaacgctacggcctcagccccgattactggggtctgggctgtctaatctacgagatgatcgagggccagtcaccattcagaggcaggaaagaaaaggtcaaacgcgaggaagtggatagacgcgttctggaaactgaagaggtttactcccacaagtttagcgaagaggctaaatcaatttgtaaaatgctcttgaccaaagacgccaagcagcgactgggatgccaggaggaaggggccgcggaagtaaaaagacacccatttttccgcaacatgaacttcaaaaggctggaagccgggatgttggacccacctttcgttccagaccctagggccgtttactgtaaggacgtgctggacattgaacaattttctacagtgaagggagtcaatctggaccacactgacgacgatttctactccaaattttccaccggttcggtgtccattccatggcagaacgagatgatagagaccgagtgttttaaggaacttaacgtcttcggtccgaacggtactctgccacctgatctcaaccggaaccatcctccagagccccctaagaagggactgctgcagcgtcttttcaagaggcagcaccaaaataactcaaagtccagccccagctccaagacaagcttcaatcaccacattaatagcaaccatgttagtagtaattcgacaggcagtagctag

SEQ ID NO: 117923 - DNA, 1200 bp, synthetic construct
  misc_feature 1..1200: note = Description of Artificial Sequence: Synthetic coding sequence
  source 1..1200: mol_type = other DNA
atgacaaagtacttaaccccgaaatcacccgtgttcattgctcaagttggccaggatcttgtgagccagactgaggagaaactgctgcaaaagccctgcaaagaactgttctctgcttgcgctcagtccgtacacgaatatcttcggggcgagcccttccacgaatacctggactcaatgttcttcgaccgctttctgcagtggaaatggttggaaagacagcccgtgacgaagaacacgtttagacagtaccgggtgttgggcaagggaggattcggagaagtatgtgcctgccaagtgcgcgcaaccggtaagatgtatgcatgcaagaggctggagaagaagagaataaaaaaaagaaaaggcgagtcaatggcccttaacgaaaagcaaatcctagaaaaagttaattctcagtttgttgtcaacctggcctatgcctacgagactaaggatgcgctatgtctagtcctgaccatcatgaatggaggggatttaaagtttcacatctataacatgggcaatccaggcttcgaagagggtgctgctgaagtgaagagacacccgttcttccgcaacatgaatttcaaacggctggaagctggtatgctggatcccccatttgtccctgatccgagggccgtctactgcaaagatgttctggacattgagcagttctcaaccgtgaagggcgtaaacttagaccataccgacgacgacttctatagcaaattctctaccgggtcggtgtccattccatggcaaaacgaaatgatcgaaacagagtgtttcaaggagttgaatgttttcggcccaaatggcacactacccccagacctaaatcgtaaccatccacccgagccccccaaaaaaggtctgctccagcgcctatttaagagacagcaccagaacaactccaaatcgtccccaagtagtaagtccacagtggagccagcacaaacactgcttttgcggtccggctcatccggggcacctgctctcgttgggctgcccggggagacccccggagccggcgagggcggtaggcctagtcgccgccggagaacatcgcgctttctcaaggaaatttctactcaagtttgcttcccaaggcgacctagacccggttggattggctttgtgttcggcgagcactgcaatagaaaccccataggttacgacaatctgcacgttttttag

SEQ ID NO: 117924 - DNA, 1731 bp, synthetic construct
  misc_feature 1..1731: note = Description of Artificial Sequence: Synthetic coding sequence
  source 1..1731: mol_type = other DNA
atggaactggaaaacatcgtggccaacacagtactactgaaggcaagggaagggggaggcggtaataggaagggaaagagtaagaagtggagacagatgctgcagtttccccacatcagccagtgcgaggagcttcgcctgtccctggaaagggactatcacagcctctgcgaaagacaacctataggtcggttgctgtttcgagagttttgtgccacccgccctgaactgtcacggtgcgtggcctttctggacggagtggctgagtacgaagtgacccctgacgacaagcggaaggcctgtggcaggcagctgacccagaacttcctgagccacactggtcctgatttaatcccggaggtaccgaggcagctggtcacaaactgcacccagcgtctggaacaaggaccatgtaaggacctgttccaggaactgaccaggctgacacacgaatatctgtcggtcgcccctttcgcggattatctggatagcatctacttcaaccggtttcttcagtggaagtggctggaacggcagccagtgacgaaaaataccttcaggcaatatcgcgtgctggggaagggagggtttggggaagtctgtgcctgtcaagtgcgggccactggcaagatgtacgcctgtaagaaattagagaagaagaggatcaaaaagaggaaaggagaagccatggccctgaacgagaaacagatattggaaaaggtgaactctaggttcgtggtgagccttgcttacgcttatgaaactaaggacgcactgtgcctagtgctcacactgatgaatggtggcgacctgaagttccatatttaccatatgggacaggctgggtttccagaggcacgcgcagtgttttacgcggcagagatttgctgcggattagaggacctgcaccgagaaaggatcgtgtatagggacctgaagcctgagaatatcctgttagacgatcatggtcacatccgaatcagtgatctcggcctggcagtgcatgtccccgagggccagaccatcaaaggacgcgtggggacggttggctacatggcccctgaagttgtcaaaaacgaacggtatacattctcaccggattggtgggcgttaggatgtctgttatacgaaatgatagccggccaatctccctttcaacagagaaagaagaaaataaagcgagaggaggtggagcgcctcgtcaaggaggtcccagaagagtactcagaacgtttcagccctcaagcccgctctttatgttctcaactgctctgcaaagaccccgcagagcggctgggatgtcggggcgggtcagccagagaggtcaaagagcatcctctgtttaagaagttgaatttcaagagactcggtgctggaatgctggaacctcctttcaaacctgatccacaggcaatttactgtaaagatgtactcgatatcgagcaattctctactgtaaaaggagtggaactggaaccgacagaccaggatttttaccaaaagttcgctacaggatctgtcccgatcccctggcaaaatgagatggtggaaacggaatgtttccaggagctgaatgttttcgggctcgatggctcagtgccaccagacctggattggaagggtcagccccccgccccgcctaagaagggcctgctccagcgactcttcagtcggcaggactgttgcggcaactgttctgactctgaggaagagttacccaccagactctag

SEQ ID NO: 117925 - DNA, 1683 bp, synthetic construct
  misc_feature 1..1683: note = Description of Artificial Sequence: Synthetic coding sequence
  source 1..1683: mol_type = other DNA
atggagctggaaaacatcgttgccaacaccgtcctcctgaaagcccgagaggggggtggcggcaatcggaagggtaagtcaaagaagtggagacagatgctgcagtttcctcatataagtcaatgtgaagaattaaggctttcgctcgagcgagactaccattccctttgcgagcgccaacccatcggacgactgctattcagagagttttgcgccacacggcccgagctgtcaaggtgtgtggctttccttgacggggtcgcagagtacgaggttacccccgacgacaagcggaaagcctgcggtaggcagcttacacagaacttcctatcacatacagggcctgatttgataccagaggttccaagacagctggtcacgaactgtacacagagactggaacaggggccttgtaaagacttgtttcaggagctgaccaggctgacccatgaatacctctcggtggctccctttgctgattatctggattcaatctacttcaatcgcttcttgcagtggaagtggctggagaggcagcccgttacaaagaacacgtttaggcagtatcgcgtattggggaaaggcggcttcggtgaagtatgcgcttgtcaagtacgggccaccggaaagatgtatgcatgcaagaagctggaaaaaaaacgaatcaaaaagagaaagggggaggcaatggcccttaatgaaaagcagatcctggaaaaagttaactcaaggtttgtagtttccctggcatatgcctacgaaactaaagatgctctgtgcttagtgcttactttaatgaacggtggcgaccttaaatttcacatttatcatatgggccaggcaggcttccccgaggcgagggctgtcttttatgcagcagaaatatgttgcggcctggaggacttgcaccgggaaagaatagtgtacagggatctaaagcccgagaacatcctgctcgacgaccacggccacatcaggattagtgatttaggacttgccgtccacgtgcctgagggccagaccatcaagggaagggtcggcacagtagggtacatggccccagaggtggtgaagaatgaacgctacaccttttcacctgactggtgggcccttggctgcctgctttacgaaatgatcgcgggtcagtctccattccagcagagaaagaaaaagatcaaacgagaggaggttgaacggcttgtgaaggaggtgccagaagagtattcagagagattctctcctcaggctaggagcctgtgcagtcaattactgtgtaaggatccagcagagcgtttgggttgcaggggcggtagcgcacgggaagttaaggaacaccctctctttaagaaactcaatttcaagaggctcggggcaggaatgctcgaacccccctttaagccagatccacaggccatctattgcaaagatgtgcttgacatcgaacagttttcaacagtcaaaggtgtggagttggagccaaccgaccaagatttttatcaaaagttcgccaccgggagtgttccgatcccatggcagaacgagatggtggaaaccgaatgttttcaagaattaaatgtcttcggtctcgatggctctgtgccacctgacctcgactggaagggccagccccccgcccccccgaagaagggtctcctccagcgcttgttctctcgccaaagatag

SEQ ID NO: 117926 - DNA, 1770 bp, synthetic construct
  misc_feature 1..1770: note = Description of Artificial Sequence: Synthetic coding sequence
  source 1..1770: mol_type = other DNA
atggagttagaaaatatcgttgctaatactgtcctgctcaaagcgcgtgagggaggtggcggtaaccgcaaaggaaagtccaagaaatggagacagatgctgcagtttcctcacatttcacagtgcgaagagctccggctgtcactggaaagagattaccattctctgtgcgagagacaacctattgggcgtctcctgtttagagagttttgcgccacgcgcccagagttgagtcgatgcgtcgccttcctggatggcgtagccgagtatgaagttacccctgatgataaaagaaaagcatgcggccgacagcttacccaaaatttcctgtcacacacgggtccagacctgattccggaagtgcctcgccagctggtaaccaattgcactcagagactggagcaaggcccttgtaaagacctctttcaggaactcactcgcctcacccatgagtacctttccgtggctccgttcgcagattacctcgattccatttacttcaaccgttttttacagtggaagtggctcgagcggcagccagtcacaaagaacacctttaggcagtatcgagtgctgggcaagggagggtttggagaggtgtgcgcctgtcaagtgagggccaccggtaagatgtacgcttgtaagaagttagaaaagaagaggataaaaaagagaaagggggaggctatggccctaaatgaaaaacagatcctggaaaaagttaattcccgctttgtagtctcactggcttacgcctacgagactaaggatgcactgtgcttggttctcaccctcatgaacggaggcgacctaaagtttcatatatatcacatggggcaggcaggcttcccagaggcgagggccgtcttttatgcagcagaaatatgttgcggtcttgaagacctgcatcgggagcgaatagtttaccgagaccttaaacccgaaaacatcctgctagatgaccacggccacatcaggatcagtgatcttgggcttgccgtgcatgtgcctgaaggacagactattaagggacgggttggaacagtcggctacatggcccctgaggttgtaaaaaatgagcgctacacgttctccccagattggtgggcgttaggatgtcttttatacgagatgatcgccggacagtccccttttcaacagcggaagaaaaaaatcaaacgagaggaggttgaacgactagtgaaggaagtcccggaggagtactccgagcgtttcagtccacaggccagatcattgtgctcacagctgctgtgcaaggacccggctgagagactgggatgtaggggagggtctgcgagggaggttaaagagcatcctctgtttaaaaagctcaactttaaaagattaggagccgggatgctggagcctccattcaagccagaccctcaagcaatctactgcaaggatgtgttagatatcgagcagttcagtaccgtgaagggagtggaactggagcctacggaccaggacttttaccaaaaatttgccaccggaagcgtgcctatcccctggcagaacgagatggttgaaaccgaatgctttcaggagctgaacgtgtttggtttagacggcagtgtcccacccgacctggactggaaaggacaacctcccgcccctcccaagaaagggttactacaacggttattttcacgccagcggattgcggtcgaaacggcggccactgctaggaaaagctcacctcctgctagttcaccccagccagaagcaccaacgagctcctggaggtag

SEQ ID NO: 117927 - DNA, 1662 bp, synthetic construct
  misc_feature 1..1662: note = Description of Artificial Sequence: Synthetic coding sequence
  source 1..1662: mol_type = other DNA
atggtggatatgggagcacttgataacctaatcgccaatacagcctacttgcaggccaggaagcctagtgattgcgacagcaaggaactgcagcggagacgacggtcactggcactccctggattgcaggggtgcgccgaactgaggcagaaattaagtctgaatttccatagcttatgcgagcagcagcccatcgggagacggctctttcgtgacttcttggcgactgtacccacattccgaaaggccgccacctttctggaggacgtgcaaaattgggaactggccgaggaaggaccaaccaaagatagcgcccttcagggcctggttgccacatgtgccagtgcaccagcgccaggaaatcctcaaccgttcctttctcaagcagtggctaccaaatgccaagcagctactacggaagaagagagagtggcagctgtgaccttggccaaggctgaggctatggctttcctgcaagaacagccctttaaggacttcgttacatctgctttttacgataagttcctccaatggaagctttttgagatgcagcctgtttcagataaatatttcacagagtttcgggttctaggcaaaggcggctttggcgaagtttgcgccgttcaggtaaagaacaccgggaagatgtatgcatgcaagaaactggataagaagcggctgaagaagaagggaggtgagaagatggccctcctggaaaaggaaattctggaaaaggtctcaagccccttcatcgttagcctggcgtacgcctttgaatccaagacacacctgtgccttgtcatgtccctgatgaacggaggggatctgaagttccacatttataatgttgggacccgcggactcgacatgagcagagtgattttctattcagctcagattgcttgcggcatgctgcacctacatgagctgggcatagtgtatagagacatgaaacccgagaatgtgctgctggatgacctcgggaattgcagactttctgacctgggcctggccgtggagatgaagggggggaaaccaatcacccagcgcgctgggacaaatggatatatggccccagagattctcatggagaaggtctcttattcgtaccctgtggattggttcgctatgggctgttccatctatgagatggtcgccgggaggaccccattcaaagattacaaagagaaggtttccaaagaggatcttaaacagcggaccctgcaggatgaggtgaaattccagcacgacaattttaccgaagaggccaaagacatctgtcggttgtttttggccaagaaaccagaacagcgactgggttctagggagaagtccgacgaccctcggaaacaccacttctttaagaccataaactttccccgacttgaggccggcttaattgagccaccattcgtccctgatcccagcgtggtttatgccaaagatattgccgaaatcgacgacttcagcgaggtacgcggcgtggagttcgatgataaggacaagcagtttttcaagaactttgcgaccggcgcggtaccaattgcttggcaggaggagattatcgagacaggcctgtttgaagagttaaatgaccctaaccgccctacaggatgcgaagagggtaactcatcgaaaagcggagtgtgcttgcttctatag

SEQ ID NO: 117928 - DNA, 2088 bp, synthetic construct
  misc_feature 1..2088: note = Description of Artificial Sequence: Synthetic coding sequence
  source 1..2088: mol_type = other DNA
atggaggagaaacccgggcagccccagccacagcaccatcattcacatcaccacccgcatcaccaccctcaacagcaacaacagcagccgcatcatcaccatcattactacttctacaaccattcccacaaccaccaccatcaccaccatcaccagcagccgcaccagtacctgcagcacggggccgaagggtctcctaaggcacaacctaagcccctcaagcacgagcagaagcatactctgcagcagcaccaggagacacccaagaagaagaccgggtacggtgagcttaatggaaacgccggggagcgagagatttccctgaagaacttgagttccgacgaggcaacaaatcctatttctagggtgctgaacgggaatcagcaggtcgtggatacttctctgaaacagaccgtcaaggctaatacttttggtaaagcgggcatcaaaaccaaaaacttcatccagaagaatagcatggataagaagaatggaaagagttatgaaaacaagtcgggcgaaaaccaatctgtggacaagtcagacacgattccaattccgaacggagtcgttacgaataactccggttacatcacaaatgggtatatgggcaaaggtgctgataacgacggaagcggctctgaatccgggtatactacacccaagaagagaaaggcccggcggaacagcgcaaagggatgtgagaacctgaatatcgttcaagataaaataatgcaacaagaaacctcagtccccaccctcaagcagggcttggagacttttaagccagactactccgagcagaagggaaatcgggtggatggaagcaaaccgatttggaagtacgaaaccggtcctggagggacttcacgagggaagccagctgtgggcgacatgctgcgaaaatcttctgattctaaacctggcgtatcaagtaagaaattcgacgaccggcctaagggcaagcacgcatccgctgtggcatctaaggaagacagctggacgttgttcaaacccccacccgtctttcctgtagataactcgagcgccaaaatcgtccccaagatcagctatgccagtaaggtgaaagaaaatctgaataagaccattcagaactcctcagtctctccaacctcctccagctcttcctcttccagcaccggcgaaacgcagacccagtcatcaagccggcttagtcaggttcccatgagcgcgttgaaatctgtcacttccgccaactttagcaacggcccagtgctagccggcacggatggtaacgtgtatcctccaggtggacaaccactgctgacgactgcagcgaacactctgacacccatcagcagtggtaccgactcagtcctacaggatatgtccttgacatctgcagcggttgaacagattaaaacatctttgttcatttacccgagtaacatgcagactatgctgttgtccacagcacaggtggatctcccgtcccagacagatcagcagaacttgggtgacatatttcaaaatcagtggggacttagtttcatcaatgagcccagtgcagggcctgagaccgtgacagggaagtcttctgaacataaggtcatggaagttacatttcaaggggaatacccagctaccctcgtgtctcagggcgcagagattatccccagcggcaccgaacatcctgtgtttccgaaggcatatgagctggaaaagagaaccagtccccaggtgctggggagcatcctgaaatccggaacaacctctgaaagcggcgccctgagcctggagcccagccacatcggagaccttcagaaagctgacacctcatcccagggggccctggtgtttctgtctaaagattatgagattgaatctcagaaccccttggcgagccctactaatacactgctcggcagcgcaaaagagcagaggtatcaaaggggcctggaaaggaacgatagttggggatcctttgaccttcgagcagcaatcgtctatcacaccaaggaaatggagtctatctggaacttgcagaaacaggatcctaagcgcataattacgtacaacgaagccatggactccccagatcagtag

SEQ ID NO: 117929 - DNA, 534 bp, synthetic construct
  misc_feature 1..534: note = Description of Artificial Sequence: Synthetic coding sequence
  source 1..534: mol_type = other DNA
atgtctcgcaaagggccaagagctgaggtgtgtgccgattgctccgcccctgatcccgggtgggccagtatctctagaggggtcttagtgtgcgacgagtgctgttccgtacacagatctctgggccggcatatatccatagtgaaacacctgaggcatagcgcatggcctcctaccctactgcagatggtgcacacactcgcaagcaacggcgccaactctatttgggagcacagcttgctcgatccagctcaggtacagagtggcagacgcaaagcgaatccgcaagacaaggtccatccaatcaagagcgagtttatcagagcaaaataccagatgttagcctttgttcacaaactgccctgtcgcgacgacgacggtgtcacagccaaggacgatctcacaggacacagaagctgggcaactcctgacatcaacccgcatcccaacagagctaccggtacaagtgctctctctgcagccacactgcccgggtcccaggtgccctggtgccccccattgtcatcgccctag

SEQ ID NO: 117930 - DNA, 2313 bp, synthetic construct
  misc_feature 1..2313: note = Description of Artificial Sequence: Synthetic coding sequence
  source 1..2313: mol_type = other DNA
atgagccgcaagggccctcgggcagaagtgtgtgccgattgttccgctcccgaccccggatgggcatctatatcaagaggtgtgctggtctgtgatgaatgctgtagcgtgcaccgttcgctggggcgacacattagcattgtgaaacatctgcgccactcagcatggccacctactcttctgcagatggtgcacaccttagcctcaaacggggctaatagcatttgggaacattcactgctcgacccggcgcaagtccagagtggaagaaggaaagccaatccgcaggataaagtgcatccaataaagagcgaatttatccgcgcaaagtatcagatgttagcattcgtgcacaagttaccatgcagggacgatgacggggttacagcaaaagacttgtcaaagcagcttcatagctctgtgcgtaccggtaacctggagacctgtctgcgactgctgtctctgggagctcaggcaaatttttttcacccggagaagggaacgactcctctccatgtcgcggccaaagcaggtcaaacattgcaagcggagttgctggtggtctacggtgctgaccccggcagccctgatgtgaacggacgcacgcctattgactatgcgagacaagccggtcatcatgagttggccgaacggctggttgagtgccagtacgagttaacagatcggctggccttttacctctgtggccgcaagccagaccacaagaacgggcattacatcattccccaaatggctgatcggtctagacaaaagtgcatgagtcaatctctggacctctccgagctcgccaaggccgctaaaaagaaactgcaagccctctcaaatcggctgttcgaggagctggccatggatgtgtatgacgaagttgaccggcgagaaaacgacgcagtctggctggctactcagaaccacagtacgctcgtcaccgaacgctcagccgtccctttccttcctgtaaatcctgaatactccgctaccagaaaccagggcaggcagaaactcgcacggttcaacgctcgcgaattcgccacattgattattgacatccttagtgaagctaagcgacgtcaacaggggaaaagtctcagcagtccaaccgacaatctggagctgagtttgaggtcacagtccgatctggacgatcaacacgattatgattctgtcgcctccgacgaggacacagaccaagaacccctccgatcaaccggggccactagatccaatcgggctagatccatggactcatccgatctgagtgacggagcggtgacacttcaggaatacctggagctcaaaaaggcgctcgccacctcggaagccaaggttcaacagctgatgaaggtgaacagctctcttagcgacgagttacggcgcttgcagagggaaattcacaaacttcaggccgaaaacttgcagctaaggcaaccccccggcccagtgcctacgccacctctaccttcagaaagagccgaacacactccgatggccccaggcgggtcaacacaccgcagagatcgacaggccttttctatgtatgagccaggatcagccctcaagccatttgggggacctccaggcgatgaactgacgacgaggctccagccattccatagtacagaattggaggacgacgcaatatactcagtccacgttccagccgggctgtatcgtattcgcaaaggcgtctctgcatccgcagttccgttcactccgtccagcccactgctgtcttgttcgcaggaggggtcccggcacactagcaagttgtctagacacggaagtggtgcagacagcgattatgaaaacacccagtcaggagaccccttattgggactggaaggcaagcgtttcctcgagcttggcaaagaagaggatttccaccccgagttagagtccttggacggcgaccttgatccaggtctaccatctaccgaagatgttattctgaagaccgaacaggtcacaaagaacatacaggagctccttagagccgcacaggaattcaagcatgactctttcgtgccttgctccgagaaaatccacctggccgtgactgagatggcaagcctgtttcctaagagacccgccctggaacccgtccggagctctctacgtcttttgaacgcaagtgcctatcgattgcagtctgagtgcaggaagaccgtccctccagagcctggcgcacctgtcgacttccagctgctaacacagcaggtgattcagtgcgcatatgacatcgccaaggctgctaaacagctggttactattactactagggagaaaaagcagtag

SEQ ID NO: 117931 - DNA, 1212 bp, synthetic construct
  misc_feature 1..1212: note = Description of Artificial Sequence: Synthetic coding sequence
  source 1..1212: mol_type = other DNA
atgttcgtagcaagtgagcggaaaatgagagcacaccaggtgctcactttcctccttttatttgtcattacctccgtggcatctgagaatgcctccacttctcgcggttgcggcttggatctcctgccgcagtatgtgtccctctgtgatttagacgccatctggggaatcgtggttgaagccgtggcaggcgcaggcgctctgattaccctgttgctgatgctaatactgcttgtcagactacccttcatcaaggaaaaagagaaaaaaagtccagttggactgcacttcttattcctactgggcacactcggcctgttcggcctcacgttcgccttcatcattcaggaggatgaaaccatctgcagtgttcggcgctttttgtggggcgttctcttcgccctttgtttctcttgcctgttaagtcaggcttggagggtccgaaggcttgtgaggcacggaactggccctgccggctggcagttggttggcctggccctctgccttatgctcgtccaggtaattatagcagtggagtggcttgtgcttaccgtcttgcgagatacccgcccagcctgtgcctacgagcctatggacttcgtcatggccctgatttacgatatggtcctgctggtggtgactctgggattggccctctttactctttgtggcaaattcaagcgctggaagttaaatggcgcgttcttgctgattacagctttcctgagtgtgctgatctgggtcgcttggatgacgatgtacctcttcggcaacgtcaagttacagcagggggacgcttggaacgaccccacactggccatcactctggccgcatccggttgggtgttcgtcatattccacgcaatacctgaaatccattgtaccttgctgcccgccctgcaggaaaacacacccaactactttgacacgtcccagccgaggatgagggaaaccgctttcgaggaagacgtgcagctaccaagggcttatatggagaataaagccttctctatggacgaacataatgctgccttgaggaccgccggattcccgaatggaagtctaggcaagagaccgagcgggagcctcgggaagcggccaagtgctccattccgctctaatgtgtaccaaccaacggaaatggctgtggtgctgaatggaggcactatcccgaccgcacctccgtcccacaccggtaggcatctatggtag

SEQ ID NO: 117932 - DNA, 1215 bp, synthetic construct
  misc_feature 1..1215: note = Description of Artificial Sequence: Synthetic coding sequence
  source 1..1215: mol_type = other DNA
atgttcgtcgccagtgaacggaaaatgcgagcccatcaggtccttacgtttctactcctgttcgtgatcacaagcgtggctagcgagaacgcttcaaccagtcgcggctgcggtctggatcttctacctcagtatgtctctttgtgcgacttagacgccatctgggggatcgttgtcgaagctgtcgcaggtgctggtgccctgattacacttcttctgatgctgatcctcctggtcagactcccgttcattaaggaaaaggaaaaaaagagccctgtcgggctgcacttcctgtttctcctgggtactttagggttgttcgggctgacttttgcctttataattcaagaggatgagaccatatgcagcgtgcgtagatttctctggggagtgctttttgctttgtgctttagctgcctcttgtcacaggcctggagggtacggagactcgttcgacacggtaccgggcccgcaggttggcagctggtggggcttgccctctgccttatgcttgtgcaagtcattattgctgtggagtggttggtgctcacagtgcttagagacactcgaccagcctgcgcatatgagcctatggattttgtcatggctctgatctacgatatggtgctattagttgtaacacttggactggctctgttcaccctctgtggaaagttcaagagatggaaattaaacggggcgttcctcctgataactgccttcctgtcggtcctgatttgggtagcctggatgaccatgtacctgtttgggaatgtgaagctccagcagggtgatgcttggaacgatcccacccttgccatcacgcttgcagctagcggctgggtgttcgtcattttccacgcaatcccggagatacattgcactctgcttcctgcactgcaggagaacaccccaaattacttcgataccagccaaccgcgaatgcgcgaaaccgccttcgaagaagatgtccagctccctcgggcatatatggagaacaaggccttctccatggatgagcataatgctgctctgaggactgcaggcttcccaaatgggagcctcggaaaacgaccttctggcagtctcggaaagcgcccatcggcccccttcagatctaacgtatatcaaccaacggagatggccgtggtgctgaatggtggcacagagatggtcacccatcctaggtccctcgaatccttcggagctttttag

SEQ ID NO: 117933 - DNA, 1290 bp, synthetic construct
  misc_feature 1..1290: note = Description of Artificial Sequence: Synthetic coding sequence
  source 1..1290: mol_type = other DNA
atgaaccctccttggtctgtagcctgggggcaagaggggttccgagcagggaccccaggcagtagatacctgccaaggatgtttgtggcttcagaacgcaagatgcgtgcccatcaagtgttgacctttctgctgcttttcgttatcacatcagtcgctagtgagaatgcttcaacgtcacggggatgtggactcgatttgctgccgcagtatgtgtcgttatgcgacctcgatgcgatttggggtatcgtcgtcgaagccgtggcgggtgccggtgccctgattacgctgttgttgatgctgattttgctggtgagactacccttcattaaggaaaaggagaagaagagccccgtcggactccatttcctctttctgcttgggaccctcgggctgttcggcctcacattcgcttttattatccaagaggacgagaccatatgctcggtgcgcagattcttatggggagttctgttcgctctctgctttagctgcctgctgtcccaggcctggagagttcgacgcttagtgcgccacgggacaggacctgccgggtggcagttggtgggactcgccttgtgcctgatgctggttcaggtcattattgccgtggaatggctcgtcctgactgtgctaagagacacacgacccgcatgcgcctacgagcccatggactttgtgatggctctcatctacgatatggttctgctggtggttacactcggacttgccctgtttacgctctgtggaaagtttaaaagatggaagctgaacggggcgtttctgctgattactgcatttctgagtgtgctaatttgggtggcatggatgacgatgtatctgttcggcaacgtgaaactgcagcagggtgacgcctggaacgacccaaccctggctattactctcgctgccagtggttgggtctttgtgatctttcacgctatcccagagatccattgcacactgctcccagctctccaggagaacacacccaactattttgacactagccaaccaagaatgagagagaccgccttcgaggaagacgttcagctgccgagagcatacatggagaacaaagctttctccatggacgagcacaacgctgctctcagaaccgcaggctttcctaatgggtctcttggaaagaggccctcgggaagtctgggaaaacgcccatccgccccgttcagatctaacgtgtatcagcccactgagatggccgtcgtcttgaatgggggaactatacccactgccccaccctcacatactgggagacacctttggtag

SEQ ID NO: 117934 - DNA, 759 bp, synthetic construct
  misc_feature 1..759: note = Description of Artificial Sequence: Synthetic coding sequence
  source 1..759: mol_type = other DNA
atgtttgtagcatccgagcgaaaaatgagggcacaccaggtccttactttccttctgctatttgtgattaccagcgtggcttctgaaaacgcatccacaagtcggggatgcggcttggaccttctccctcagtacgtgtccttatgcgatttagacgccatttggggaatcgtcgttgaagctgttgccggcgccggagccctgattactttgctcctcatgctgattctgttggtaagactgccattttttctgcttatcactgccttcctgagcgtgcttatttgggttgcatggatgacgatgtatttatttggcaacgtcaaattacagcagggagatgcttggaatgatccaaccctggccattaccctcgccgccagtggatgggtatttgtaattttccacgctattcccgaaattcactgtactctgctccctgccttgcaggagaatactccgaattacttcgacacctcccagcccagaatgcgggagactgcgttcgaggaggacgtgcaactgccacgggcgtacatggagaacaaggcctttagcatggacgaacacaatgctgccctgaggaccgcaggatttcccaatggatctctaggtaaacggcctagcgggagtcttggaaaacgaccgtctgcacccttcaggtccaacgtctaccagccaacagaaatggccgtggttcttaacggcggaaccatccctacggctcctccttctcacactggcagacatctttggtag

SEQ ID NO: 117935 - DNA, 489 bp, synthetic construct
  misc_feature 1..489: note = Description of Artificial Sequence: Synthetic coding sequence
  source 1..489: mol_type = other DNA
atggcaattcacaaggcgctggtcatgtgcttgggtctgccattatttttgttcccagaacagtcctaccagggcgatatgtaccctaccaggggtgtgggatatgagacaatcctgaaggagcaaaagggccagagtatgttcgtggaaaacaaagccttctccatggatgagccagttgcggcaaaacggccagtgtcaccctacagcggatacaacggccagctcttaacatccgtgtatcaaccgactgaaatggctttgatgcataaggtcccatccgagggcgcgtatgatataatcttgccgagagcgactgcgaacagtcaggttatgggctcggcaaattcaacccttcgcgctgaagatatgtactctgcacagtcccaccaggccgcaacgccacctaaggacggaaagaactctcaggtgtccgagctgacccagcgcggccaggcaaacacgaaccaggttttcttgcgcttgtag

SEQ ID NO: 117936 - DNA, 1461 bp, synthetic construct
  misc_feature 1..1461: note = Description of Artificial Sequence: Synthetic coding sequence
  source 1..1461: mol_type = other DNA
atgcgagggcggggctcccagcagcaacagcctactcgaaggcagggccagaaactgccttcgccatcccccgctggaaaatatgaaagcgctcagcctgggggaacacagccagaaccaggccttggtgcgcggatggctatccacaaagctctggtcatgtgtctgggcctccctctgttcctcttcccaggggcctgggcacagggccacgtaccgcctggatgcagtcagggacttaaccctctgtactacaacctgtgcgaccgttccggagcatggggaattgtcttagaggccgtggccggggccggaatagtaactaccttcgtcctcacaatcatcctggtggcctctttacctttcgtgcaggacaccaagaaaagatcactgcttggaacacaggttttttttctgctgggcacactgggactgttttgcttggtgttcgcctgtgtggtcaagcctgacttttccacctgcgctagtcggcgatttctgtttggtgttctgttcgccatatgcttctcgtgcctagccgctcacgtgtttgccctgaacttcctggcccggaagaatcacggcccacgtggatgggtgatctttacagtggcacttctcctcaccctggttgaggttattatcaacactgaatggttgatcatcactctggttcgaggatccggggagggcggtccacagggtaacagttctgctggctgggctgtggcgtccccgtgtgctatcgcgaatatggatttcgtgatggcgcttatctacgtcatgctcctcctccttggggctttcctgggagcatggccagctttatgcgggagatacaaacgctggcgaaagcacggtgtgttcgtgctactgaccaccgccaccagcgtggcaatttgggtcgtctggatcgtaatgtatacctatgggaacaaacagcataactcacctacatgggacgacccaactctagcaatcgcactcgccgccaacgcgtgggcattcgtcctgttctacgtgatacctgaagtgtcccaagtgactaaaagttcccccgaacagtcatatcagggggacatgtaccctacacgcggcgttggatatgagacaatcctgaaggaacagaaaggtcaatccatgtttgtcgagaacaaagccttttcaatggatgagcctgtcgccgccaagcgccccgtgagcccatatagtggatataatggccagctgctgaccagcgtctaccaaccaacagagatggccctaatgcataaagttccatcagaaggtgcctatgacatcattctgcccagagcaaccgcaaactcccaagttatgggcagtgccaacagcaccctgcgcgcggaggatatgtacagtgcgcaaagtcaccaagctgcaacccccccaaaagatggcaaaaatagtcaggtatttcggaacccctacgtgtgggactag

SEQ ID NO: 117937 - DNA, 1326 bp, synthetic construct
  misc_feature 1..1326: note = Description of Artificial Sequence: Synthetic coding sequence
  source 1..1326: mol_type = other DNA
atggccattcataaagctctggtaatgtgcttaggcctgcccctctttctgtttccaggggcatgggcccagggccacgtacctcctggctgctctcaaggactcaaccctttatattataacctgtgcgaccgctctggcgcatggggaattgttctcgaggctgtggctggagctggtatagtgactacgttcgtgcttaccatcattctggtggcctcactgcccttcgttcaggatacaaagaagaggagcctactcgggacccaagttttttttctgctaggtactcttggtctcttttgcctggtttttgcctgcgttgtgaagcctgatttcagcacttgtgcatctaggcggtttttgttcggggttctgtttgctatatgcttctcttgccttgccgctcacgtgttcgccctgaacttcctggcccgtaaaaaccacggacccagaggatgggtgatcttcactgttgccctgctacttacattggtagaggtcatcatcaacaccgaatggctgatcataacactggtccgtggatctggcgagggtgggcctcaggggaatagttccgctggctgggcagtggccagcccttgcgccattgcaaacatggattttgtcatggccttgatctacgtaatgctgctgctgctcggagcgtttttaggcgcttggccagcactgtgcgggagatataaaaggtggcgaaagcatggtgtgtttgtcctcttaaccacagcaacgagcgtcgccatatgggtcgtctggatcgtcatgtacacttacggcaataagcaacataactctcctacatgggatgaccctacgctggcaatcgccctggcagctaatgcctgggcatttgtgttgttctatgttatccccgaggtatcccaggtgacaaaatcttctcccgagcagtcttaccagggagatatgtatccaacacgcggggttgggtacgaaacgatcctgaaggagcagaagggacagagcatgttcgtcgagaataaggctttcagtatggatgagcccgtagcagcgaagagaccggttagtccctattctggttacaacgggcagctgctcacatcagtgtaccagcctaccgagatggcactgatgcacaaggtaccgagtgaaggcgcatacgacatcatcctcccacgggccaccgcgaattcccaggtgatgggatccgccaacagcactctgagggccgaggacatgtacagcgcccaaagccaccaagcagctacaccacctaaagatgggaaaaattcacaggtttttagaaacccatatgtgtgggattag

SEQ ID NO: 117938 - DNA, 1329 bp, synthetic construct
  misc_feature 1..1329: note = Description of Artificial Sequence: Synthetic coding sequence
  source 1..1329: mol_type = other DNA
atggccatacacaaggccctggtgatgtgtcttggattgccactttttctattccctggggcctgggcgcagggacacgtcccacccggttgttcacagggattgaaccccctttattataatctgtgcgacagaagcggagcttggggcattgtgctcgaagctgtggccggcgccggaattgtgaccacatttgtgctgaccatcattctggtggccagtctgccctttgtgcaggacacaaaaaagcgctccctgctgggcactcaagtcttcttccttctcggtacactaggtctgttttgcctcgttttcgcatgcgtggtgaagccagatttctccacctgtgcatctcgacgattcctgtttggagttctcttcgccatctgcttctcctgccttgccgctcacgtgttcgccttgaatttccttgctaggaagaaccacggaccccgtgggtgggtgatcttcacagtggctctcctgttaacgctggtggaggtgatcatcaataccgaatggttgattatcacccttgtgcgagggtctggcgaagggggaccacaaggtaatagtagtgctggctgggcggtggcatccccctgcgctatagccaatatggattttgtgatggctctcatctatgtcatgttacttctgctgggtgcgttccttggcgcctggcccgcgctctgtggaaggtacaagaggtggcggaaacatggcgtgttcgtgctgctcaccacggcaacttcagtggccatttgggtggtgtggatcgtaatgtacacttatggaaacaagcagcacaatagtccgacctgggatgatcctacgctcgcgatcgcactcgccgccaacgcctgggcctttgtgctcttttatgttattccagaagtttcccaggtcacgaagtcctctcccgaacagtcataccagggcgatatgtaccccacacgtggtgtgggctacgaaactatcctgaaggaacagaaaggtcagagtatgttcgttgagaataaagctttttcaatggacgaaccagtggccgcaaaaagacccgtatctccctatagcggttataacgggcagctgctgacctctgtgtatcaaccaactgagatggcactgatgcacaaggtaccttccgagggcgcttacgacataattcttccacgggccaccgcaaatagccaggtgatgggaagtgccaactccaccctgagagccgaggatatgtactccgcacagtcacaccaggcggccacccctccaaaggacgggaaaaatagccaggcccagagcccacagtcaaaaacacgctggtag

SEQ ID NO: 117939 - DNA, 1362 bp, synthetic construct
  misc_feature 1..1362: note = Description of Artificial Sequence: Synthetic coding sequence
  source 1..1362: mol_type = other DNA
atgggcacacaaccagagcctggccttggtgctcgaatggcgatacataaagccctggttatgtgcctggggttgccgctgttcttattccccggcgcgtgggcgcaggggcacgtgccacccggctgctcacaggggctgaacccactctattataatctttgcgatcgctctggagcttggggcatcgttctggaggcggtggcaggagccggcatcgtgactacatttgtcctgactattatcttggttgcatctctgcccttcgtgcaggataccaaaaagcggagcctgctaggcactcaggtgttcttcctgctcggcaccctgggccttttttgtctggtattcgcatgcgttgtgaagcctgatttctccacatgcgcgtctaggcgctttctgtttggtgtccttttcgccatatgtttcagctgtctggccgcccacgtgtttgcactgaacttccttgcgcgaaaaaaccacggccctagaggatgggtgatattcaccgtggctctgttgctcacactggtggaggttattattaacaccgagtggctgataattaccctggtgaggggcagtggcgagggaggccctcaggggaactcctcagccggctgggccgttgcctctccctgtgcgatcgccaacatggattttgtgatggccctgatatatgtaatgctactcctcctgggtgcatttctgggggcctggcctgcactctgtgggagatataaacgttggcggaagcatggtgtgtttgtgctcctgactactgcaaccagcgtggccatctgggttgtttggattgtcatgtacacatatggtaataagcagcacaactcgccaacctgggacgatccaacgctggctatcgctttggctgcaaatgcctgggcttttgtgctcttctatgtcatccctgaggtgagccaagtcactaaatcttcccctgagcagtcataccaaggcgatatgtatcccacaaggggcgtgggatacgagactattcttaaagagcagaagggtcagagcatgttcgtcgagaataaggccttttcaatggacgagcccgtggccgccaaaagaccagtcagtccctacagtggctataatggccagctcctcacctctgtttatcaacccaccgaaatggcgcttatgcacaaagttccgagcgagggagcctatgatatcatattgcctagggctaccgccaattcccaggtaatgggctccgcaaactcaaccttgcgcgcggaggacatgtactctgcacagtctcatcaggctgctactccccctaaagatggaaaaaatagtcaggtttttcgtaatccatatgtctgggattag

SEQ ID NO: 117940 - DNA, 597 bp, synthetic construct
  misc_feature 1..597: note = Description of Artificial Sequence: Synthetic coding sequence
  source 1..597: mol_type = other DNA
atgagcaacgtccgtgtcagcaacggttcacctagcctcgagaggatggatgctcgacaggccgagcacccgaaaccctctgcgtgccgtaacctgttcggccctgtggaccacgaggagctcactagggaccttgaaaaacattgccgggacatggaagaggcctctcagaggaagtggaattttgactttcagaaccataaaccactcgaaggtaaatatgaatggcaggaagttgagaagggctctctccctgagttctactaccgccctccaaggccacccaagggggcgtgcaaggtcccagcccaggagagccaggatgtctctggatctagacccgccgccccacttattggcgcccctgcaaactctgaggatacacacctcgtagacccaaagaccgatccctccgactctcagactggtctagcagaacagtgtgcaggtatccggaaacggcccgctacagatgactcaagtacccagaacaaacgagcgaatcgtacagaggagaacgtgtctgatggcagccccaacgccggtagtgtggaacagactccgaaaaagcccgggctgcgtagaaggcaaacctag

SEQ ID NO: 117941 - DNA, 903 bp, synthetic construct
  misc_feature 1..903: note = Description of Artificial Sequence: Synthetic coding sequence
  source 1..903: mol_type = other DNA
atgtataaggactgcattgaaagcacaggcgactacttcttgttatgcgatgcggagggaccatggggaataatattggaaagtctagccattctgggcattgtcgttacgatcttgctgttattggccttccttttcctgatgcggaagatccaggactgctcacaatggaacgtacttcctactcaactgctgtttttgttgtctgtcctcggactgtttggcctagcattcgctttcatcattgaactgaaccagcagacggcccccgttcggtacttcctttttggtgtgttatttgccctgtgttttagttgcttactggcccacgcgagcaatctcgttaagcttgtcagaggctgcgtatctttcagctggactaccattctatgcatcgctattgggtgcagcctcttgcagattataattgccactgagtatgtgaccctgataatgacgcgcggtatgatgttcgtcaacatgacgccctgtcagctcaacgtggatttcgtggtactgctagtgtacgtgctgtttctgatggccctcactttcttcgtttcaaaagctaccttttgtggaccctgtgagaactggaaacagcacggacggctgatctttatcacggtgctgttcagcatcatcatatgggtggtgtggatttctatgctcctccgggggaacccccagttccaacgccagcctcagtgggacgatcctgtggtgtgtatcgccctcgtgaccaatgcatgggttttcctcttgctatatatcgtgcccgaattatgcatcctatatcgcagctgtcggcaggaatgtccccttcagggaaacgcgtgtcctgtcactgcatatcagcactctttccaggtcgaaaatcaggaactgagccgcgattgctag

SEQ ID NO: 117942 - DNA, 363 bp, synthetic construct
  misc_feature 1..363: note = Description of Artificial Sequence: Synthetic coding sequence
  source 1..363: mol_type = other DNA
atgtacaaagactgtattgagtcaacaggcgattacttccttctgtgtgacgccgaaggaccatggggtattatcctggagtccctggcgatcttaggtatcgtggtcaccattcttctgttgctcgctttcctcttcctgatgcggaaaatccaggattgctcccagtggaacgtgctacctacccagcttttatttttactatctgtgctgggactgtttggtctcgccttcgcatttataatcgaactcaatcaacagacagcaccggttcgctacttcctgtttggagttctgtttgcgctgtgcttctcctgcctccttgcgcacgctagcaatcttgtgaaattggtcagagggtag

SEQ ID NO: 117943 - DNA, 312 bp, synthetic construct
  misc_feature 1..312: note = Description of Artificial Sequence: Synthetic coding sequence
  source 1..312: mol_type = other DNA
atggagactgtgcaagaactcatccctttagcgaaggaaatgatggcccaaaagagaaaaggcaagatggtgaaactttatgtgctcgggagtgtattggcattgttcggagttgttctgggactcatggagactgtgtgcagcccattcacagccgccagaagactccgcgatcaagaggccgccgtggctgaattgcaggctgccctggagcggcaggccttgcagaaacaggcacttcaagagaagggcaaacagcaagacactgtcctgggaggcagggcactatctaatcgccaacacgcctcttag

SEQ ID NO: 117944 - DNA, 1500 bp, synthetic construct
  misc_feature 1..1500: note = Description of Artificial Sequence: Synthetic coding sequence
  source 1..1500: mol_type = other DNA
atggagctgagtgaacctatcgtggaaaacggagagaccgaaatgagtcccgaggagtcttgggagcataaagaagaaatctcagaagctgaacctggggggggatcactgggcgatggacggccaccagaggagtcagctcacgaaatgatggaggaagaggaggagatcccgaaacctaagtccgtggtggcccctcccggcgcccccaagaaggagcacgtgaacgtcgtgtttatcgggcacgttgacgctggaaaatcaactatcggggggcagataatgtacctgacgggtatggtagataaacgaacgttggagaagtacgagcgagaggccaaagaaaagaatagagagacttggtacttgagctgggccctcgacacaaatcaagaggaaagggataaaggcaagacagtggaggtagggcgggcctacttcgagacagagaagaaacatttcacgatactggatgctccaggtcacaaatccttcgtcccaaatatgatcgggggcgcctcacaggcagacctcgctgtgcttgttatttccgctaggaaaggcgagttcgagaccggattcgagaagggagggcagacacgggaacacgcgatgctggcaaaaaccgcgggggtgaaacacctgatagtgctgattaacaaaatggatgaccctacggttaattggtctaatgaacggtatgaagaatgtaaagagaagctcgttccattcctgaagaaggtggggtttaatcccaaaaaagacattcacttcatgccctgctctggcctaacaggtgcaaatctaaaagagcagtcggacttttgcccatggtatatagggctgccgttcattccatatctcgataacctgccaaacttcaaccgttctgttgatggccccataaggctgcccatcgtcgataagtacaaagacatgggcacagtagttttggggaaactagagagcggaagtatctgcaaagggcagcagctggttatgatgccgaataaacacaacgtagaggtgctcggtattctgtcagatgacgtggagacagataccgttgcccccggagagaacttgaagattcgtctgaaaggtattgaggaagaggaaattctgcccggctttattctttgtgatcctaataacctgtgccacagtggacggactttcgatgcccagatcgtcattattgaacacaaaagcattatttgcccgggatacaacgccgtcctccacatccacacatgcattgaggaggtagagatcaccgcacttatatgtttggtagataagaagagcggagagaaaagcaagacgcggccccgctttgttaagcaggatcaggtatgtatcgcaaggctgcggaccgccggcactatctgtttggaaacttttaaggactttcctcagatgggccgcttcacactgagggatgagggcaagactattgcaatcggaaaggtgttgaagctggtccccgagaaggactag

SEQ ID NO: 117945 - DNA, 1914 bp, synthetic construct
  misc_feature 1..1914: note = Description of Artificial Sequence: Synthetic coding sequence
  source 1..1914: mol_type = other DNA
atggatcccgggtcaggtggaggcggcggcggcggtggtggcggaggaagcagctccggatcaagtagctcggattctgcaccagactgctgggaccaggctgacatggaggcccctggaccgggaccctgcggcggtggcggcagtctggccgctgcggcagaagctcagcgggagaatttgagcgctgccttctcgagacagttgaacgttaatgcaaaacccttcgtcccgaacgtacacgcagcagaatttgttcctagcttcctgcgcggaccagcagcgcctccacccccggtgggtggcgcagccaataaccatggtgctgggagtggcgccggcggccgagcagcccctgtggaatctagtcaggaggagcagtcgctatgtgaggggagcaactcagccgttagtatggagctgtcggagccgatcgttgagaacggggaaactgaaatgtcccccgaggagagctgggagcacaaagaggagataagcgaggctgagcctggaggaggaagcttgggtgacgggcgcccccccgaggagagcgcacacgaaatgatggaggaggaagaggagatcccaaaacccaagtcagtggtcgcaccccctggagcccccaagaaggaacatgtgaacgtggtctttatcggccacgtggacgctggaaagtcaaccattgggggccagataatgtacctcactggtatggttgataaacgaactcttgaaaagtatgagcgggaggccaaggagaaaaatcgagagacgtggtacctctcctgggccttggatacaaaccaggaagagagggacaagggcaagacagtcgaagtgggacgggcctatttcgaaactgagaagaagcactttaccattcttgacgcaccgggccataagtcatttgttcctaatatgatcggcggcgcatctcaggcagacttggcagtcctggtgattagcgcacgcaagggggagttcgagaccggttttgaaaaagggggtcagacaagagagcacgccatgctagccaagaccgctggtgtgaagcacttaattgttttgattaacaagatggatgatccaacagttaactggagcaatgagaggtacgaggagtgcaaggaaaaacttgtgccattcctgaaaaaggtcggatttaatccgaaaaaggacattcacttcatgccttgttccggcttgacaggagcaaatctcaaggagcagtctgatttttgtccctggtacatcggcttacctttcattccatatctagacaatctgcctaatttcaacagatccgtggacggtccaatccgactgcccatcgtcgataaatacaaggacatgggaacggtggtgctcggcaaactggaaagcggaagcatctgcaagggccagcaactcgtcatgatgcctaataaacataacgtcgaagtcttagggattcttagcgatgatgtggaaacagacaccgtggcacccggagagaatctgaaaatccggctgaaaggcattgaggaggaggaaatcctccccggcttcatcctttgcgatccaaataatctttgccattcgggaaggacttttgacgcccagattgtgattatagagcacaaatccataatttgtcccggttacaacgcagtgcttcacattcatacctgcatcgaagaggtcgagattactgctctcatatgcttggtggacaagaaatccggagaaaagtcgaagacaaggcccagatttgttaagcaggatcaagtttgcatagcaagactccgcacagcggggaccatatgtctggagaccttcaaagattttccgcagatgggtcgtttcactctccgggacgaaggaaagaccattgccatcggaaaagtattgaaactggtccccgagaaggactag

SEQ ID NO: 117946 - DNA, 1911 bp, synthetic construct
  misc_feature 1..1911: note = Description of Artificial Sequence: Synthetic coding sequence
  source 1..1911: mol_type = other DNA
atggacccaggtagcggcggaggcggaggcgggggcggcggcggaggcagctcttcagggtcgtctagcagcgactctgcacccgattgctgggatcaggcagatatggaggctccggggcccggcccgtgcggcggcggcggcagtcttgccgccgcggccgaagctcagcgcgaaaacctatcggcagcgttctccagacagctgaatgtgaatgctaaaccttttgttcccaacgtacatgctgccgaattcgtaccatcatttttgcgcggtccggctgctccaccaccgcccgtgggcggggcagctaataaccatggagcaggaagtggggccgggggccgggctgctccagtggaatcctcccaggaagaacaaagcctgtgtgaaggctcaaattccgctgtttccatggaactgtctgaaccgatcgaaaacggagagacagagatgtctcccgaagaatcttgggaacataaggaagagatcagcgaagccgagcccgggggaggcagtttaggagatggtcgtccccctgaggagagtgctcacgagatgatggaggaggaggaggaaatccctaaaccaaaatcagtcgtcgctcctcctggagcccctaagaaagagcacgtgaacgtggtatttatagggcacgtcgatgcgggtaaaagcaccatcggcgggcagattatgtaccttaccggcatggtagataagcgaacccttgagaagtatgagcgcgaggcaaaagaaaagaacagagaaacttggtacttatcgtgggctctagatacgaaccaggaagagagggacaagggaaaaacagttgaagtcggtagagcatacttcgaaaccgagaaaaaacatttcacaatactggacgcccccggacataaatccttcgtccctaacatgatagggggggccagtcaggccgacttagcagtcctggtaataagtgcccgtaaaggagagtttgagacaggattcgagaaaggcggtcagacccgtgaacatgcaatgctggctaagacagctggtgtgaagcatcttatcgtgttaatcaacaaaatggatgatccaactgtgaactggtcaaacgagaggtacgaggagtgcaaggagaagttggtgccatttctaaaaaaggtaggcttcaatcccaaaaaggatatccacttcatgccttgttctgggctaactggcgcaaacttgaaagaacagtccgacttctgtccctggtatatcggattgccttttatcccttatctggacaacctccctaatttcaatcggtcagtcgatggccccattcggctccccatcgtggataaatataaggatatgggcaccgtcgtgttgggcaaactggagtctggaagcatttgtaaaggccagcagctagtgatgatgcccaataagcataatgtggaggtgctcggaattctgagtgatgatgttgaaacggatacagttgcacctggcgaaaatctgaagattcgcctgaagggcattgaggaagaagagatcttgcccgggttcatactctgtgacccaaataacctgtgtcattcagggagaacatttgatgctcagattgttattattgagcacaaatccattatctgccccgggtacaacgctgtgctgcacatccacacatgcatcgaggaagttgaaataactgccctgatttgcctagtggacaagaaatccggggaaaaatccaagacacgtcccaggttcgtaaagcaagatcaggtgtgcatcgctagactccggaccgcaggaacaatatgtctggaaacattcaaggacttcccacagatggggcggttcacccttagagacgaggggaaaaccattgctatcggcaaggtgcttaaattagtccccgagaaggattag

SEQ ID NO: 117947 - DNA, 1887 bp, synthetic construct
  misc_feature 1..1887: note = Description of Artificial Sequence: Synthetic coding sequence
  source 1..1887: mol_type = other DNA
atggattcaggctcctcatcctccgatagtgccccagactgttgggatcaggtggatatggaaagcccaggaagtgccccttctggtgatggggtgagtagcgcggtggctgaggcccagcgcgagcccctaagctccgcattttcgagaaagttgaacgttaatgccaaaccgttcgtgccgaatgtgcacgctgcggagttcgtaccatctttccttaggggcccgacgcagcctccgacgctccctgcaggttctgggtccaatgacgagacttgtaccggcgcgggctacccccaaggtaagcgtatgggtagaggcgccccggtggaacccagcagggaggagcccttggtttccctcgagggatccaattcagccgtgaccatggaactgagtgagccagtcgtcgaaaatggcgaggtcgagatggccctcgaggaatcatgggagcacagcaaagaagtgagcgaggctgaacctggcggcggatcctccggggacagcgggccgccagaagagtccgggcaggagatgatggaggagaaggaggagattcgcaagtctaagagcgtaatagttccctcaggcgcaccaaaaaaggagcatgtcaatgtagtttttatcggccacgtggatgctggcaaaagtactattgggggacagatcatgttcctgacaggtatggtcgacaagcggacactggagaagtacgagcgagaggccaaagagaagaacagagagacctggtacctgagctgggctttggacactaaccaagaagaaagggataaaggaaagaccgtggaggttggtcgcgcttatttcgagactgagaggaaacactttaccattctggatgcaccaggccataaatccttcgtgcccaacatgatcggtggcgctagtcaggctgatctggcggtactcgttatctccgcccgaaagggcgaattcgagacgggatttgaaaaaggcggccagaccagggagcacgcaatgctggcaaagaccgccggagttaagcatctgatcgtgctgatcaataaaatggacgatcccaccgttaactggtctatcgagaggtatgaggagtgcaaggagaagctggtcccctttctcaaaaaagtgggattcagtccgaagaaggacattcacttcatgccttgttctggactgaccggtgccaacataaaggagcagagtgacttttgcccctggtatacgggcctcccatttatcccgtacctggataatctgcccaatttcaatcggtctatcgacgggcctatccggttgcccatcgtggataagtacaaagatatgggtactgtggtcttggggaagctcgagagcggctctatatttaaaggccagcagctcgtgatgatgccaaataagcacaatgtcgaggtcctgggaatcctgagcgatgatacagaaaccgatttcgtcgctcctggcgagaatttgaaaattcggctgaaggggatagaggaggaggaaattctgcccgggttcattctctgtgatcctagtaatctttgccactccggacggactttcgacgttcagatcgtgataatcgagcacaagtcaatcatctgtccaggctataatgccgttctccatatccacacatgtatcgaggaagttgaaatcacggctctgatcagtttggttgataaaaagtccggagagaagtctaaaactcgccccagatttgtgaagcaggatcaggtgtgtattgcccgcctgaggactgccggaaccatttgcctggagaccttcaaggattttcctcagatgggtcggtttacccttagagatgaggggaagacaatcgccatcggaaaggtcctgaagcttgttccagagaaagactag

SEQ ID NO: 117948 - DNA, 1638 bp, synthetic construct
  misc_feature 1..1638: note = Description of Artificial Sequence: Synthetic coding sequence
  source 1..1638: mol_type = other DNA
atggattccggttcaaacgatgagacctgcaccggcgccggctacccccagggcaagagaatgggccgcggggccccagtcgaaccgagtcgtgaagagcctctggtgagccttgaaggctctaatagcgcagtcacgatggagctgtcagagccagtggtagaaaacggcgaggtggagatggctctcgaagaaagctgggagcattccaaggaagtgtccgaggctgagcccgggggagggagtagtggcgatagcggccctcccgaggagagcggccaagaaatgatggaggaaaaggaggagatccggaaatcaaaaagtgtgatagtgccctccggcgccccgaagaaagagcacgtgaacgtcgtttttataggccacgtagatgccggtaagagcaccatcggtggacagatcatgtttttgacaggcatggtggacaaacggaccctggagaaatacgagcgggaagctaaagagaaaaaccgagagacctggtacctaagctgggcgctcgacacaaaccaggaagagcgagataaagggaaaaccgtggaggtcggcagagcctacttcgagaccgagagaaagcattttactattctggatgcaccgggtcataagtcttttgtccctaatatgatcggcggggctagccaggctgacctcgcagtgctggttatctctgccagaaaaggagagttcgaaaccgggttcgagaaagggggacagacgagggagcatgccatgctcgccaagactgccggcgtgaagcacctaatagtactgataaacaagatggatgatccaacggtgaactggtccatagagcgatacgaggagtgtaaggaaaagctcgttcctttcctgaagaaggttgggttctcccctaaaaaggacatacactttatgccctgcagcgggctgacgggcgccaacatcaaggaacaatctgacttctgtccctggtacaccgggcttccctttatcccatacctggataacctccccaacttcaataggtccattgacggaccaattagattgcccattgtggacaaatataaagacatgggtaccgtggttctgggaaaacttgagagtggcagcatctttaagggccaacagctagttatgatgcccaacaagcacaacgtcgaggtgttgggcattctgtcggacgacactgagaccgactttgtggctccgggtgagaatctcaagatccgtctgaaggggatcgaggaagaagaaatcctccccggtttcattttgtgcgacccctccaatctctgccactctggccgcacttttgacgtgcagattgtcattatcgaacataagtctatcatctgcccagggtacaacgcggtgcttcacatccacacatgcatcgaggaagttgagattactgctctgatctcattggtggacaagaaaagcggcgaaaagtcaaaaacacggcctcgttttgtcaagcaggaccaggtgtgcatcgcaaggctgcggaccgcagggacaatctgtctcgaaaccttcaaggacttcccccagatgggccgcttcacactccgcgacgagggaaagaccatcgcaatcggaaaggtgctgaaactggtacccgagaaagattag

SEQ ID NO: 117949 - DNA, 1365 bp, synthetic construct
  misc_feature 1..1365: note = Description of Artificial Sequence: Synthetic coding sequence
  source 1..1365: mol_type = other DNA
atgaccaaaagggaggccgaggagttaattgagattgagatagatggtaccgaaaaggccgaatgcaccgaggagagtatcgtcgagcagacatacgctccagctgaatgtgtgagccaggccattgacataaacgagccgataggcaatctgaaaaaactcctcgagcctcggctgcagtgcagcttggacgctcacgaaatttgtctccaggacattcagctggatcctgagagatcgctatttgatcagggagtgaaaacagacgggacagtccagctgtccgtgcaagtgatatcataccaaggtattgaacctaaactgaatatcctggaaattgtgaaacctgctgataccgtggaggtagttatcgatccagatgcccaccacgctgagtcagaagcccatttagttgaagaagcacaggtcatcactctcgacggcacaaagcatatcaccacaatcagcgacgaaacaagcgaacaagtgacccggtgggccgcggccttggagggctatcgtaaggaacaggagagacttggaatcccatatgatcccatccagtggagcacagatcaggttctgcattgggtcgtttgggtgatgaaggaattctcaatgacggatatcgaccttaccacgctgaacatcagcgggcgagagctctgctctctgaaccaagaggatttctttcagagggtgcctcgcggagagatcctctggtcccacctggaactgctccggaaatatgtcctggcatctcaggagcaacaaatgaatgaaattgtgacgatcgatcaacccgtccagatcatcccagcctccgtccagtcagccaccccaacaactatcaaagtaatcaattcctcggcaaaggcagcaaaagtccaaagagctcccaggatttcgggagaggacaggtcctctcccgggaatcggaccggtaataacggccagatccagctctggcagtttctgctggagcttctcacagataaagacgccagagactgcattagttgggttggagacgagggtgagttcaagcttaatcagcctgaattggtggcacagaagtggggtcagaggaagaataagcccaccatgaattatgagaagctgtctcgcgccttgcggtactattacgacggagatatgatttgcaaagtccagggcaagaggtttgtgtacaagttcgtatgcgacctgaagaccctgatcgggtattctgctgccgagttaaacagacttgtgaccgaatgcgagcagaagaaattggccaagatgcagctgcacggaatagcccagccagtgactgctgttgccttggcaaccgctagcctgcagaccgaaaaagacaactag

SEQ ID NO: 117950 - DNA, 1365 bp, synthetic construct
  misc_feature 1..1365: note = Description of Artificial Sequence: Synthetic coding sequence
  source 1..1365: mol_type = other DNA
atgacgaaacgggaggcagaagagctgatcgagatcgaaattgatggaacagagaaagcggaatgtacagaggaaagcattgttgagcaaacttatgcacctgctgagtgtgtgtcccaggctatcgatattaacgaacccatagggaacctgaagaagctgctggagcctagactgcaatgctctttggacgctcatgaaatctgtctccaggacatccagctggatccagaaaggtctctctttgaccagggcgtgaaaaccgacgggacagtgcaattatctgtccaggtgattagctatcagggcatcgaacctaagttgaacattctcgagatagtgaaacccgctgacaccgtcgaggttgttatcgatcctgatgcccaccacgcggaaagcgaagctcacttagttgaggaagcgcaggtgattacactggatggaaccaagcatataacaacaattagtgacgaaacaagtgagcaggtcactagatgggcagcggccctggagggctacaggaaagagcaggagagactgggaattccatatgatcctattcaatggagtaccgaccaggttctgcactgggtggtgtgggtgatgaaggaattttccatgaccgacatcgatctcaccactctaaacatttctgggagggaactgtgcagcctcaatcaggaagacttcttccaacgggtcccccgaggcgaaattctctggtctcatctggagcttcttcggaagtatgttctggcatcgcaggaacagcagatgaacgaaattgtcaccatcgaccagcctgtgcaaattattccggcttccgtccaaagtgctacgcctacaacaattaaagtgatcaattctagcgcaaaagcggccaaggttcaaagggccccccgcatctcgggtgaagataggtcatcgcccgggaatcgcacaggcaacaatggccagatacagctctggcaattcctgctcgagctgctaaccgataaggatgctagagactgcattagctgggtgggtgatgaaggagaatttaagctcaaccagccagagctggtggcacagaagtggggtcaacggaagaacaaaccgacaatgaactacgagaagctgtctagagctctcagatactattatgacggtgacatgatttgcaaggtgcaaggaaaaaggttcgtgtacaaattcgtgtgtgatctgaaaacgctgatcggctatagtgctgccgagttgaatagactagtaaccgagtgcgagcaaaaaaagttggctaaaatgcagttgcatggtattgcccaaccggtcactgcagtagctctcgccaccgcatccctgcaaacagaaaaagataactag

SEQ ID NO: 117951 - DNA, 2163 bp, synthetic construct
  misc_feature 1..2163: note = Description of Artificial Sequence: Synthetic coding sequence
  source 1..2163: mol_type = other DNA
atggcccagggcctagaggtggctctaacggatttgcaatcctccagaaataatgtgagacatcataccgaagagatcaccgtggaccacctattggtgagaagaggacaggctttcaacctcacgctttacttccgcaataggtccttccagcccggacttgacaatattatctttgttgttgagactgggcccctacccgatctggccctaggcacgcgggctgtgttctctttagccagacatcatagcccatctccgtggattgcctggctagagacgaatggggcaacgagcacagaagtgtccctttgtgctcctcccaccgccgctgtgggcaggtaccttctcaaaatccacattgattcctttcaaggatctgtcaccgcctaccagctgggggagtttattctgctcttcaatccttggtgcccagaggatgccgtttacctggatagcgagcctcaacggcaggagtatgtcatgaacgattatggatttatttaccagggatctaaaaattggattaggccctgcccatggaattatgggcagtttgaggacaagatcatagacatctgcctgaagcttctggacaagtcattacacttccaaactgatccagccactgactgcgctctgagaggctctccagtgtatgtctcgagggtcgtatgcgccatgattaacagcaatgacgacaacggcgtactgaatggcaactggtctgagaattataccgatggggccaacccggccgagtggaccgggtccgtcgccatcctgaagcaatggaatgctaccgggtgtcagccagtgagatacggtcaatgttgggtgttcgcagctgtcatgtgcacagtaatgagatgtttgggcatccctactagagtaatcacgaattttgattccggacacgataccgatgggaacctgattatagacgaatactatgacaacacagggaggatcctgggaaacaagaaaaaggatacaatctggaactttcacgtgtggaatgagtgctggatggccagaaaggatcttcctccggcttatggaggctggcaggttctggacgcgactcctcaggagatgagcaacggcgtttactgctgcggacctgcttccgttcgcgccatcaaggagggcgaagtggacctgaattatgatactccattcgttttttcaatggttaacgccgactgcatgagttggcttgtccaggggggcaaggaacaaaagctgcaccaagacacatcgagcgtcgggaacttcattagtacaaagtcaatccagtccgatgaaagagacgacatcacggagaactacaagtatgaggagggctctctgcaggaacgacaggtctttctgaaggccctccagaaattgaaggcacgcagcttccatgggagccagcgcggagcggaactccagccctctcggcccacgagtctcagtcaggactcccccagaagtttgcatactccttctctaagaccatccgatgtggtacaagtgagcctgaagttcaagttgttagacccaccaaatatgggacaagacatttgcttcgtgcttctggctctcaatatgtccagtcagtttaaagatctcaaagtcaacttatccgctcagtctctcctgcacgatggatcccctctctcccccttctggcaggataccgcctttattactttaagcccaaaggaagccaaaacctatccttgcaagatttcgtatagccaatactcccagtacctgtctacagataaactgattcgaatatctgccctcggggaagagaagtcctccccagaaaaaatcctggtcaataagattattactctgtcttacccgtcaattacaattaacgtattgggcgcagccgttgtaaatcagccattgagcatacaggtcatatttagtaaccccctctctgaacaggttgaagactgcgtactcaccgtggagggctcagggttattcaagaaacagcaaaaggttttcctcggcgtgctgaagccacagcatcaggcaagcatcattctcgagactgtccctttcaagtccggccaacgacagatacaggcaaatatgcgtagcaataagtttaaagacattaagggttaccgaaacgtgtacgtggattttgcactgtag

SEQ ID NO: 117952 - DNA, 1047 bp, synthetic construct
  misc_feature 1..1047: note = Description of Artificial Sequence: Synthetic coding sequence
  source 1..1047: mol_type = other DNA
atgtccttggtcgaccttgggaagaagctgttggaggctgcgcgcgctggacaggacgacgaggtcaggatccttatggccaacggggcaccatttacaaccgattggctgggaacaagcccactgcacctggcggcccagtacgggcactactcaactaccgaagtgttattacgcgccggcgtgtcccgggatgccagaaccaaagtggacaggacgcctctgcacatggccgcttccgaagggcacgcttccatagtggaagtgctccttaagcacggtgcggacgtgaatgctaaagatatgctgaaaatgaccgcactgcactgggctacggaacacaaccaccaggaggtggtggaattgcttattaagtatggcgccgatgtgcacacgcagtccaagttttgcaagactgcattcgatatcagcattgacaatggaaacgaagacctcgcggagatcttgcaaatcgcaatgcagaatcagattaacacaaaccctgagtcaccagatactgtcacgatacatgccgccacccctcagttcattattgggcctggtggagtcgtcaatctgacagacgaaacaggcgtatccgccgttcaatttggcaattccagtacttcggtgttagcaaccttggctgctttagccgaggctagtgcccctttgtcaaatagttccgagactcctgtcgtggccacagaggaagtagttactgctgagagtgtggatggggctatccagcaggtggtttcttcagggggtcagcaggtgataaccattgtcaccgatggaattcaactaggaaaccttcattcaattcctaccagcggcatcggccaacctattatagtcacgatgcccgacggacagcaggttctcacagtcccagccacggacattgctgaggagactgtgatttcagaggagccgcccgcgaagagacagtgcatcgaaatcatcgaaaaccgcgtggaatccgcagaaatcgaagtacggtcactcctgcccggagtattgtgccggagtcaccccaaatag

SEQ ID NO: 117953 - DNA, 1152 bp, synthetic construct
  misc_feature 1..1152: note = Description of Artificial Sequence: Synthetic coding sequence
  source 1..1152: mol_type = other DNA
atgagtctcgttgatttgggcaagaaactgctggaagcggctagagccggacaggacgatgaagtgaggattctgatggcaaacggggcccctttcaccacggattggttaggtacaagccctcttcacctcgcagctcaatacggccattattccactaccgaggtgttactgagggccggagtttctcgagatgcgagaactaaggtggaccggacaccactgcatatggccgcctcagagggccatgcaagcatcgtcgaggtgttattgaagcacggagccgatgtgaatgcgaaggatatgctgaagatgactgcgcttcactgggcaacggagcataaccaccaggaggttgtggagctgctcattaagtacggcgcagatgtccatacccagtctaagttctgcaagaccgcattcgacatctcaatcgataacggcaacgaggatctcgccgagattcttcagatcgccatgcaaaatcagattaacaccaatcccgaatcacctgacacagtcacaattcatgcagccaccccccagtttattattggacccggcggagttgtcaatctcaccgacgagaccggcgtgtctgcagtgcaatttggcaattctagcacatccgttctcgcaactctggccgccctggctgaggcttccgctccactcagcaatagttctgaaaccccggtggtggccacagaagaggttgtgacagcagaatctgtagacggcgctatccagcaggtggtaagttcgggcggacagcaggtcatcaccatcgtcaccgatggcatccagttgggaaaccttcactcgatccccaccagtggtattggccagcccatcatcgtcacgatgcctgatggacagcaagtcctgaccgtgccggccacagatatcgctgaagagactgttataagcgaagaacctcctgctaagagacaatgtatcgagatcatcgaaaatcgcgtcgagtctgctgaaatcgaggagagagaagcactgcagaagcagctcgacgaagcaaaccgggaagcacagaaataccgccaacagttactgaaaaaagagcaagaagcagaggcttaccggcagaaactcgaagcgatgacacgcttacaaacaaataaagaggccgtctag

SEQ ID NO: 117954 - DNA, 1047 bp, synthetic construct
  misc_feature 1..1047: note = Description of Artificial Sequence: Synthetic coding sequence
  source 1..1047: mol_type = other DNA
atgtccctagtagacctgggcaaaaaattattagaagccgcgagggcaggacaggacgacgaagtcagaatactcatggctaatggcgcccccttcacgacagactggctgggaacctcccccctacaccttgctgctcagtatgggcactacagcactacagaagtcttgctgcgggccggtgtgagtcgtgatgctcgtactaaagtggaccgaactcccctccatatggctgcctccgaggggcacgccagtatagttgaagtgttacttaagcatggcgccgatgtaaacgccaaggatatgttgaagatgactgccctgcattgggccaccgaacacaatcatcaggaagtggttgaattgctgataaaatatggagccgatgtacatacacagtccaaattttgcaagacagcgtttgatatttcaatcgacaatggtaatgaggatctcgctgagatactgcagattgcaatgcaaaaccagatcaatacaaatccagagtctcccgacacagtcaccattcacgcggcaacccctcagtttataatcggacctggcggggtggtgaatctgacggacgaaacaggcgtgtcggcagtccaattcggcaattcatccaccagtgtgctcgccactctcgctgccctggccgaggcctccgctcctctgagtaacagcagcgagacaccagttgtcgctactgaggaggtagtcaccgctgagtcagtcgatggtgctatccagcaggttgtttcgtcgggaggacagcaggtgatcaccattgtcacggacggaatccaactgggaaatcttcactccattcccacgtcaggtattggacaacccattatcgtgacgatgccagacggtcagcaggtgcttaccgtccccgccaccgatattgccgaggaaacagtcataagcgaagagccacctgcgaaacgccagtgcatagagataattgagaatcgtgttgaaagcgctgaaattgaagtaaggagtttgcttccgggagtgctatgccgttcacacccaaagtag

SEQ ID NO: 117955 - DNA, 1083 bp, synthetic construct
  misc_feature 1..1083: note = Description of Artificial Sequence: Synthetic coding sequence
  source 1..1083: mol_type = other DNA
atgtcgcttgtggatctgggtaaaaagctcctagaagccgcccgcgccgggcaggatgatgaagtgcggatcctcatggctaacggagccccctttaccaccgattggcttggtacaagcccactccacctggctgcccagtacgggcactacagcaccaccgaggtgctgcttagagccggagtaagtcgggacgctagaactaaggtggatcggactcccttgcatatggccgcatccgagggtcatgcctcaatcgtggaagtgctgctgaagcacggggccgacgtgaatgcaaaagatatgctcaagatgacggccctgcattgggctactgagcataatcatcaagaagttgtggagctgctcattaaatacggagctgacgtgcacacacaatcgaaattctgcaaaactgcctttgatatctccatagataacggcaacgaagatttggcggagatcctgcagatcgccatgcagaatcagattaataccaaccccgagagccccgacactgtgacaatccacgctgcgaccccacagtttattatcggccctggcggcgtggtgaacctcactggtctcgtgagttcagaaaacagctctaaggccaccgatgagacaggggtttctgccgtgcagtttggtaacagcagtacgtccgtgttagccactctggctgccctggcggaagcaagcgcgcctctgagcaactcctctgagactccagtagtggcaacagaagaggtagtgaccgccgaatcagtggatggcgccattcagcaggttgtttccagcggggggcagcaggtcatcaccatcgttacagacggaatccagttgggtaatttgcatagcatcccaacatccgggatcgggcagcccatcattgttactatgccagacgggcagcaagtacttacagtgcctgcaacagacattgccgaagaaacagtgatctccgaagagcctccggcgaagcgccagtgtatcgagatcatcgagaatcgcgtggagtccgcagagattgaggtacggagccttcttcccggggtgctgtgcagatctcaccccaaatag

SEQ ID NO: 117956 - DNA, 270 bp, synthetic construct
  misc_feature 1..270: note = Description of Artificial Sequence: Synthetic coding sequence
  source 1..270: mol_type = other DNA
atgtccctggtcgatctcggaaagaaacttctggaggctgctcgggcagggcaagatgatgaggtcagaattctgatggccaacggagcgccttttactaccgactggctaggcacatctccattgcatttagctgctcagtacggccactattcaacaaccgaggttctcctccgggccggtgtgtctagagatgctagaaccaaagtggaccgcaccccccttcatatggccgcaagcgaaggacatgcaagcattgtggaggtgtag

SEQ ID NO: 117957 - DNA, 270 bp, synthetic construct
  misc_feature 1..270: note = Description of Artificial Sequence: Synthetic coding sequence
  source 1..270: mol_type = other DNA
atgtctctcgttgaccttggcaaaaaactccttgaagcagcacgggccgggcaagacgatgaggtcaggatcctcatggccaatggcgccccctttacaacagactggttagggacatctccattgcacttagccgctcaatacggtcattacagtacgaccgaggtgctactgagggccggcgtctctcgtgacgcgcggactaaggtggatcgcaccccactgcacatggcagcctcagaggggcacgcctcaatcgttgaagtttag

SEQ ID NO: 117958 - DNA, 354 bp, synthetic construct
  misc_feature 1..354: note = Description of Artificial Sequence: Synthetic coding sequence
  source 1..354: mol_type = other DNA
atgaagtttgtatacaaggaagaacatcctttcgaaaaacggaggagtgagggtgagaagattaggaaaaagtatcccgaccgcgtcccggtgatcgtggaaaaagccccaaaggcacggataggcgatctggacaaaaagaaatatctggtgccctcagacctgactgtgggacagttttactttttgatccgcaagaggattcatctgcgcgccgaagacgcattattctttttcgtaaataacgtcattcctcctacatccgcaactatgggccagctgtatcaggaacaccacgaggaggactttttcttgtatatcgcctattccgatgaatctgtgtacgggctgtag

SEQ ID NO: 117959 - DNA, 354 bp, synthetic construct
  misc_feature 1..354: note = Description of Artificial Sequence: Synthetic coding sequence
  source 1..354: mol_type = other DNA
atgaagttccagtacaaggaggaccaccccttcgaataccgcaagaaggagggcgagaagatcaggaagaagtaccctgacagggtgcccgtgatagttgaaaaggccccaaaggccagggtgcctgatctggacaagcggaaatacctcgtccccagcgatctgactgttgggcagttctattttcttattcggaaacggatccatctgcgtcccgaggatgccctgtttttttttgtgaataataccattccaccaacatctgcaactatgggtcagttgtatgaggacaatcatgaagaagactatttcctgtacgtcgcttattcagacgagtctgtttacggtaagtag

SEQ ID NO: 117960 - DNA, 441 bp, synthetic construct
  misc_feature 1..441: note = Description of Artificial Sequence: Synthetic coding sequence
  source 1..441: mol_type = other DNA
atgaagttccagtataaggaggaccacccatttgaatacaggaaaaaggagggagaaaagattcggaaaaaataccccgatcgcgtgccagtgattgtcgagaaggcccccaaggcccgggtcccggatctggacaaacggaaatacctggtgcccagcgatctgaccgtgggtcagttttatttccttataaggaagcggatccatctgagacccgaagatgcattatttttcttcgtgaataataccatacctcccacctcagcaacgatggggcaactctacgaggtcatggttctagtggcccagtactggatgccctcttcggccgtttggcatccactcgcactcgtgctcgatgccctgattacacacctccggagcggagctgagggcgtgatctatccagacccactgacctatggaagcgttcgactctag

SEQ ID NO: 117961 - DNA, 441 bp, synthetic construct
  misc_feature 1..441: note = Description of Artificial Sequence: Synthetic coding sequence
  source 1..441: mol_type = other DNA
atgaagttccagtataaagaagaccacccattcgaataccgcaaaaaagagggcgagaagatcagaaaaaaataccccgaccgggtgcccgttattgtggagaaagctccaaaagctagggtccctgacctggacaaacgcaagtatctggtgccatctgacctgacagtcggacagttttacttcctaattagaaaacggattcacctgaggccagaagatgccctgttcttttttgttaacaatactatccctcctacctcagctacaatgggacaattgtacgaagtgatggtgctagtggcccagtattggatgcctagctcggcagtgtggcacccactggccttggttcttgacgcactgataactcacttgcggagtggcgcagaaggcgtcatttaccctgaccctcttacttatggttcggtgcgactatag

SEQ ID NO: 117962 - DNA, 213 bp, synthetic construct
  misc_feature 1..213: note = Description of Artificial Sequence: Synthetic coding sequence
  source 1..213: mol_type = other DNA
atgaagtttcagtacaaggaggaccacccgtttgaatacagaaagaaggagggggaaaaaatcagaaagaagtaccctgatcgagttcccgtcatagtagaaaaggctcccaaggcacgcgtaccagatctagataaacgaaaatacctagtcccctctgacctgactgtaggacagttttatttcctaatcaggaaacggattcacctctag

SEQ ID NO: 117963 - DNA, 354 bp, synthetic construct
  misc_feature 1..354: note = Description of Artificial Sequence: Synthetic coding sequence
  source 1..354: mol_type = other DNA
atgaaattccagtacaaggaagaccatccctttgagtataggaagaaggagggtgagaaaattcggaaaaagtatcctgatagggtccctgtaattgtggagaaagcccctaaggctagagtccccgacctcgacaaaaggaaatatctggtgccatctgacttgacagtcggacaattctatttcctgattcgaaaaagaatccatctaagaccagaagacgccctgttcttcttcgtaaacaacaccattcccccaacttccgcgacgatgggtcagctttatgaagacaaccacgaagaggactatttcctgtatgttgcgtacagcgacgaatcggtttacggaaagtag

SEQ ID NO: 117964 - DNA, 354 bp, synthetic construct
  misc_feature 1..354: note = Description of Artificial Sequence: Synthetic coding sequence
  source 1..354: mol_type = other DNA
atgaagtggatgtttaaagaagaccatagccttgaacataggtgcgttgagtcggccaagatcagagcgaagtacccagatcgagtgcccgtgattgtagaaaaagtgagcggctcccagatcgtggatatagacaagcgaaagtatttggtcccatctgatatcacggtggcacagttcatgtggataatccggaaaagaattcagctgcctagtgagaaagcgatttttttgttcgttgacaaaaccgtgccacaatcatctttaacaatgggccagttgtatgaaaaagagaaggatgaggacggctttctgtacgtcgcctacagtggggagaatactttcggattttag

SEQ ID NO: 117965 - DNA, 1344 bp, synthetic construct
  misc_feature 1..1344: note = Description of Artificial Sequence: Synthetic coding sequence
  source 1..1344: mol_type = other DNA
atgcccgtcctttacgatagacttctgaaattaaaggaaatgtttaattccaagtttgggtccatacctaaattctacgttcgtgccccaggcagagttaatattattggggaacacattgattactgcggttatagtgtgctcccgatggcagtggaacaggatgtgctgattgcagtcgaacccgttaaaacatacgctctgcagcttgccaatactaaccccttgtacccagacttcagtacttctgcgaataatatccaaatagacaaaacgaagccactgtggcataattatttcctgtgcgggctgaaggggatccaggagcatttcggactgagtaatttgactggaatgaactgtctcgtcgatgggaacattcccccaagttccggactgagctcctcttctgccctagtatgctgtgctggtcttgtgacactgacagtgctgggcaggaacctgtctaaagtagaactggcagaaatctgtgccaagagcgaacgttatattgggactgagggaggcgggatggatcagagtatcagctttttggccgaggaaggaaccgcaaaactgatcgaatttagccccttgagagccactgacgtcaagttaccctctggtgctgtcttcgtcatcgctaactcttgtgttgagatgaacaaggcagccacatcccacttcaatattagagttatggagtgcagattagctgcaaaactcttggcaaagtacaaaagcttgcaatgggataaggtgctgcgcttggaggaggtacaggccaaactcggaatttctctagaggagatgctgctagttacagaggatgccctgcaccccgaaccctataaccccgaagaaatctgcagatgcctgggaatcagcctcgaggagttacgtacccagattctgtcaccaaacacacaggacgttctcattttcaaactttatcagcgtgctaagcacgtgtattcggaggctgcgagggttttgcagtttaagaagatttgcgaggaggctcctgagaatatggtccagcttctcggggagctgatgaaccagtctcacatgagttgtcgcgacatgtatgaatgttcctgcccagagttggatcaactggtggatatttgtagaaagtttggagcccagggaagccgactgaccggtgccggctggggaggctgtacagtaagtatggtgccggctgacaagctgccttcctttctggcaaacgttcacaaggcttactatcagaggagcgacggttctttggccccagagaaacagtcgctcttcgcgaccaagcctggcggaggcgcactggtcttgctggaagcttag

SEQ ID NO: 117966 - DNA, 1305 bp, synthetic construct
  misc_feature 1..1305: note = Description of Artificial Sequence: Synthetic coding sequence
  source 1..1305: mol_type = other DNA
atgttcaattctaagttcggaagtatccccaaattctacgtgagggcacctggccgggtgaacataataggcgaacacatagactactgtggttactccgttctgccgatggccgtggagcaggatgtgctgatcgcggtggagcccgtcaagacctatgccctgcagttggctaatacaaatcctctttaccctgactttagtacatctgctaataacattcagatcgacaagacaaagccactgtggcataattactttctttgcggcctgaagggaatacaggaacacttcggactgtctaatctgactggcatgaactgtctcgtagatggaaatattccccctagtagcggcctttcttcttcatcagcccttgtgtgttgtgctggactggtaaccctgaccgtactcggccgcaacctgtctaaagtggagctcgccgaaatttgcgcgaagtctgagcgttatataggaacagagggaggcggcatggaccagagcattagcttcttagccgaggagggaacggcaaagctcatagagttctctcccctgagggctaccgacgtgaagttgccttccggggctgtgttcgttatcgcaaactcctgcgtggagatgaataaagctgctaccagccattttaatattcgcgtgatggagtgccgtctggcagcaaagctgctggcaaagtataagagtctgcagtgggacaaagtactcaggctggaggaggtccaagctaaactgggaatctctctggaagaaatgttgcttgtcaccgaggatgcactccacccggaaccgtacaatcccgaggaaatctgtaggtgcctgggcatatccctggaagagctccggacacagattctgtcacccaatactcaagatgtcctaatcttcaagctttaccaacgggctaagcacgtgtactcagaagcggccagggtgctgcagttcaagaagatctgcgaagaggcccccgaaaacatggtccagctgctgggcgagctgatgaaccaaagccacatgtcgtgcagggacatgtacgaatgtagctgtccggaactggaccagctggtagatatctgtagaaagtttggcgcacaggggagcagactgacaggggcaggttgggggggatgcacagtgtcaatggtgcctgccgacaagcttccttctttcttggccaacgtgcacaaggcttattaccagaggtctgacggctccttggcacccgagaagcaatctctgtttgcgaccaagcctggtggaggtgccctggttctcttggaagcttag

SEQ ID NO: 117967 - DNA, 624 bp, synthetic construct
  misc_feature 1..624: note = Description of Artificial Sequence: Synthetic coding sequence
  source 1..624: mol_type = other DNA
atgaactgcctcgtcgacggaaacatcccccccagctcaggactgagctcttcatcggccctggtttgttgtgccgggctcgttacgcttactgtgctggggaggaacctgagtaaagtggaattggccgagatctgcgccaagtccgagagatacatcgggactgaaggcggcggaatggaccagagtatctcttttttagccgaggagggtactgcgaagttaatagagttcagtcccctccgcgccacagacgtgaaacttccttctggggctgtcttcgtcatagctaattcttgcgtagaaatgaacaaagccgctacttctcatttcaatatccgcgtgatggagtgtcgactggctgccaaactcctcgccaaatataaatccctccaatgggacaaggtgctacgtttggaggaggttcaggctaaactgggtattagcctggaagaaatgctgctggtcacagaagacgccttgcatccagagccttacaaccctgaagaaatttgtcgatgcttaggaatctccctagaggaactccgaacccagatcctgagccccaacacacaggacgacggggttgtgctctatcgaccgggctggagcgccaccgcctag

SEQ ID NO: 117968 - DNA, 1305 bp, synthetic construct
  misc_feature 1..1305: note = Description of Artificial Sequence: Synthetic coding sequence
  source 1..1305: mol_type = other DNA
atgttcaatagcaaatttggctcgataccaaagttctacgtccgggcgccgggccgcgtaaacattatcggggagcatatcgattactgtggctattccgtgttgcctatggctgtcgagcaggacgtgctgatcgccgtagaacctgtcaaaacatatgctctgcaattggctaacaccaatcctctttatccggacttctccacatccgccaataatatccagatcgacaaaaccaagcctctgtggcacaactactttctttgtgggttgaaaggaatccaagagcactttggcttatcaaatctgaccggcatgaattgtctggtagatggtaatattcccccaagctccggcctgtccagctcttcggccctggtatgttgtgctgggctggtgacactcaccgtgctgggacggaatttgtcaaaggtggaactggccgagatctgtgcgaaatcggagcgatatatagggacagaagggggcggcatggatcagagcatctcctttctggcagaggagggcactgcaaagctcattgagttcagtccactgcgggcgactgacgtgaagcttccgagcggcgcggtgtttgttattgctaacagttgtgtcgagatgaataaggctgctacttcccactttaatattcgagtcatggagtgtagattggcggcgaaactgctcgccaaatataagagcctgcagtgggacaaggtgttaagattagaagaggtgcaagctaagctcgggatttccctagaagaaatgctgttggttaccgaggacgctctgcacccagagccttacaaccctgaagagatttgccggtgcctcggcatctcacttgaggaattgaggacgcagatacttagcccgaacacccaggatgtccttatctttaagctctatcagcgggcgaagcacgtgtacagcgaggcagcacgagtgttgcagtttaagaaaatctgcgaggaagcccccgagaacatggttcagctgctgggggaactgatgaaccagtctcacatgtcctgtcgggatatgtatgaatgctcatgtcccgagctggaccagctcgtggatatttgccgcaagttcggcgcccaggggtctagactaactggcgcggggtggggcggctgtacagtatccatggtccctgcagataagctgccgtcattcctcgctaacgtgcacaaagcctactaccaacgatcagatggctctcttgcacctgaaaagcaatcgttgttcgcaactaaacccggtgggggtgcactcgttctcctagaggcctag

SEQ ID NO: 117969 - DNA, 1305 bp, synthetic construct
  misc_feature 1..1305: note = Description of Artificial Sequence: Synthetic coding sequence
  source 1..1305: mol_type = other DNA
atgttcaactcaaagtttggctctattccaaagttttacgttcgagcccctggtagagtgaacatcattggagaacacattgattactgcggctatagcgttctcccgatggccgtggaacaagacgtactcatcgccgtggaaccagttaagacatacgcgctgcaactcgcaaacactaacccactgtatcccgacttcagtacgtctgcaaataacatccagattgataagaccaaaccactttggcataactacttcctgtgcggacttaaaggaatccaggaacacttcggactgtcgaacctgacaggaatgaactgtctcgttgacggaaatattcccccaagcagcgggctgtccagctcatccgcgctggtgtgctgcgcgggtcttgtgactctgactgtactgggacgaaacctctccaaggtcgagctggccgaaatctgcgccaaaagcgaacgttatatcgggactgagggcggtggtatggatcaaagtatctcctttctcgcggaggagggtactgccaagcttatagagttcagcccattgagggccaccgacgtgaaactcccttcaggggcagtgttcgtcatcgctaacagctgtgtcgaaatgaataaggccgctacttcacacttcaacatccgggtgatggaatgtaggctggccgcgaagttgctggctaaatacaagagtctgcagtgggacaaagtgcttaggttagaagaagtacaggccaagctggggatttctctggaggaaatgcttcttgtaaccgaggacgcgttgcatcctgagccgtacaatccagaagagatatgccggtgtttgggtatcagcctggaagaactgagaacacagatattatctcccaacacccaggacgtcctgatctttaaactgtatcagcgggctaagcacgtatactcagaggccgccagagtactccagtttaagaaaatctgcgaagaagccccggaaaacatggtccagctattaggagaactgatgaatcagagtcatatgtcctgtcgcgacatgtacgagtgctcttgtcccgaactggaccaactggtggacatctgcagaaagttcggcgctcaggggagcaggctgaccggggccggttggggtggatgcactgtcagcatggtaccagcagataagctgccatcctttctggcgaatgtgcacaaggcctactatcagcgttccgatgggtccctcgcccctgaaaagcagtcattgttcgctacaaagccggggggaggcgctctggtgcttctggaggcctag

SEQ ID NO: 117970 - DNA, 1377 bp, synthetic construct
  misc_feature 1..1377: note = Description of Artificial Sequence: Synthetic coding sequence
  source 1..1377: mol_type = other DNA
atggccactgagtctcctgccactcgacgcgttcaggttgcagagcatccccggttattgaaactaaaggagatgtttaactctaaatttggctcaatcccaaaattctatgtgagagccccagggcgggtgaatataatcggcgagcacatcgattactgcggttattcagtcttgcccatggctgtcgaacaggatgtcctgatagccgtggaaccagttaagacatatgccttgcaactggctaatactaacccactgtatcccgacttcagtaccagcgccaataatattcagatcgataagactaagccgttgtggcacaactacttcttgtgcggtctcaagggcattcaggagcattttggtttgtctaacttaacaggaatgaattgccttgttgacggaaatattcctccctcctctgggctgtctagctctagcgccctcgtgtgttgtgccggtctggtgaccctgacggtgctcgggagaaatcttagtaaagtggagctggcagagatttgtgctaagagcgaaagatatattggcacagagggtggcggcatggaccagtccatctcatttctggctgaagaaggcactgcaaagctgatcgaattctccccgttaagagccactgacgtgaagcttcccagtggagctgtgtttgttatcgctaactcatgcgtggagatgaacaaggcagctacctcccatttcaatatcagggtcatggagtgtcggctcgctgcgaagttattggcaaaatacaagtccttgcagtgggataaagttctacggctggaggaggtccaggcaaaattggggattagcctggaagaaatgctgctcgttaccgaggacgcactccatcctgagccctacaatccagaggagatatgccgctgcctgggcattagcttagaagagttgcggacccagattttgagcccaaacacccaggatgtactcatcttcaagctgtaccagagggcaaaacacgtgtattctgaagccgccagagtgctacagttcaagaaaatttgcgaggaagccccagagaatatggtgcagctgctgggcgaactgatgaatcaatcacatatgtcttgtagggatatgtatgaatgctcttgtcccgagctcgatcagttggtggatatttgccggaagttcggtgcacaagggtcgcggcttacaggtgctgggtggggcgggtgcaccgtaagtatggtcccagccgacaaactgcctagcttcctggctaacgtgcacaaggcctattatcagcggtctgacggcagcctggccccagagaagcagtccctgttcgcaaccaagcctgggggcggcgcgctggtcctgctggaggcatag

SEQ ID NO: 117971 - DNA, 1272 bp, synthetic construct
  misc_feature 1..1272: note = Description of Artificial Sequence: Synthetic coding sequence
  source 1..1272: mol_type = other DNA
atgttaccgccacagaagaagccatgggaaagcatggccaagggtctggtcctgggggccctgttcacctctttcctgctgctcgtgtactcttacgccgtgcctcctctacacgctgggctggcatcaacaacacctgaggccgctgcctcatgtagcccacccgccctggagcctgaggctgtcatacgagccaacggctcagctggagaatgtcaaccaaggaggaacattgttttccttaaaacccacaaaaccgccagcagtaccctcctgaacatcctctttcgctttggtcaaaagcaccgcctgaaatttgcattccccaacggaagaaatgacttcgattatccgaccttcttcgctcgcagcctggtgcaggattaccggcctggtgcctgtttcaatatcatatgtaatcacatgagattccactacgatgaagtgcgcgggcttgtgcccacaaatgccattttcatcacagtcctgagggacccagcaagactctttgaaagttcttttcactactttggtcccgtagtgcccttgacttggaaactgagtgccggagacaaactcaccgagtttctccaagaccctgacaggtactatgacccaaacggatttaacgcccactatctcaggaatcttttgttctttgaccttgggtatgataacagtctggatccatcatctcctcaggtgcaggagcatattttggaagtggagagaagatttcacctagtgctccttcaggagtacttcgatgaaagtctcgtgctgcttaaagatctcttatgttgggagctggaagacgtgctgtattttaagctgaatgcacgaagagacagccctgtgcccaggttaagtggagagctatacgggagagccacggcgtggaacatgttagactctcatctatatcggcactttaacgccagcttctggcgaaaagtggaggcttttggccgggagcggatggctagggaagtcgcagcattacggcatgcgaatgaacgcatgcggacaatatgtattgacggtggtcacgctgtggacgccgccgcaatccaggacgaagcaatgcagccctggcagcctctgggcactaagagcatcctggggtacaacctgaaaaaatcgattgggcagagacacgcccagctctgtcgccggatgttgacacctgagattcagtatctgatggatctcggggccaacttgtgggtcaccaagctctggaagtttattcgagattttttacgatggtag

SEQ ID NO: 117972 - DNA, 1272 bp, synthetic construct
  misc_feature 1..1272: note = Description of Artificial Sequence: Synthetic coding sequence
  source 1..1272: mol_type = other DNA
atgctacctccccagaaaaagccctgggagagtatggccaagggtttggtcctcggcgccctgtttactagcttcctcctgttggtttattcctacgcagtgccacccctgcatgctggcctagcatcaacaactccagaagcagcagcaagctgttcacctcctgccctcgaacctgaggctgttatcagggctaatggtagcgccggcgagtgtcaaccacggcgaaatatagtgttcctgaagacccataagaccgcctcctccacactcctgaacatcctctttaggtttggacagaagcatagactcaagttcgcctttcccaatggccggaatgatttcgactatcctacattctttgcaagatcactggtgcaggactatagacctggagcgtgcttcaacattatctgtaatcacatgaggttccactacgacgaggtccgaggcctggtccccaccaacgctatctttataaccgttctgagggatcctgcccggctgttcgagtcttctttccactattttggaccagtcgtgccattgacgtggaagctctcagctggggataaacttaccgaattcctacaggatcctgatcgatactatgatcccaatgggttcaacgcccactaccttcggaacctgttattttttgacttaggctacgataattcactggaccccagttccccccaggtgcaagaacacatactcgaagttgagaggcggtttcacctcgtgctgctgcaggaatactttgacgagtcactcgtgctcctgaaggacctgctttgttgggagttggaggatgttctgtatttcaagctgaatgccaggcgggatagtcctgtgcccaggctaagcggtgagctctatggacgggccactgcatggaacatgctggattcccacctttatcgccacttcaacgctagtttctggcgcaaggtggaagcttttggcagagaacgtatggcgcgcgaagtcgcggctctccgacacgcaaatgagcgaatgagaacgatatgcattgacggtggccacgctgtggacgcagctgctattcaggacgaagccatgcagccatggcaaccactgggaactaaaagtatccttggctacaatctcaaaaagtctatcggacagcgccacgctcagctgtgccgcagaatgctgacccctgagatccagtatctgatggatctaggcgctaacctttgggtaaccaagttgtggaaatttatcagagattttctgcgatggtag

SEQ ID NO: 117973 - DNA, 1272 bp, synthetic construct
  misc_feature 1..1272: note = Description of Artificial Sequence: Synthetic coding sequence
  source 1..1272: mol_type = other DNA
atgctcccaccacaaaaaaagccctgggagtcaatggccaagggcttggttcttggcgcattgtttaccagtttcctgctactggtctattcgtacgcagtcccccccctgcacgcgggcttggcttctaccacaccagaagcagccgcctcatgcagccctcccgccctggagcccgaagccgtgatccgagctaatggcagtgccggcgaatgccagcccaggcggaacattgtctttctgaagactcataaaaccgcgtcttcaacattgctcaatattttgtttcggtttggccagaaacaccggctcaaattcgcctttccgaacgggcgcaatgacttcgactatccgacattttttgctaggtcattagtacaggactatagacccggcgcatgttttaatattatatgtaaccatatgcgctttcactacgatgaagttcgcggactggttcccaccaacgccatctttattacagtgctaagggacccagcaaggttattcgagtccagtttccattattttggacctgtggttcctttaacttggaagctttccgctggggacaagttgaccgagttccttcaggaccctgatcggtactatgatcccaacggttttaacgcacactacctccgaaatctgttattttttgaccttggatacgataatagtctagacccctccagtccccaggtccaggagcacattctggaggttgagagacggtttcacctagtcttgcttcaggagtatttcgacgagtcactggtgttgttaaaagatttgttatgttgggagttggaggacgtgctgtatttcaagctgaacgcgcgcagggacagcccagtgcccaggctgtcaggtgaattatacgggcgtgcaaccgcctggaatatgctggactcacatctgtatcgccacttcaacgcctccttctggaggaaagtagaggcgttcggccgggaacgtatggcacgggaggtcgcggccctgcgacacgccaacgagcgcatgcgcactatatgcatcgacggaggccacgccgtggatgccgccgcaatccaggatgaagcgatgcaaccgtggcagccactcggaaccaagtccattctaggctacaacctcaaaaaatcaataggacagcgtcatgcccagttatgtagaaggatgcttacacctgaaatccaatatctgatggacctgggggccaacctctgggtcacgaagttatggaagtttattcgtgacttcctccgttggtag

SEQ ID NO: 117974 - DNA, 1272 bp, synthetic construct
  misc_feature 1..1272: note = Description of Artificial Sequence: Synthetic coding sequence
  source 1..1272: mol_type = other DNA
atgctgcccccccagaagaagccatgggaatccatggccaaaggcctggtattgggggccttattcacatcatttctgcttctcgtctactcttatgcagtcccacccctacacgcaggtttggcatctactacgcctgaggcggctgcatcttgttcccccccggcactggaaccggaagctgttatcagagctaacggatctgcgggggagtgtcagccaaggcgcaatatcgtgttcctcaagacccataaaacagccagtagtactctgttaaacattctgttcaggtttggacaaaagcacaggttaaaattcgccttccccaacgggaggaatgacttcgactatccaacttttttcgcacggagtcttgtgcaggactacagacccggagcctgttttaatattatttgtaaccatatgcgttttcattacgatgaggttagagggctggtgcccacaaacgccatatttattaccgtgctgcgggatccagcccggctttttgagagctcctttcattacttcggccctgttgtccctctgacatggaaactgtctgccggggataaactcacggagttcctgcaggacccagaccggtattacgatccaaacggatttaatgcgcactatcttaggaacttgttgttttttgatctcggctatgataattccctcgatccctctagccctcaggtccaggaacacatcctggaggtcgagagacgatttcacctcgttcttctgcaggaatactttgatgaaagtttagtcttattgaaagatctcctctgctgggaactggaggatgtactgtacttcaagctcaacgcccggagggatagtcccgtgccacgactgtcgggagagttatatggtagagcaacagcctggaacatgctagactcccatctgtacaggcatttcaatgcttctttttggaggaaagtggaggcctttgggcgggaacgtatggcccgagaagttgccgccctccggcatgcgaacgagcggatgaggacaatttgcatcgatggggggcacgccgtggacgctgcagcaatacaggatgaagctatgcagccgtggcagccccttggtacaaaatctatcctgggctataacctcaagaaatctattgggcagaggcatgcgcagttgtgtaggagaatgttgaccccagagatacagtacctaatggacttgggggctaatctctgggtgacgaaactgtggaaatttattagggactttcttcgatggtag

SEQ ID NO: 117975 - DNA, 1272 bp, synthetic construct
  misc_feature 1..1272: note = Description of Artificial Sequence: Synthetic coding sequence
  source 1..1272: mol_type = other DNA
atgctacctcctcagaagaaaccttgggagtcaatggctaagggcttggtgctgggggccttatttacatcattccttctcctggtctactcgtacgccgtgccccctcttcatgccggcctggcctccaccacgccagaagccgccgcttcctgctcacccccagctttagagcctgaggctgttataagagccaatgggtccgcaggtgaatgccagccccgcaggaatattgttttcctgaagacccataaaacggccagttcaactctgctgaatattttgtttaggtttgggcaaaagcaccgtttgaagttcgcttttccgaatggccggaacgattttgattacccaaccttcttcgcgcgctccctggtgcaggactacaggccgggcgcgtgctttaatatcatttgcaatcacatgaggttccattatgatgaagtgcgtgggctcgtgccaaccaacgctattttcatcaccgtgctacgggaccctgctagactgtttgagagctcgtttcattacttcggccctgtggtgcctctgacatggaagctgtcagcgggcgacaagctgaccgaatttctacaggatccagaccgctattacgatccaaacggattcaacgcacactatttgaggaacttgcttttcttcgacctggggtatgataactcactggatcccagtagtccccaggtccaagagcatatattggaggtggaaaggcggtttcatttagtgctcctacaggagtacttcgacgaatccctagttctccttaaggacttgctgtgctgggaactcgaggatgtgctttattttaagctgaatgccaggcgcgactcccctgttccccgcctcagcggagagttgtacggcagagctaccgcttggaatatgctggactctcacctctaccgacacttcaacgccagtttctggcggaaggttgaggcctttggcagagagaggatggctcgtgaagttgcagctctcagacacgcaaacgagagaatgcgcaccatttgcatagacgggggccatgccgtggatgcggccgcaattcaggacgaagctatgcagccttggcagcccttaggcactaagtcaatcctgggttacaacctgaaaaagtcgataggtcagcgacatgcccaactgtgtcgtcgtatgttgacccctgagatccagtatcttatggatctaggggccaatttatgggtaaccaaactgtggaagtttataagggactttttgagatggtag

SEQ ID NO: 117976 - DNA, 1272 bp, synthetic construct
  misc_feature 1..1272: note = Description of Artificial Sequence: Synthetic coding sequence
  source 1..1272: mol_type = other DNA
atgttgccaccccagaaaaaaccctgggagtccatggctaaaggcctggtattaggcgctctgtttacaagctttctccttctggtgtattcctacgccgttcccccactgcacgctggcctcgcttccaccactcctgaggcggctgcttcttgctcaccgccggctctggaacctgaggctgtgattcgggcaaatggctctgctggcgagtgccagcctcgtcggaacatcgtattcttgaagacacacaagacggcgtcatcaacactcctaaacattctcttccgattcgggcagaaacacaggctgaagtttgctttcccaaatgggcggaatgatttcgactacccaaccttttttgcccgctccctcgttcaggattacaggccaggcgcatgctttaacattatctgtaatcacatgaggttccactacgatgaggtgaggggtttggtgccaacgaacgccatctttataaccgtgctcagagaccccgcccgcctgttcgagagtagcttccattatttcgggcccgtggtccctcttacctggaagctgtccgccggggataagcttactgagttcttgcaagacccggataggtattatgatccaaacggcttcaacgctcattacctgcgcaatctgctcttcttcgacctgggttatgataacagcctagacccatcgtccccgcaggtgcaggagcacatactcgaagtggaaagacgttttcatcttgttttactgcaagaatattttgacgaaagcctggtcctgctgaaggacctcttgtgctgggaattggaagatgttctatatttcaaactcaatgctcgccgcgattcacctgtccctcgcttgtccggagaactctatggacgcgcgacagcttggaacatgctcgattctcacctgtatagacattttaacgcatctttttggcgcaaagttgaagccttcggacgagagagaatggcccgcgaggtggcagcattacgacatgctaacgaaaggatgcgcacaatttgtatagatgggggccacgccgtagatgctgctgcaatacaagacgaggcaatgcagccctggcagcccttggggacgaaatccatactgggctataacctcaagaagtccattggtcagagacacgctcagctgtgtcggcgcatgctcacaccagagatccaatatctgatggacctgggcgcgaatttatgggttactaaactttggaagttcattcgcgattttttgcgttggtag

SEQ ID NO: 117977 - DNA, 258 bp, synthetic construct
  misc_feature 1..258: note = Description of Artificial Sequence: Synthetic coding sequence
  source 1..258: mol_type = other DNA
atgctgccaccgcagaagaagccatgggagtcaatggccaagggcttagtgcttggtgccctctttacctcttttcttctcctggtctactcttacgctgtgccaccccttcatgccggattagcctccaccaccccagaggccgcagcttcttgttcccctcctgccctcgagccagaggcagtgatccgggcaaacggcagcgccggagagtgccagcctaggagaaacatcgtctttctcaaaacacataaatag

SEQ ID NO: 117978 - DNA, 513 bp, synthetic construct
  misc_feature 1..513: note = Description of Artificial Sequence: Synthetic coding sequence
  source 1..513: mol_type = other DNA
atgctacctccgcagaagaagccttgggagagtatggccaaaggattggtcctcggagctttgtttacctcattcctgctgcttgtgtacagttacgcggtacctcctcttcacgccggcctagcaagcaccaccccagaggccgcagccagctgcagcccgcctgccttggaacctgaagctgttatacgggccaacggaagtgcaggagagtgccagccccggagaaacatcgtctttttaaaaactcacaagaccgcatccagtacgttgctgaacatacttttcagattcggccagaagcaccgcctcaaatttgccttcccaaatggcaggaacgattttgattaccccacctttttcgcaaggagcctggtgcaggattataggccgggagcatgtttcaacatcatctgcaaccatatgcgctttcactatgacgaagtcagaggcctggttcctacaaatgccatatttataactgtcctcagagaccctgcccggcttttctag

SEQ ID NO: 117979 - DNA, 450 bp, synthetic construct
  misc_feature 1..450: note = Description of Artificial Sequence: Synthetic coding sequence
  source 1..450: mol_type = other DNA
atgctgcccccccagaaaaaaccctgggagagtatggcaaaaggcctcgtgctgggagccttgttcacttctttcctacttctggtatactcttatgctgtcccgcctctccacgctggcctggcaagtaccactcccgaagctgccgctagctgctctcccccggcgctcgagccagaggccgtaatccgagcaaacgggagcgccggagaatgtcagcctcgtcgtaatatcgttttcctgaagacccataagacagcatcaagtaccctgctcaacattctcttccggttcgggcagaaacatcgtttaaaattcgcctttccaaacggtcgcaacgactttgactaccccactttctttgcacgatctttggtccaagattaccggccgggggcgtgttttaatatcatctgcaaccatatgcgatttcattatgatgaagtgtag

SEQ ID NO: 117980 - DNA, 300 bp, synthetic construct
  misc_feature 1..300: note = Description of Artificial Sequence: Synthetic coding sequence
  source 1..300: mol_type = other DNA
atgctaccccctcaaaagaaaccttgggaatcgatggcaaaagggctagttctgggcgccttattcacctcctttctgctgttagtgtactcttacgcagtgccccccctgcacgcgggcctagcctcaactaccccggaagccgcggccagttgctcccccccggcgctggaaccggaagccgttattagagcaaatggtagtgccggcgaatgccaaccgcgacgcaatattgtattcctcaagactcacaaaactgcttcctccactctactgaacatacttttccgctttggctag

SEQ ID NO: 117981 - DNA, 312 bp, synthetic construct
  misc_feature 1..312: note = Description of Artificial Sequence: Synthetic coding sequence
  source 1..312: mol_type = other DNA
atgcttcctcctcagaaaaaaccctgggaatcaatggcgaagggacttgtgctcggggctttgttcacatccttcctgctcttagtgtactcctatgctgtcccccctctccacgctggactggcctcaacgaccccagaggctgccgcctcctgctcaccaccagcactcgagccagaggcagttattcgggccaatgggtccgccggcgaatgccagcctcggcgtaacattgtgttcctgaaaacacataagacggccagtagtacgttacttaatatcctgttcagattcggccagaagcaccgttag

SEQ ID NO: 117982 - DNA, 600 bp, synthetic construct
  misc_feature 1..600: note = Description of Artificial Sequence: Synthetic coding sequence
  source 1..600: mol_type = other DNA
atgctcccgccacaaaagaaaccctgggaatccatggccaaaggcctagtgctcggcgccctgtttacctcgttcctcctgctagtgtactcatatgccgtcccaccactgcacgccgggctagccagcaccacccctgaggccgcggccagctgttcaccgcctgcgctggagccagaggctgtgatccgggcaaacgggagtgcgggcgagtgccagccaagacggaatatcgtctttctgaagacacataagacagccagtagtacactgttaaacatcctgtttagattcggccaaaagcacaggctgaagtttgcctttccaaacggtagaaatgacttcgactatccaacttttttcgccaggtccttggttcaggactacaggcctggtgcatgctttaacatcatctgtaatcacatgaggttccactacgacgaagtcagaggccttgtgccaaccaacgcgatctttattaccgtgctgagagatccagcccggctctttgaaagctctttccactacttcggaccagtcgtgccccttacatggaagctgtcggccggcgacaaactgacagagtttctccaggactag

SEQ ID NO: 117983 - DNA, 840 bp, synthetic construct
  misc_feature 1..840: note = Description of Artificial Sequence: Synthetic coding sequence
  source 1..840: mol_type = other DNA
atgctaccccctcaaaaaaaaccttgggagagcatggctaagggactcgttttgggagcgctgtttacatcttttttactcttggtctacagctacgcggttcctcccttgcatgcgggtctcgcaagcacgacgcctgaagccgcagcttcatgcagtcctcctgctctagagcccgaagcagttattcgggctaacgggtccgctggggagtgtcagccaagacgtaacattgtcttcctcaagacccacaagactgctagtagcacgctcctcaacattctatttcgctttggtcagaaacatcgcctgaaatttgctttccccaacgggcgaaatgatttcgactatcctacatttttcgcacgctccttggtccaggattacagacccggggcatgtttcaatatcatttgtaatcacatgcgcttccactacgacgaggtgcgaggactggtccctacaaatgccatttttatcacggtgctcagggatcctgcccgcctgtttgaatcgtccttccattatttcgggcctgtggttcctcttacctggaaactgtccgccggcgacaagttgactgagtttctacaggatcccgataggtattacgatccgaatggctttaacgcccactacctgcggaatttgctgtttttcgaccttggctacgacaatagcctagacccgtcctcacctcaggtccaggagcacattcttgaggtggaaagaagattccatcttgtgttgctgcaagaatacttcgatgaatcactggtactgctgaaagatctgttgtgctgggagctcgaagatgttctgtacttcaagctgaactag

SEQ ID NO: 117984 - DNA, 1272 bp, synthetic construct
  misc_feature 1..1272: note = Description of Artificial Sequence: Synthetic coding sequence
  source 1..1272: mol_type = other DNA
atgctgccaccccagaagaagccttgggaatccatggccaaaggattagttttgggagcgctcttcactagctttctgctcctcgtgtatagctatgccgtgcccccgctacatgccgggcttgcctctaccacacctgaagccgccgccagctgctcaccccctgcactcgaacctgaagccgtgatccgggcaaatggtagcgccggcgagtgtcagcctcgccggaacattgtgttcctaaagacacataagaccgcttcaagcacactattgaatatcctgtttaggttcggccagaaacacaggctgaagtttgcctttccgaacgggcgcaacgattttgactacccaacattctttgcccggtccctagtgcaagactatcgtccaggggcatgcttcaacatcatttgcaatcacatgcgcttccactacgacgaggtacgaggcctggtgccaaccaacgcaattttcatcactgttctgagagatcctgcaaggctgttcgagagcagcttccactattttggtcccgtcgtgccattgacgtggaagctaagtgccggcgataagctcaccgagtttctgcaggatccagatcggtactacgacccaaacgggtttaatgcacattatctgaggaatctactcttcttcgatctggggtacgataatagcctcgacccatctagcccccaggtgcaggagcacatcctcgaagtggaaaggcgtttccatctcgtgctgttgcaggaatatttcgacgaaagtctcgtgctgctaaaggacctgttatgctgggagctagaggacgtcctttacttcaaattgaatgcacggagagattccccagttcccagactcagtggggaactttatggacgtgccaccgcctggaacatgctggattctcacctgtataggcactttaacgcttctttttggagaaaggtcgaagcttttggacgtgaacggatggctagggaggtggctgctctgaggcacgccaatgaaaggatgcgtacaatatgcatcgatggcggccacgcagtcgacgctgccgccattcaggatgaggccatgcagccatggcagccacttggaactaaatcaatcctgggttacaatctcaagaaaagcatcggacagaggcacgctcagttatgccgacgcatgctcactcctgagattcagtatctgatggatctgggggccaacctgtgggtgacaaaactgtggaaatttattcgggatttcctacgctggtag

SEQ ID NO: 117985 - DNA, 432 bp, synthetic construct
  misc_feature 1..432: note = Description of Artificial Sequence: Synthetic coding sequence
  source 1..432: mol_type = other DNA
atgttgcctccccagaagaagccttgggagagcatggcaaaagggctggtcctcggggccctgttcacaagcttcctgcttctcgtgtattcttatgcagtgccccctctccatgccggcttggcatctaccacacccgaggctgccgcaagctgttcaccaccagcactggagccagaagccgtcatccgcgcaaatgggagtgcgggcgagtgccagcctcggcgcaacatagtgtttttgaaaacacacaaaacggcttcatcgactttgttgaatattctttttcggttcgggcagaagcaccgcctgaagttcgctttccccaatggaagaaatgacttcgactaccccactttctttgctcgaagcctagtccaagactaccggcctggcgcatgttttaacatcatttgcaatcacatgcgatag

SEQ ID NO: 117986 - DNA, 231 bp, synthetic construct
  misc_feature 1..231: note = Description of Artificial Sequence: Synthetic coding sequence
  source 1..231: mol_type = other DNA
atgttgcccccacagaaaaagccatgggagtccatggcgaaggggctggtcctgggcgccctatttacaagtttcttgctcctggtgtattcttatgccgtcccccccttacacgcaggccttgcttctactactccagaagccgctgccagctgttccccccccgctctagagccagaggcagtcatccgggctaatggatctgccggcgaatgtcagcctcgcagatag

SEQ ID NO: 117987 - DNA, 288 bp, synthetic construct
  misc_feature 1..288: note = Description of Artificial Sequence: Synthetic coding sequence
  source 1..288: mol_type = other DNA
atgctgccgcctcagaagaagccgtgggagtcaatggctaaagggctggtgctaggcgcccttttcacaagtttcttactcctggtttattcatacgcggtccctcctctgcatgccggcctggccagcactacgcccgaggccgctgcctcctgctctcccccagcactggaaccagaggccgtgattcgagctaacgggtcagctggagaatgtcagcctagacgcaacattgtattcctgaaaacgcataaaacggctagctcaacattgctgaatattctttag

SEQ ID NO: 117988 - DNA, 216 bp, synthetic construct
  misc_feature 1..216: note = Description of Artificial Sequence: Synthetic coding sequence
  source 1..216: mol_type = other DNA
atgctgccccctcagaagaaaccgtgggagagtatggctaaaggactggtgctcggcgctctgttcaccagcttccttttgctcgtttacagctacgccgtaccgcctctacacgccgggctggcctccacaacgcccgaagctgctgcatcttgttctcccccagccttggaacccgaggcggtgatacgtgcaaacggatcagcaggagagtag

SEQ ID NO: 117989 - DNA, 729 bp, synthetic construct
  misc_feature 1..729: note = Description of Artificial Sequence: Synthetic coding sequence
  source 1..729: mol_type = other DNA
atgctacccccacagaaaaaaccctgggaatccatggccaaaggtctggtcctaggagccttgtttacaagtttcctgctgctggtgtatagctatgccgtccccccccttcacgctggactggcctctaccacccccgaagccgccgcaagctgcagcccccctgccctcgagccggaagcagttatccgtgccaatgggagcgcaggggagtgccagccaagacgcaatatcgtgtttctcaagacccataaaacagcaagctctactcttcttaatattctatttaggttcggccagaaacaccggttgaagtttgccttcccaaacggccgtaatgacttcgattatcccaccttctttgcaaggtccctggtacaggattaccgacccggggcatgtttcaacattatttgtaatcacatgagattccattatgatgaagttaggggcctagtccccactaatgccattttcataactgtgttgagagaccctgcaaggctcttcgagtcttccttccactacttcggacctgtggttccactgacctggaaactgtctgcaggggacaagttgactgaattcctccaagatcccgaccggtactacgaccccaacggctttaatgctcactatttgaggaatctgttatttttcgacctcggatatgacaattcgcttgatcccagtagccctcaggtgcaggaacatattctcgaggtgtag

SEQ ID NO: 117990 - DNA, 303 bp, synthetic construct
  misc_feature 1..303: note = Description of Artificial Sequence: Synthetic coding sequence
  source 1..303: mol_type = other DNA
atgctgccccctcagaagaagccttgggagagcatggctaaaggactggtgctgggcgccctatttacaagctttctgcttttggtatatagttatgccgtgccgccactgcacgcgggattggcaagcaccacacccgaagctgctgcctcatgttcacccccggcgctggaacctgaagccgtaattagggccaacgggtcggcgggggaatgtcagcctagaagaaatatcgtattcctgaaaacacacaaaacagcatcatccacacttctcaatatcctcttcaggtttggacagtag

SEQ ID NO: 117991 - DNA, 1197 bp, synthetic construct
  misc_feature 1..1197: note = Description of Artificial Sequence: Synthetic coding sequence
  source 1..1197: mol_type = other DNA
atgatgagcatgctgggaggtttacaacgctatttcagagtaatcctgctgctgctgttggcattgaccttactattgttggccggtttcctgcattctgatctggagctggacacccctctcttcgggggacaggccgagggacctcccgtaacgaatatcatgtttctgaagactcataagaccgctagctcaaccgttctaaacattctttatcgttttgctgaaacccacaatctgtcagtcgctctgcctgccgggtccagggtgcaccttggatacccctggctgttcctagctaggtacgttgagggcgtcggtagccagcagagattcaatatcatgtgcaaccacctgagattcaacctaccgcaagttcaaaaggtgatgcccaatgacaccttttactttagtattctccggaatcctgtgtttcagctggagtcctcttttatttattataaaacttatgcacctgcattccgcggcgcccccagcctcgatgccttcttggcttcacctaggacattttataacgattcaaggcatctgcgcaacgtgtatgcaaagaataatatgtggtttgatttcggctttgatcctaacgctcagtgtgaggaaggttacgtgagggctcggatcgccgaagtagaacggaggtttcggctggtgctgatcgccgaacacctcgatgaatccctggtcctgctccgtagacggttgcggtgggctttagatgacgtggtcgccttccggctgaacagccggtctgcacgaagcgtggccaggctttccccagaaacaagagaaagagcacgatcctggtgtgctcttgattggaggctgtacgaacactttaatcgcacactttgggcacagctgcgggccgagctaggcccccggcgactccgaggggaggtggagagactaagggctcggcgtagagagctcgccagcctctgtctgcaggatgggggcgcattgaagaatcacacacaaatccgcgacccgagacttcgtccctatcaatccgggaaggctgacatcctgggatataacttacggcctgggctggacaatcagacgctgggggtgtgtcagagacttgtgatgcccgaattgcagtacatggcccgtttgtatgctcttcagttcccggaaaaaccactgaagaacatcccgtttctgggcgcctag

SEQ ID NO: 117992 - DNA, 1296 bp, synthetic construct
  misc_feature 1..1296: note = Description of Artificial Sequence: Synthetic coding sequence
  source 1..1296: mol_type = other DNA
atgccaccgattctccagagactgcagcaggctaccaagatgatgtcacgcagaaaaattctattattggtgctcgggtgtagtacggtgtccttactgatccaccaaggggcccagttgtcatggtatccgaagctatttcctttaagctgtccacctttgaggaatagccccccccgccctaaacacatgacagtcgcatttctgaagactcacaaaactgccggaaccaccgtgcaaaacatcctgttccgcttcgccgagcgccacaacctcacagtagctctcccgcatccttcttgtgagcaccaattttgctacccaagaaacttctctgcccactttgtacatcccgccacccgaccccctcatgttcttgcgagtcacctgagatttgatcgcgctgagcttgaacgcctgatgccgccgtctactgtgtacgtgaccatccttcgtgaaccagcggctatgtttgaaagtctctttagctattataatcagtactgccccgcattcaggcgtgtaccaaatgcctctctggaagcgttcctcagagcccctgaagcatactaccgggctggggagcacttcgctatgtttgcacataatactcttgcttacgatttgggcggcgacaacgagagaagcccaagagacgatgcagcctatttagctggactcatccgacaggtagaagaggttttctccctcgttatgatagccgagtatttcgacgagagccttgtgctactgagacggctgctggcatgggatcttgacgatgtcctttatgctaagctgaacgcgcgcgcagcctcatcaaggctagccgctattcctgcagcgctcgctagagccgctcgtacatggaacgccctggacgccggcctttacgaccacttcaacgcgactttctggcgccacgtcgcccgtgcaggccgggcctgcgtggaacgagaggcccgtgaactaagagaggctcgtcaaagattgctgcgccggtgttttggcgacgagccgctcctgaggcccgccgcccaaatccgtacaaaacagttgcagccatggcagccatcccggaaagttgacatcatgggttatgatttgccaggcggtggagcagggcctgctactgaggcctgtctgaaactcgcaatgcccgaggtacagtacagcaactatcttcttcggaaacagaaacgcaggggcggcgccagagcgaggcccgagcctgtgctggacaaccctcccccccgacccatcagagtccttccccgggggccccaggggccctag

SEQ ID NO: 117993 - DNA, 1296 bp, synthetic construct
  misc_feature 1..1296: note = Description of Artificial Sequence: Synthetic coding sequence
  source 1..1296: mol_type = other DNA
atgccccctatcctccagagactccagcaggcaaccaagatgatgtcaagaagaaaaatactgttgctggtgctcggctgttctaccgtaagtctcctgatccatcagggggcccaactgtcctggtacccgaagctgttccctctgtcctgtcctcctttacggaacagtcctcctcggccaaaacacatgaccgtagccttcctcaagacacataaaactgccggcactacagtccaaaacattctgtttagatttgctgaacgccacaacctcacagtggcccttcctcacccatcctgcgaacatcagttttgttaccctcgcaattttagcgcacacttcgttcacccagccacacggcccccccacgtgctggcatcccatctgaggttcgacagagctgaactagagagactgatgcccccctcaacagtgtacgtgacaattctgagggaacctgctgccatgttcgaatcactgtttagttattacaatcagtattgccctgccttcagaagagttccgaacgcttctctggaagcgtttcttcgcgctccagaggcgtattaccgggcaggggaacatttcgctatgtttgctcacaatactctggcatacgatctgggaggagacaacgaacggagtccgagggatgacgcagcttatttggcaggcctcataaggcaggtggaggaggtattctcactcgtgatgatagccgagtactttgacgagtctttagttctgcttagaaggctactggcctgggacctggatgacgtgctgtacgcaaagctaaacgctcgcgctgctagcagccgcttagctgctatccccgcagccctagcgcgggctgctagaacctggaacgctctggatgccgggctctacgatcattttaacgctacattctggcgacatgtggctcgtgctggccgggcgtgcgtcgaacgggaggctagagagcttcgcgaggcacgccaaagactgctgcgcaggtgttttggtgatgaacctctgttaagacccgcggctcagataagaacaaagcagctgcaaccttggcaacccagtaggaaggtggatattatgggttatgacctgcctgggggcggggcgggaccagcaactgaggcctgcttaaaattagctatgcctgaggtgcaatattccaactacttgttgcggaagcagaaacggcgagggggcgccagagcccgtcctgaaccagttctggacaacccgccccccaggcccattagggtgttgcctagaggtcctcagggcccgtag

SEQ ID NO: 117994 - DNA, 1461 bp, synthetic construct
  misc_feature 1..1461: note = Description of Artificial Sequence: Synthetic coding sequence
  source 1..1461: mol_type = other DNA
atggggcccctgagccctgcacgtactctgaggttatgggggccacgctcacttggagtggccctcggagtcttcatgaccataggattcgctttgcaactgctcggcggtcccttccagcgacgattgcccggcctgcagctccggcagccctctgcgccttcccttcgtccggctctgcctagctgtccaccacgtcagcgcctcgtgttcctcaaaactcataagtctggatccagtagcgtgctgtctctgctgcataggtacggggaccagcacgggctgcgttttgctctacccgcccggtatcagtttgggtacccaaagctttttcaggcctctcgggtgaagggctatcgccctcaagggggagggactcagctgcccttccacatcctgtgccaccacatgagatttaatttgaaagaagtgctgcaagtcatgccgagcgattcgttcttctttagtatagtgagggatccggctgcgctggctcggtcggccttctcttactataagtcaacgtcgagcgcgttccggaaatctccttcattggccgccttcctcgctaacccgagagggttttacagaccaggggcacggggcgaccattatgcccgaaatctcttatggtttgactttggacttccatttccccctgagaagagggctaagagaggtaacatccatcctccccgcgatcccaacccaccacaactgcaggtcctcccaagcggggctgggccgcgggcccagacgttaaatccaaacgcgctcattcaccccgtgtcaacagtgactgatcacaggagtcagattagctctccagcaagcttcgatctgggaagttctagtttcattcagtggggtttagcatggctggatagtgtgttcgacctggtgatggtggctgaatactttgatgagtcacttgtactgcttgcggacgctttgtgttggggtctggacgatgttgtgggattcatgcataatgcacaagccggccataaacagggcttatcaacagtctccaattccgggttgacagctgaagataggcaactgaccgctcgtgcccgggcgtggaacaacttggactgggccctgtacgtacattttaatcggtccctgtgggctcggatagagaaatacggacaggggagactgcagacggctgtggcagagctccgggctcgccgcgaggcactggctaagcactgtctcgtgggcggggaagccagcgatccaaaatacataacagaccgtaggttcagacctttccagtttggctctgccaaggtgttggggtatatacttagaagcgggctgagtccacaggaccaagaagagtgtgagcgactggccacacccgagctgcagtacaaagataaacttgacgcaaaacagttccccccaactgtgtcgttgcctttaaaaacatctcgtcctctctctccttag

SEQ ID NO: 117995 - DNA, 1461 bp, synthetic construct
  misc_feature 1..1461: note = Description of Artificial Sequence: Synthetic coding sequence
  source 1..1461: mol_type = other DNA
atgggaccactgtcccccgcgcgtaccctgcgtctttggggacctagatccctcggggtggctctgggagttttcatgacaatcggattcgcgctgcagctgctgggagggccatttcagcgacggctacccggcctgcagctgcggcagccttcggctccatctctgcgccccgctcttccttcgtgtccaccccggcagagacttgtctttctgaagacacacaagtctggatcttctagtgtactctctctgctgcatcgctacggggaccaacacggcttacgctttgccctgcccgcaaggtaccagtttggttacccaaaattgttccaggcctcacgagtgaagggataccgcccgcaagggggagggacacagctgcccttccatatattatgtcaccatatgcggttcaatctcaaagaagtgttacaggtgatgccatccgactccttctttttcagcatcgtgcgtgaccccgcagcattagcaaggagcgctttctcctattacaagtctacttcatcagcctttagaaaaagcccgtctttggctgcattcctggccaatcccaggggtttctatcggcccggtgccaggggcgatcactatgctagaaatctgttatggttcgatttcgggcttccgttccctcccgagaagagggcaaaaagggggaatattcaccccccaagagaccccaacccaccccagctgcaagtgctgccctctggcgccggcccccgtgcacagacacttaatcctaatgctctgatacacccagtgtccaccgtgacagaccaccggagccagatttcttcccctgcaagctttgacttaggctcatctagcttcatacagtggggcctcgcgtggctggacagtgtttttgacctcgtgatggtggctgaatacttcgacgagagcctcgtgctgctggccgatgctctgtgttggggactcgatgacgtcgtgggtttcatgcacaatgctcaggccggtcacaagcaaggcttgagtacagtgtccaacagtgggctcaccgcagaagaccgacaactaactgctagagctcgtgcatggaataacctggactgggcgttgtacgtgcattttaacagatccctctgggctaggatagagaagtatggacaaggtaggcttcagacggcagtggcggaattgcgggcccgacgggaggctttagctaagcattgtcttgtgggaggggaggcctctgatcctaagtacattactgacaggcgttttcgacctttccagttcggatctgctaaggtcttgggctacattcttagaagtggcctgtcacctcaggatcaggaggaatgcgagcggctggcgactccagagctgcagtataaagataaactcgacgccaaacaattccctccgacagtcagcctccccctgaagacctcacgacctctcagtccgtag

SEQ ID NO: 117996 - DNA, 1275 bp, synthetic construct
  misc_feature 1..1275: note = Description of Artificial Sequence: Synthetic coding sequence
  source 1..1275: mol_type = other DNA
atgaccccaaggagtcccacaagcgccttccggtcctgcaccgccgttagctcgtgtctgtgtccttctagttggccctggctgcacctgagtgtgacctcgcccttcccagtccctcacggtccatctctgtcctgccaggatgccgctgcgctagggacttccgagcctggaggaggaagcggatccttgcatgatcactggctgtgcacccctgctctgggaagagccctgcccgaggaagttctgcaagtcatgccaagcgattctttttttttttccatagttagggatcccgcagccctggccagatcagcattttcgtattataagtctacgtccagcgcttttcgcaagtcgccttcccttgccgcctttctggcaaacccaaggggtttctaccgccccggtgctcggggcgatcactatgcccgcaatcttctttggttcgacttcgggctaccatttccacctgagaagcgcgccaagcggggcaacattcatccccctcgcgatcccaaccctcctcagcttcaggtgctcccatcaggagccggtcctcgggctcagacgctgaatcccaacgcattgatccatcccgttagcacagtcacagaccaccggagtcagattagcagccctgctagttttgacctgggcagcagctccttcatccagtggggtctcgcctggctcgacagtgtattcgacctcgttatggtggcggagtactttgacgaatcactggttctgttagccgacgctctgtgctggggactggacgatgtggtgggcttcatgcataacgctcaggccgggcacaaacaggggcttagcaccgtgtctaattccgggctaactgcagaggatagacagctgaccgcacgagccagagcttggaacaatctcgattgggctctgtacgtacattttaacagatcgctatgggctagaatcgaaaagtacggccagggccggttgcagacagccgtggcagaactgcgcgcgcgccgcgaggcactggcgaagcattgcttagtcgggggcgaggcctctgacccgaagtacataactgatcggcgttttaggccctttcagtttggcagtgctaaggtgctgggctacatcctgcggtctggcctatcacctcaggaccaagaagagtgtgaaagactcgccacacctgagttacagtataaagataaactagacgccaagcagttccctccaaccgttagcttgcccctgaaaacatctcgtcctctgtccccatag

SEQ ID NO: 117997 - DNA, 1641 bp, synthetic construct
  misc_feature 1..1641: note = Description of Artificial Sequence: Synthetic coding sequence
  source 1..1641: mol_type = other DNA
atgccagggttcctggtgcgtatcctgcctctgttattggtgctgctgctgctgggtcctacaaggggtctccgcaatgctacgcaacgaatgttcgaaatagactattctcgggattcattcctcaaggatggccagccatttcgctatatcagtggatctatccactattccagagtgcctcggttctactggaaagaccggctccttaagatgaagatggccggtttaaatgcaatccaaaccttgcccggctcctgcgggcaggtggtgggaagccccagtgcccaggatgaggccagtcccctgtccgagtggagagcttcgtacaacagtgccgggagcaacatcactgatgcatttctgtcccagcggaaatgtgaacccaaaggaccactgataaattccgagttctatactgggtggctcgatcactggggccagccccatagcactataaaaactgaggctgtcgcctcaagtctgtacgacatattggcacgcggcgccagcgtgaatctttatatgtttattggcggtactaacttcgcatattggaatggtgccaactcaccttacgccgcacagcccaccagctatgactacgatgccccactgagcgaggccggagatcttaccgagaaatatttcgccctgagaaatatcatccagaagttcgaaaaggtccccgaaggcccaattcctccctcaacaccaaaatttgcatacggtaaggtcaccctcgagaagctgaagaccgttggagccgctcttgacattctgtgccctagcggacctattaagtccctgtaccctctgacattcattcaggttaagcagcattatggtttcgttctttaccgcacgaccctgcctcaggactgctcaaaccctgcacctctgtcctcccctctgaatggggtccacgatcgcgcctatgtcgcagtagatggcatcccccagggagtgcttgaaagaaacaacgtgatcacattaaacatcactgggaaagctggtgccactttggatttgctggtggaaaatatgggacgcgtgaactatggcgcatacataaatgacttcaagggtctggtctccaatctgacactatccagtaacattctcaccgactggaccattttccctctagacactgaagacgcggtgtgctctcatctggggggatggggacaccgggattccggacaccatgacgaagcttgggcccataattcctccaactacacgttgccggcattttatatgggaaatttcagcattccatctggtatcccagacttaccccaagatacttttattcagtttcccggctggacaaagggtcaggtatggattaacgggttcaacttaggccgctactggcctgcccgaggcccccagttgacactgttcgtgccccagcatatcttgatgacctccgctcctaataccattaccgtgctggaactggaatgggccccgtgcagttctgacgatcctgaactctgtgccgtaacttttgtggaccgaccagtgattgggagcagcgtgacctatgaccatccctcgaagcccgtggagaagcgacttatgcctcctccgccacagaagaacaaggatagctggctcgaccatgtgtag

SEQ ID NO: 117998 - DNA, 1944 bp, synthetic construct
  misc_feature 1..1944: note = Description of Artificial Sequence: Synthetic coding sequence
  source 1..1944: mol_type = other DNA
atgtttgagatcgactactcaagagactcctttctcaaggacggccagcctttccgctacatcagtggcagcatacattattcaagggtaccacgcttttactggaaggatcgtttacttaagatgaaaatggcaggactcaatgctattcagacctacgtgccatggaatttccacgagccgtggcccggacagtatcagttctcggaggaccatgacgtggaatattttcttagactggcccacgaactcgggttgcttgtcatactaagaccaggcccatatatatgcgcggagtgggaaatggggggcttgccagcatggctgctcgagaaggagagtattttactaagaagtagcgaccccgattatctcgctgctgtggacaaatggctgggagtcctgctgcctaagatgaagcctctgctctatcagaatggaggacccgtgattacagttcaggtggagaacgagtatggctcgtactttgcctgtgattttgattatctccggtttctccagaagagattcaggcaccacctgggtgacgacgtggtactctttacgaccgatggagcccataaaacctttcttaagtgtggggccctgcaggggctttacaccaccgtggactttggtaccggtagcaacattacagacgctttcctttcccagaggaagtgtgagcctaaagggcctctgatcaacagcgagttttacaccggctggctcgatcactggggacagccacatagcactatcaagaccgaggctgtggccagttctctgtatgacattctggcgcgaggcgcctcagtgaacttatatatgttcatcggaggaacaaatttcgcctactggaacggggctaattctccttacgccgcccagccaaccagttatgattacgatgcccccctgagcgaggctggagacctcaccgagaaatacttcgcactgcgcaatattattcagaaatttgagaaggtgccagagggaccaatcccccccagcactccgaaattcgcttatggaaaggttactctcgagaagctgaaaaccgtcggagctgccctcgacatcctttgcccttccgggcctattaaatccctgtaccctctgacctttattcaggtgaagcagcactacggatttgtgctgtataggactactttaccccaagactgctccaatcctgcacctttgtcatcccccctaaacggagtgcacgatcgggcatatgtcgccgtggatggcatccctcagggtgtgttggaacgtaacaatgttatcaccctcaacattaccggaaaggctggcgccactcttgacctgctagtggagaatatgggtagagtcaattacggagcgtatataaacgattttaagggcctggtgtctaatcttaccctcagcagcaatatccttactgattggaccatattccctcttgatactgaagacgccgtatgttcccatctaggaggctgggggcaccgggattcaggtcatcatgacgaagcatgggcgcataatagcagcaattacacactgccagccttttacatgggcaacttttccataccatctggaatacctgatctaccacaagatacatttattcagttccctggctggacaaagggccaggtgtggattaatggcttcaatctcggtcgctattggcctgcccgtggccctcaactcacccttttcgtaccacaacatatccttatgacaagcgcccctaacacaatcactgtcctcgagcttgagtgggcaccctgcagctctgacgaccccgaactatgcgctgtgaccttcgtggatcgcccagtgatcggatccagcgtgacctacgaccacccctcaaaaccggtcgagaaaaggttgatgccccctcctccacagaaaaataaggatagctggcttgaccatgtctag

SEQ ID NO: 117999 - DNA, 2034 bp, synthetic construct
  misc_feature 1..2034: note = Description of Artificial Sequence: Synthetic coding sequence
  source 1..2034: mol_type = other DNA
atgcctgggttcctggtgcggatcctccctttgctgctggtcttactcctgctgggcccaactcgggggctgagaaatgccacacaacgtatgttcgagattgactactcacgggactcattcctcaaggatggccaaccattccgctacatctctggatctatccactacagtagagtacctagattctactggaaagatagactgctcaaaatgaagatggctggtcttaacgccatccagacctacgtgccctggaatttccacgagccatggcccgggcagtaccagttctctgaagaccacgacgtggaatattttctccggctcgctcacgaactcggactcctggtgattcttcggcctggaccatatatttgcgctgagtgggagatgggcggtctccccgcctggttacttgaaaaagagtcgattctattgaggtcttcagaccccgattacctcgcagccgtagataagtggctcggtgttctcttgcctaagatgaagccactactttaccaaaacggcgggccagtgatcacagtccaggtcgagaacgaatacggttcttacttcgcatgcgactttgactacctccgcttcctgcaaaaacgatttcggcaccacctgggcgacgatgtcgttctctttacaacagatggcgcccacaaaacatttctgaaatgcggcgcactgcaagggctgtacaccacggtggatttcgggaccgggtcaaacattactgacgcctttctaagtcagcgcaaatgcgaacctaaagggccactgattaatagcgagttttatacaggttggctcgaccactggggacagcctcactcaacaattaagacagaggcggtcgcgagttccctatatgatatcctcgcacgcggggcaagcgtgaatctgtacatgtttatcggcggtacaaattttgcctattggaatggcgcgaacagcccctacgccgctcagcccaccagctatgattatgatgccccactatccgaagctggagacctgaccgagaagtactttgctctcagaaacatcatccagaagttcgaaaaggtgcccgaaggtccaatccctccttctactcctaagttcgcctacggcaaagttacattagaaaagctgaagaccgtcggtgctgcactggatattctatgtccatctggacccatcaaaagtttgtacccactcacattcattcaggtgaagcaacactacgggtttgttctatatcggaccacccttccccaagattgttcaaaccccgctcctctctcttccccgctcaatggcgtgcatgaccgagcctatgtagccgtagacggcatcccacagggtgtgctcgagcgtaacaacgttattacgctgaatatcactggaaaagcgggagcaactctcgatctgcttgtggagaacatgggtcgcgtaaattacggagcgtatattaacgatttcaagggcctggtatctaatttgaccctcagctcgaatattctgacagattggactatcttcccccttgacacggaggatgcagtgtgtagccacctaggaggatggggacaccgcgattccggccatcatgacgaggcctgggcacacaattctagcaattacactttgccagccttctacatggggaacttttcaataccctcaggcatccctgacctgcctcaggatacctttattcagttccctggttggacaaaaggccaggtatggatcaacggattcaacctgggcagatactggcctgctcggggacctcagttaactttgttcgtgcctcaacatatattgatgactagcgctcccaacaccattaccgtgctggagttggagtgggccccgtgctcaagtgatgatccagagctatgcgcagtgaccttcgtagaccggcctgtaattgggtcctccgtcacctatgatcaccctagtaaacctgtggaaaaacgcttaatgccacctcccccacagaaaaacaaggactcgtggctggatcacgtttag

SEQ ID NO: 118000 - DNA, 2178 bp, synthetic construct
  misc_feature 1..2178: note = Description of Artificial Sequence: Synthetic coding sequence
  source 1..2178: mol_type = other DNA
atgcctggttttctcgtgcgaatcctacctcttctgctcgtgcttcttctgctgggtccaacacgcggacttcgttcaagattcctgccatgggcttttcaccttccaaggcaagcgcccaaatcccagttgcccctgcataagagaggcacaaagaccgcaccgaacgagcacgcttcctccaaccgaagtgggcggcgccggcgcagacaacagtggaatgccacacagcgcatgttcgagatcgattatagccgagatagctttttaaaagatggccagccctttcggtacattagtggctcaatccattactcacgggtgccccggttttactggaaggacaggctcttaaaaatgaagatggcgggtttgaacgccatacagacatatgtgccgtggaattttcatgaaccctggcccggccagtatcagttcagcgaggaccacgatgtcgagtactttctacgcctagcccacgagctcggcctgctggtcatccttcgccctggcccatacatctgcgccgagtgggaaatgggcggcttgcccgcttggctcctggaaaaggaatctattctgctccgatcctctgaccccgactacctggctgccgtggataaatggcttggagttttgctgcccaagatgaagccgctactttaccagaatgggggtccggtcatcacggtgcaggtagaaaacgaatacggctcatactttgcatgtgactttgattacttacggtttttgcagaaaaggtttagacaccacttgggcgacgatgtcgtactgtttaccacagatggcgcccacaagacctttcttaagtgtggcgccctacaggggctgtatacaacagtggatttcgggacaggttcaaatatcaccgatgcctttctgtcccaacgcaagtgtgagcccaaaggcccactaatcaatagcgaattttatactggctggctggaccattggggacagcctcattccaccatcaagactgaggcagtcgcatcttcactatatgatattttggctcgcggagcgagcgtgaatctttatatgtttataggcggcacgaattttgcttactggaatggcgctaatagcccttacgcggcccagccaacctcttatgactatgacgccccgctgagtgaagccggagatttgacagaaaagtacttcgcccttcgaaacattattcagaagttcgagaaggtccccgagggccccattcccccatctacgcctaaattcgcttacggaaaggtgactcttgaaaaacttaagaccgtgggcgctgcacttgacattctgtgtccctccggtccaataaaatctctgtaccctctgaccttcatccaggtgaaacagcactacggctttgtgctgtataggacaactctgccacaggattgttctaaccccgctcctctgagttcgcccctgaacggagtgcatgatcgagcctacgtcgctgtggacggcatccctcagggagtactggagaggaacaacgtgatcactttgaatatcacagggaaagccggcgccaccctagatctgctagtggagaacatggggcgagttaactatggcgcctacataaacgatttcaagggcttggtgtcaaatttgaccctgtcatcaaatattctcaccgactggaccatctttccattagacacagaggacgctgtttgctcacatctcgggggctggggacatagagattctggtcaccacgatgaagcttgggcgcataactcttcaaactatacactgcctgctttctatatgggaaattttagtatcccatccggcatccccgacctgccccaagatacgttcatacagttcccaggctggaccaaggggcaggtatggattaacggctttaacttagggaggtactggcctgccaggggtccccagctgaccctcttcgtccctcaacatatcctgatgactagcgcccctaacacaatcactgtcctggaactagagtgggcaccgtgttcttctgacgaccccgaattatgcgccgtcaccttcgtcgaccggccggtgattggatcttccgtcacatatgatcatcctagcaagccagtggaaaaacgactgatgccaccccctccacaaaagaataaggactcatggctggatcatgtgtag

SEQ ID NO: 118001 - DNA, 2058 bp, synthetic construct
  misc_feature 1..2058: note = Description of Artificial Sequence: Synthetic coding sequence
  source 1..2058: mol_type = other DNA
atggctgagtggctgctgtccgcttcctggcagcgccgcgctaaggccatgacagctgcggctggctccgccggaagagccgcagttcctctattactgtgcgcgctgctcgcacctggcggtgcctatgtacttgacgactctgacgggctgggcagagagtttgacggcattggtgcagtgagcggggggggcgccacttcacgcttgctcgtgaactaccccgaaccttatcgatcacagattctcgactacttattcaaacctaactttggggctagtctgcacatactcaaagtggagattgggggagacggccagaccacagacgggactgagcccagccacatgcactatgccctggacgaaaactattttagaggatatgaatggtggctgatgaaggaggctaaaaagcggaatccaaatatcaccctcatcggactgccctggagcttcccgggctggctgggtaaaggcttcgactggccctacgtcaatctgcaattaacggcctattacgtggttacttggatcgtgggagccaaacgctatcacgatctcgacatcgactacatcggaatttggaatgagaggtcatacaatgcaaactatatcaagatcctgaggaagatgttgaactatcagggactccagcgggtgaagattatagccagtgacaatctgtgggagtcaatctcagccagcatgcttctggacgccgagctattcaaggtcgtggacgtcataggtgcccattatcctggcactcactctgcgaaagacgctaaactaaccggtaaaaagctttggtcaagcgaggacttctcaaccctgaactcagatatgggtgctggctgctggggaaggatcctcaaccagaattacatcaatggttatatgacctcaaccatcgcgtggaacctggtggctagttactatgagcagttaccgtacggtcgatgcggtctcatgacagctcaagagccttggagcggccactatgtggtcgaaagtccagtctgggtgagcgcccacacgacacagttcacacagccaggatggtattacctcaagaccgtgggacatcttgaaaagggcggatcatacgttgctctcaccgatggcctcggcaacttaacgatcattattgagacaatgtcgcacaagcactctaaatgcattcgtcctttcctgccgtacttcaatgtatcccagcagtttgccacatttgtccttaaaggtagctttagtgaaatccctgaactgcaagtgtggtataccaaattggggaagacaagtgaaaggttcttattcaagcagctggactccttgtggctgctggacagtgatgggtcatttactctcagtctccatgaggacgaactgtttacactgaccacacttaccaccggacggaaagggtcttatccactgccgcccaagtcccagccatttccgtctacttataaggatgatttcaacgtggactatcctttcttttcagaagctccgaactttgctgatcagaccggtgtatttgagtactttaccaacatcgaggatcccggtgagcaccatttcacactcaggcaagtactcaaccagcggcccatcacttgggctgccgatgcctctaataccatctctattatcggagactacaattggacaaatttgactatcaaatgcgacgtatatatcgagacccctgatacgggaggggtatttatagcgggacgggtcaacaaggggggtatactgattcgatctgccaggggcattttcttttggatcttcgcgaatgggtcttatcgagtcacaggtgatcttgcaggctggataatttacgccctgggacgagtcgaggtaactgccaaaaaatggtacaccctgaccctgactatcaaaggtcactttacgagcgggatgcttaatgacaaatctctgtggactgacattcccgtaaatttccccaaaaacggttgggccgccattggaacacacagcttcgagttcgcccagttcgacaattttctcgtagaggcaacccgttag

SEQ ID NO: 118002 - DNA, 1989 bp, synthetic construct
  misc_feature 1..1989: note = Description of Artificial Sequence: Synthetic coding sequence
  source 1..1989: mol_type = other DNA
atggccgagtggctactaagcgcaagttggcaaaggagagctaaagctatgaccgccgctgctggatcagctggaagagcagcagtcccattgttgctgtgcgccctcctggcgcctggaggcgcctatgtgctcgacgattctgatggcctggggcgggagtttgacggcataggcgctgtaagcgggggaggccctaacttcggcgcaagtttgcacatcctcaaggtggaaatcgggggagatgggcagaccaccgatggtaccgaaccatctcacatgcattatgccctggacgagaactattttcgaggatatgagtggtggctcatgaaagaagcaaagaaaagaaaccctaacatcactctaatcgggcttccgtggtctttcccgggatggctcggcaaagggttcgactggccctacgtgaatctgcagctgactgcctactatgtcgtgacatggatcgttggggccaaacggtatcatgatttagacattgactacataggcatttggaacgaacgctcttataacgctaattatattaaaatcctccggaaaatgctgaattaccagggattgcaacgcgtgaagataattgcgagtgataatctctgggagagcatcagtgcaagcatgcttctagatgccgaattattcaaggtcgtggacgtaataggagcccattatcccgggacacacagtgctaaggatgccaaacttaccggcaagaaactttggtcttccgaggacttctcaacactgaatagtgatatgggggccgggtgctggggccgaatactgaaccagaactatataaacgggtatatgactagcacaatagcgtggaaccttgtcgcgagctactatgaacagctgccctacgggaggtgtgggttgatgactgcccaggagccctggtcaggccactatgtggtggagagcccggtgtgggtgtcagctcacaccacccagtttacccagcccggatggtattacctgaaaaccgtggggcatctggagaagggcggtagttatgtggctttgaccgacggactcgggaacctgactataataatagagactatgtctcataagcatagcaaatgtatacggccattccttccgtactttaatgtcagccagcagttcgcaacttttgtgctcaaaggcagctttagtgaaatacccgagctgcaggtgtggtacacaaagctgggtaaaacctccgaacgatttctgtttaaacaattagactcactctggcttctcgactcggatggcagttttacattatcgctgcatgaagacgagctctttacactgactacactcacaacgggacgcaagggtagctatcctctcccccccaagtcacaacctttcccaagcacttacaaggacgactttaacgtcgactatccgttctttagcgaagcgcctaacttcgctgaccaaactggggtctttgagtactttaccaacatcgaggatcccggagaacaccatttcaccctgcgccaagttctcaaccagcgccctatcacatgggccgctgatgccagcaacacaatctcaatcatcggagactataattggaccaatctgaccataaagtgtgatgtttacatcgaaaccccggacaccgggggtgtttttatcgcagggcgcgtcaacaaaggcggcatcttgatcagatcagctagagggatcttcttttggattttcgcaaacggatcatatcgcgtgacaggtgacctcgcgggatggatcatctatgcccttggacgagtggaggtgacagcaaagaagtggtatacgttaacattgaccattaaaggccacttcacctcaggaatgctaaatgataagagtctctggaccgacatcccagtcaacttccctaagaatggttgggctgctatcggcactcattccttcgaatttgctcaatttgataattttctggtcgaagctacaagatag

SEQ ID NO: 118003 - DNA, 1980 bp, synthetic construct
  misc_feature 1..1980: note = Description of Artificial Sequence: Synthetic coding sequence
  source 1..1980: mol_type = other DNA
atgctcggcaaaagccatggtagagctactcatggccccttgccactggcagacctcgggattcatttgccttgtgttaaagtgttgcaccaagtgacgcctgaagaaaaacccgccgctacctcaagattgcttgtgaactacccggaaccttatcggagccaaattttggattacctcttcaaaccaaattttggagctagccttcacatcctgaaggtcgaaatcggcggagacgggcagaccacggatggcacagaaccctcccacatgcactatgcattggacgaaaattatttcagaggatacgagtggtggctcatgaaggaagcaaaaaaaagaaatcctaacatcactttgataggcctaccctggagtttcccggggtggttaggaaaaggattcgactggccatatgtgaacctacagttgacggcctattatgtcgtgacatggatcgtgggagcaaaacgctaccacgatctggatattgactacatagggatctggaacgagcggtcctacaacgcgaattacatcaaaatcctgcgaaagatgctgaattaccaggggctgcaaagggtaaagatcatcgcatcagataatctctgggagagcatcagtgcttccatgctgttggatgctgaactgttcaaggttgtcgatgtcatcggtgctcattatcccgggacacacagcgccaaagacgccaagctcactggcaagaagctgtggtcctctgaagatttctcaacactgaacagcgacatgggggctggctgttggggcaggattcttaaccagaattatattaatggctatatgacctcaaccattgcttggaatctcgttgctagctattatgagcagttgccttacgggagatgtggcctgatgaccgcacaggagccatggtcggggcactacgtcgtagaaagtcctgtgtgggtgtctgcccataccacacagtttactcaaccaggctggtattaccttaagacagtcggtcacctcgagaaaggtggaagctacgtggccctgacagatgggttaggtaatttgacgattattatcgaaacaatgtctcataagcattcaaaatgcattcgtccttttctcccatactttaacgtgtcacaacagtttgccacgtttgtcctcaagggaagtttctccgagattccagagctgcaggtctggtacacaaagcttgggaagaccagcgagcgttttttgtttaagcagcttgactctctgtggctcctcgatagcgacgggtcctttacactgtctttgcacgaggacgaactgttcaccctgaccacactgacgaccggccgaaaaggctcctacccgctcccgcccaaatcacagccatttccatccacatataaggatgacttcaacgtggactacccattcttttccgaggctccaaactttgccgaccagaccggggtctttgagtacttcactaacatagaggaccccggggagcatcatttcacgttacgacaggtgctcaaccagcgcccaatcacttgggccgcagatgcctcaaatacaatctcgatcattggagactataattggacgaaccttaccattaaatgtgacgtgtacattgagaccccagacactggcggagtgttcattgcgggaagagttaacaaaggagggatcctgatccggtcggcgagaggcatctttttctggattttcgccaacgggagttatcgggtgactggcgatctggctggatggattatctatgccctgggccgcgtcgaagttacagccaaaaaatggtataccctaactctcactatcaagggtcacttcaccagtggtatgctgaacgacaagtccttatggaccgatatcccggtgaacttccccaaaaacggctgggcggctatcggaacccattcctttgagtttgcccaattcgacaattttctggtggaggccactcgctag

SEQ ID NO: 118004 - DNA, 1425 bp, synthetic construct
  misc_feature 1..1425: note = Description of Artificial Sequence: Synthetic coding sequence
  source 1..1425: mol_type = other DNA
atgctgaattaccagggtcttcagagggtaaaaatcattgcaagtgataacctctgggaaagcatttccgcgagcatgctgctggatgccgagctgttcaaagtcgtggatgtcattggggcccattaccccggcactcatagcgcaaaagatgccaaactcacagggaaaaagctctggtcatcagaagatttctcgacgttaaacagtgatatgggtgctggttgctggggtcgaattctcaatcagaactacattaacggatatatgaccagcacaatcgcatggaatctggtagcaagttactacgagcagttaccctacgggcgatgcgggttgatgaccgcgcaagagccctggtcaggccactacgtggtggaatctcctgtttgggtgagcgcccacaccactcaatttacacagcccggatggtactaccttaagaccgttggtcacttagagaaagggggctcctatgtggccctgaccgatggacttggtaatttgaccataatcatcgaaacaatgagtcacaagcactcaaaatgcattcggccattcctcccctattttaacgtgtcccaacagtttgctaccttcgttctgaaggggagctttagtgagataccggagctgcaggtgtggtacactaagctgggcaaaacctctgagaggttcttgtttaaacaactggactctctttggctcctggactccgacggctcttttacgctgagccttcacgaagatgagttatttaccctgaccaccttaacgacgggtagaaaggggagctatccgctgcccccgaaaagtcaaccttttccaagcacttacaaagacgacttcaacgtagattatcctttttttagtgaagcccccaatttcgccgaccagaccggggtgttcgaatactttacgaacatagaggatcccggcgagcaccactttacattgagacaggtcctgaatcagaggcctattacctgggctgccgacgctagcaatactatttccattattggggactacaactggaccaacctcacaatcaaatgcgacgtgtatatagagacacctgatactggtggagtcttcatcgccggcagagtgaataaaggcggaattctgatcagatcagcgagggggattttcttctggatctttgcaaatggctcctatagggtgacaggcgatctcgcaggctggattatctatgccctgggccgcgtggaggttaccgccaaaaagtggtacactttgaccctgacgattaagggccattttacttctggaatgcttaatgacaaaagtctctggaccgatataccagtgaacttcccaaagaatggctgggccgccatcggtacacactcttttgagttcgcgcagtttgacaactttttggtggaggccactcgctag

SEQ ID NO: 118005 - DNA, 1770 bp, synthetic construct
  misc_feature 1..1770: note = Description of Artificial Sequence: Synthetic coding sequence
  source 1..1770: mol_type = other DNA
atgggctttatggttgctgatctatgggctacttccagactattggtgaactatccagagccttaccgctctcaaattcttgattatctcttcaagccgaattttggcgcgagtctgcatatccttaaggtcgagatcggcggcgatggccaaactaccgatggcacagagccgagccacatgcattatgctctggacgaaaactactttcgaggttacgagtggtggctgatgaaggaggccaagaagcgtaaccctaatattaccttaattgggctaccttggtcttttccaggatggctgggcaagggctttgattggccatacgtcaatctgcagttaactgcatattatgtggtgacctggatcgttggagccaaacgataccatgacttggacattgactacatcggaatttggaatgagaggagctacaacgctaactacataaagattcttcggaaaatgctcaactaccaggggctgcagcgagtgaagattatcgccagcgacaacctatgggaatccatctcagcaagtatgctgctggatgccgagctgtttaaggttgtcgatgttatcggagctcattaccccggaacccactctgccaaagacgccaaactcacagggaagaagttatggagctccgaagatttttcgacattgaattccgacatgggggccggctgctggggcagaatcctgaatcagaattacatcaacggatacatgacttccactattgcatggaatttggtagctagctactatgaacagctgccttatggacgctgtggccttatgaccgcacaggaaccttggagcgggcattacgtggtggagtcccctgtgtgggtcagcgcacataccacccagttcacacaacccggttggtattatctaaagacagtcgggcatttagaaaaaggtgggtcgtacgtcgccctgaccgatggtcttggcaacttaactattattatagaaacaatgtctcacaaacacagcaagtgcatccggccttttttgccctacttcaacgtctcacaacagttcgctacttttgtactgaaaggcagcttttccgaaataccagaactgcaagtttggtacactaagctgggcaaaacaagcgaacgctttctctttaaacagctcgattctctttggttgctggactccgatggctccttcactttatccctgcatgaggatgaactcttcaccctgacaacattgacaactgggcgcaaagggagctatcccctgccaccaaaatcccagccattcccctctacatacaaggatgattttaatgtggactaccccttcttcagcgaggcccctaatttcgctgatcaaacgggagtgtttgagtatttcacaaatatcgaagatcctggggagcaccactttacccttaggcaggtgcttaatcagcgtccgattacatgggccgccgatgcgtccaacactatctcaatcattggagattataactggacgaatctgacgataaaatgcgatgtttatatagaaactcctgacacggggggggtgttcattgccgggcgggtgaacaaaggaggcatattgattagatctgctaggggaatttttttttggattttcgccaatgggagttatcgcgtgaccggcgatctggccggatggataatttatgccttgggtcgcgtggaggtcacagccaaaaagtggtacacactcaccctgacaataaaggtggctgggaggaggaagaagacctag

SEQ ID NO: 118006 - DNA, 372 bp, synthetic construct
  misc_feature 1..372: note = Description of Artificial Sequence: Synthetic coding sequence
  source 1..372: mol_type = other DNA
atggcccgaggtagcgccctgctcctggccagcctcctgttagccgcagccttgtcggcatctgctgggttgtggtctccagcgaaagaaaagcgcgggtggacacttaacagtgccgggtacctattaggccctcacgcagtggggaaccaccggtccttcagcgataaaaacggcctcacctccaaacgggagttgcgccccgaggatgatatgaaaccagggagcttcgatcggtcaatacccgagaataacatcatgagaacaatcatcgagttcctgtctttcctgcatctgaaagaagccggggcgctggaccgcctgttggacctgccagctgccgcctcatcggaggacatcgaaagatcctag

SEQ ID NO: 118007 - DNA, 1050 bp, synthetic construct
  misc_feature 1..1050: note = Description of Artificial Sequence: Synthetic coding sequence
  source 1..1050: mol_type = other DNA
atggagttggcagtggggaatttgtctgaggggaatgcatcttggcccgagcctcccgcaccagagcccggccccctgtttggaatcggagtcgaaaactttgtcaccctggtcgtgtttggtttgatcttcgctctaggcgtgttgggaaattcacttgtcattacagtgttggcacgctctaaaccgggtaaaccaagatctacgaccaacctgttcattcttaacctctctatagcggatctcgcttatctgctgttctgtattcctttccaggcaacagtttacgcccttcccacctgggttctgggggcatttatatgtaagtttatccactacttcttcacagtatccatgctcgtctctatatttacactggctgccatgtcagtggaccggtacgtggctatcgttcattcccggcgaagtagcagcctgagggtgagcaggaacgcactgcttggcgtgggttgcatatgggcgcttagcattgccatggcgtctcctgtggcctatcaccagggcctttttcaccctcgtgcaagtaatcaaactttctgctgggagcagtggcctgatccccggcataagaaagcatatgtggtttgcacttttgtgttcggatatctgctccccctcctcctaatctgcttctgttacgctaaagtactgaatcacctgcataaaaagctcaagaacatgtctaagaagagtgaagcttcgaaaaaaaagaccgcccagactgtgctggtggtagtggtcgtgttcggaattagttggctccctcaccatataatccatctgtgggcagagttcggcgtgttcccacttactcctgccagctttctgttcagaataactgcacattgcctcgcctacagcaacagttctgttaaccctatcatctacgcctttctctccgagaactttaggaaagcatacaaacaggtttttaaatgccacattcggaaagactcacatttgagcgacaccaaagaatcaaagtcgagaatcgatactcctccctcgaccaattgtacacacgtgtag

SEQ ID NO: 118008 - DNA, 1164 bp, synthetic construct
  misc_feature 1..1164: note = Description of Artificial Sequence: Synthetic coding sequence
  source 1..1164: mol_type = other DNA
atgaatgtgtccggctgccctggcgccggtaacgcttcccaggctgggggcggaggagggtggcaccccgaagccgtgattgttcctctgctctttgctttgatcttcctggtgggaacggtcgggaacactctcgtgctggctgtgctgctccgcggaggccaagctgtcagcactactaacctttttattctgaatcttggtgtggctgacctttgcttcattctttgctgtgtcccgtttcaagccaccatttataccctggatgggtgggtatttggtagcctcttgtgcaaggctgtgcacttcctgatcttccttacaatgcacgctagcagttttacactcgctgcagtgtcacttgaccgatatctggctatccggtaccccctgcactcgagggagctgcggaccccccgaaacgccctcgcagccattggtttgatatgggggttgtccctcttgttttccggaccttatctcagttattataggcagtcacagctcgcaaaccttactgtctgccacccagcttggtccgccccgagacgcagggctatggacatatgtaccttcgtcttttcatacctgctccccgtcctggtgctgggcttgacatatgcacgcactttacgatacctctggagggcagtggacccggttgcagccggatcaggggcccgacgtgccaaacgaaaagttacgaggatgattttaatagtggcggccctgttttgcctgtgctggatgccacatcacgcactaatcttgtgcgtctggttcggacagtttccactcacaagggctacgtatgcccttcgaattttgtctcatcttgtgagctacgcgaacagctgcgtgaaccccattgtttacgctctagttagtaagcattttcgaaagggatttcggaccatttgtgctggactgctgggacgagcaccaggcagggccagtgggagagtgtgtgcagctgctagaggcacccattccggctctgtcctggagcgagaatcgtctgatctgctacacatgtctgaagccgctggcgctctgcgcccttgtcctggggcctctcaaccctgcattttagaaccgtgcccaggaccttcatggcaggggcccaaggcaggcgactcaattctaaccgttgatgtggcctag

SEQ ID NO: 118009 - DNA, 1107 bp, synthetic construct
  misc_feature 1..1107: note = Description of Artificial Sequence: Synthetic coding sequence
  source 1..1107: mol_type = other DNA
atggctgatgcccagaatatctccttggatagtcctggatctgtgggagctgtagccgtacctgtggtatttgctttgatatttctcctcggaaccgtgggaaatggcctggtcctggcagtgctactgcaacccggaccttccgcgtggcaggagcccggcagcacaacagatctgttcattttgaaccttgcggtggcagacttgtgtttcatcctttgttgtgttccgttccaggctaccatctataccctagacgcctggctgtttggtgcacttgtctgcaaagccgtacatttgctcatttatcttacgatgtatgccagcagcttcactttggctgcagttagtgtcgatcggtatctggccgtgcgccatcctcttcggtcaagagccctaaggactcctcgtaatgcgagagctgctgtgggcttagtctggcttctcgcggctctcttctccgcaccatatctgagctactatggaactgtcagatacggggcgttggaattatgcgtccctgcctgggaagacgctcggaggagagcacttgacgtggctaccttcgctgcagggtacctgctccccgttgccgtcgtctctctagcatacggccgtacgctgcgcttcctgtgggccgctgtcggccctgccggggctgcagccgctgaggctcgccgtcgggcaacaggccgtgcgggcagggccatgctggctgtcgccgctctgtacgcactctgctgggggccacatcatgccttgatactctgcttttggtatggtcgtttcgccttttcccccgctacttatgcatgtagattagcatcccactgcctggcctatgccaacagctgtctgaatccactggtgtatgcccttgccagccgacatttccgcgctcgattcaggcgcctctggccttgcgggagaagaagacggcacagggccagacgggccctgaggagagtgcgacccgcctcttcaggacccccagggtgtccaggggacgctagaccctctggccgcctcctggccgggggcggacaaggcccggagccacgtgagggccccgttcacgggggcgaggcagcccggggacctgagtag

SEQ ID NO: 118010 - DNA, 1959 bp, synthetic construct
  misc_feature 1..1959: note = Description of Artificial Sequence: Synthetic coding sequence
  source 1..1959: mol_type = other DNA
atgggcaaccttcagtccgagcctagcgccggtggggggtcaagaaaggtgcagccttctgatagggcccccgacagcagaaggacttctctcgtggaacccgagatgacgagtcaggcgatgagactgacacggggtctcggagtgtggtttcccggcagtgctactccacccggtctgatggtgccccgtgaacctcaggcatctccatcaacattaccgcttacactggagaggccgtctcctgtgatgccacctccagaggaagccgccgctgtgagcgctccacccccggctcccgctggcaccctgctccctggtcccagtaagtggcagaagccagcgggaactccagtacctcgaatcaggagattgctggaagcttcccatcgaggccaaggagacccaccttcactgaggcccttaaagcctccgcccccccctaggcagttgtcagttaaggataccgtgcccagggccccaagccaatttccaccacccctagagacctggaaacctccacctccactcccatcggaaagacagccagccgatagacgaataacccctgcactggccacgccggccagcccaccaaccgagtctcaggcaggacctagaaatcagggccaaaccgccggacgagcacgcggaggtgcccccccccacgccggagagggcgagatggcccaacccgcagattcggaatcaggcctcagccttttatgtaaaatcaccttcaaatctcggccgagcctggcaccacccgcggcctccagcagcttggcagccaaggcctccctgggtggcggcggtggaggaggactcttcgcagcctccggagccatcagctacgcagaggttttaaagcagggaccccttccccccggcgccgctagacccctgggtgaagtatctaggggcgctcaggaggccgagggaggcgacggagatggagagggatgttccggaccgccatccgcccctgccagccaggccagggcattgcctcctcccccttacacgacgttcccaggcagcaagcctaagttcgactgggtttccgcgcccgatggacctgaaagacacttcagattcaatggggccggcggtggcatcggtgcaccacgcagacgggccgctgccctctccggtccctggggtagcccgcccccgcctccagaacagatacactccgcaccaggcccccggcgccccgcccccgctctgctggccccccctacctttatatttccagccccaacgaacggtgaacccatgagacctgggccaccaggtttgcaagagctgccccccctccctccccctacccccccccccacactacagccgccggccttgcagccaacccctctgccggtggctcccccacttacccccggtctgggccacaaggagtctgcacttgcacccaccgctgccccagccctcccgcccgcccttgccgctgatcaggcccccgctccctcccccgcaccagcacctactgtggctgagccttctcctccggtctcggcccctgcccctgccgcagcgccaattaaaacccgcactcgacggaacaaaggctcccgtgccgccagaggcgctacgcggaaagatggcttgcacggggatggtcctagagagagagctactgcaactgttccggatagctccggaggcggaggtgggggaagtggagcctctcagactggcgcagccaacactagggcggctcgtcactggctgcctttccaagtcctgaacagctgcccctgtaagtgttactgtcaccaccagcccagacataggaggctcccaaggaacgtgtccgcctggttgagcacttctacaaatcacttaggcgagccaccttgggtagctacaattaaactgagcggaagtcttgtcgcaaagctcgaacattatgatcttcaagcaacacactccaattag

SEQ ID NO: 118011 - DNA, 675 bp, synthetic construct
  misc_feature 1..675: note = Description of Artificial Sequence: Synthetic coding sequence
  source 1..675: mol_type = other DNA
atgggaaacctccaaagcgagccgagcgccggcggtggttccaggaaagtgcaacccagcgaccgggcccctgattccaggcgaaccagcctggtagagcctgagatgacatcccaggcaatgcggctgactagaggtttaggggtatggtttcccggtagcgcgacacccccgggattgatggtcccgcgggaacctcaagcaagcccaagtacactgcccctcacactggagagaccaagtcccgtgatgcctccccctgaagaagccgctgccgtctctgcccctcccccggccccagccggaacgttgctgcctgggccttctaagtggcagaagccagccggtacgcctgtgcctaggatcaggcgtctgctggaggcctctcaccggggccagggcgatcctccatccctccgccccctcaaaccacccccccctccacggcagctgtcagtaaaggatacagtacccagggcacctagtcagttccccccccccctggaaacttggaagccaccacctccactcccctccgagaggcagccagccgaccgccgtataactcccgcactagccacacccgcatgtgttcgagccagaaccaggggctgtgcccaccaggacccgcacgcgcaagaacaggggttcccctgtagccctggccgagactag

SEQ ID NO: 118012 - DNA, 2094 bp, synthetic construct
  misc_feature 1..2094: note = Description of Artificial Sequence: Synthetic coding sequence
  source 1..2094: mol_type = other DNA
atggccaggctggtggcagtttgtcgggatggagaggaggaattcccattcgaaagacgccagattccgctgtacatcgacgatactttaacaatggtgatggagttccctgacaatgtattgaatctggatggtcatcagaataatggcgctcaactgaagcagttcattcagaggcacggaatgctgaaacagcaggatctcagcatcgctatggtggtcacgtcccgagaagtcctatctgccctctcccaactggtgccttgtgtgggttgccgtagatccgtggagagactgttcagccaactagtcgagtctgggaaccccgcgctcgagccccttactgtggggccgaaaggtgttctctcagtgacaagatcctgcatgactgacgctaagaaattatatactctgttctatgtgcacgggtcgaaattaaacgatatgatagatgccatacccaaaagcaaaaagaacaaacggtgccagctccattctctggacacccacaaacccaagccgctgggcggctgttggatggatgtgtgggagctaatgtctcaggagtgcagagacgaggtagtgctgattgactcgtcctgtctcttggagaccctggagacctatctacgcaaacaccgattttgtacagactgcaagaacaaggtcctcagagcctataacattctgattggtgagttggactgttccaaagagaagggatactgtgccgcactgtacgaggggctgcgctgttgcccgcacgagaggcacattcacgtctgttgcgagaccgactttatcgctcatctgcttggccgcgcagagcctgaattcgctggaggccgtcgggaaaggcacgcaaagacaatcgatatcgcccaggaggaagttctgacttgtctcggtatccatctgtatgagcgcttacaccgaatctggcagaagttgcgggcggaggagcagacctggcagatgttgttttaccttggcgtcgacgcccttcggaaaagtttcgagatgacagtggagaaagtccagggcatcagcagactggagcaactgtgtgaggagttcagtgaggaggaacgggttagggagcttaagcaggaaaagaagaggcagaagcgcaagaataggcgtaagaacaaatgcgtgtgtgacatcccgacccctctccagactgcagacgagaaagaagtgtcccaagagaaagaaactgacttcatagagaacagttcatgcaaggcctgcggaagtacagaggatggaaacacctgcgtagaagttattgtgaccaatgagaatacctcttgcacatgcccatcatctggtaatctgcttggtagccccaaaatcaaaaaggggttgtccccacactgcaatggctcagactgtggctattcttccagtatggaggggtcggaaactggctcaagggaaggctccgacgtggcctgcaccgaaggcatttgcaaccacgatgagcatggtgacgatagctgcgtgcaccactgcgaagacaaagaagatgacggcgactcctgtgtggaatgttgggccaatagcgaagaaaacgacaccaagggcaaaaataagaagaaaaagaagaaatcgaaaatcttaaagtgcgacgagcacattcagaagcttggctcttgtattacagatcccggaaatagggaaacatctggtaataccatgcacactgtattccacagagataaaactaaggatacacatccagaaagttgctgttcatcggaaaaaggcggccagccgctgccctggttcgagcaccgaaagaacgtgccgcaatttgctgagccaacagaaacactctttggccctgattcggggaaaggagctaagtctctggtggaacttctcgacgagtctgagtgtactagtgatgaggagattttcatctcacaagatgagatccaatccttcatggcaaataaccaatcattttacagtaacagggaacagtatcgccaacacctcaaggagaagtttaataaatactgtcgcctgaacgatcacaaaagacctatttgcagcggctggctgacaacggcaggggctaactag

SEQ ID NO: 118013 - DNA, 1548 bp, synthetic construct
  misc_feature 1..1548: note = Description of Artificial Sequence: Synthetic coding sequence
  source 1..1548: mol_type = other DNA
atgtcatctccaaacatttggtcgacaggatcttcagtgtactctacccctgtgttcagccagaagatgaccgtgtggatccttctcctgctctctctatatcctggcttcacttctcagaaatccgacgatgattacgaagactacgcgtcgaataaaacctgggtactcacacccaaagtcccagaaggagacgtcactgtgatcttaaataacctgcttgagggatatgataacaaactgcgtccagatatcggagtgaagcccaccctcatacataccgatatgtatgtcaactccatcggcccagtcaatgcaataaacatggagtatactattgatatattttttgcgcagacctggtatgaccgtcgattgaaattcaatagcacaatcaaggttcttcgcttaaactcgaatatggttggaaaaatctggataccagacaccttcttccggaactctaaaaaggctgacgcgcattggatcacaactcctaacaggatgcttaggatttggaatgacggaagggttctgtatacactcaggctgacgattgatgccgagtgccaattgcaactgcacaattttccaatggacgagcactcttgccctttggaattctccagttggtctcggagtattgcccaggccggcatgtgttctggagtcatttcagcccactactcgcttcgcttttggggttcaacggatcctcctacactcgcatcccgtgtggccggcataagcgacggatacccccgggaagaaattgtttatcagtggaaacgttcatcagttgaggtgggcgatactagatcctggcgcctgtaccagttctcgtttgtcggtttaaggaacacgactgaagtcgtgaagacgacatccggagactatgtcgtgatgtctgtatattttgacctcagccggcgcatgggatacttcaccattcaaacctacataccatgtaccttaatcgtcgtgcttagctgggtctcattttggataaataaagatgcggtgcccgcgcgcaccagccttgggatcaccacagttcttactatgactaccttgtccaccatcgctcgcaagtctttgccaaaggtttcctacgtgacggcaatggacctcttcgtgagcgtgtgttttatttttgtgttttcagccctggtggagtatggtactctgcactatttcgtgtcaaataggaaaccaagtaaggacaaggataagaagaagaagaaccctcttctccggatgttctcctttaaagccccaaccatcgatattagaccccggtcagccacaatacaaatgaataatgccacacacctacaggagagggacgaggagtatggttatgagtgcctggacggaaaggactgcgcgtcctttttctgctgtttcgaggactgtagaactggtgcctggcgtcacggacggatccatatccggatcgctaaaatggactcttacgctaggatattctttccgacagcattctgtttattcaatttagtatattgggttagttacttatatctgtag

SEQ ID NO: 118014 - DNA, 762 bp, synthetic construct
  misc_feature 1..762: note = Description of Artificial Sequence: Synthetic coding sequence
  source 1..762: mol_type = other DNA
atggcccccaaactgctgctcctcctctgcctgtttagcggcctgcatgctaggagccggaaggtcgaggaggacgaatacgaggattctagctcaaatcaaaagtgggtgctggcccctaaatcccaagacacggacgtcacactcatcctgaacaagctcctccgggagtacgataagaagcttagacccgacataggaatcaagccaacagtaattgacgtggatatctacgtgaacagtattggtccagtcagtagcatcaatatggagtatcagatagacatctttttcgcccagacctggacggacagcagactgcggttcaactctaccatgaagattctcacgttaaactctaacatggttggtctcatttggatcccggacaccatatttaggaattccaaaaccgctgaagcccattggataacgacgccgaaccagcttctgcgaatatggaatgacggcaagattttatacactctcaggcttactattaatgctgagtgtcagctgcagctccacaacttccccatggatgaacattcatgtccgctgattttttcatcttacggctatcctaaagaggagatgatctacaggtggcgtaaaaattctgtcgaggctgccgatcagaagagctggaggctataccagttcgattttatgggtttgcgtaatacaaccgagatcgtgacaacttctgccgggaggaacctgcttaaggaggctcagctttccaaagcacgcgaggcttag

SEQ ID NO: 118015 - DNA, 1371 bp, synthetic construct
  misc_feature 1..1371: note = Description of Artificial Sequence: Synthetic coding sequence
  source 1..1371: mol_type = other DNA
atgcgcaaaagtcctggcctcagtgactgcttgtgggcttggattctgttattgtctacactgaccggccggagctatggccagcccagtctccaggatgagctgaaggataatacaactgtgtttacgcgaattctcgaccgccttctcgatggatatgacaatagactgcgaccggggctgggggaaagggtgaccgaggtgaagacagacatatttgtgacaagcttcgggcctgtctctgatcatgacatggaatatactatagacgtcttctttcggcaatcatggaaggacgagagattgaaatttaaagggccaatgactgtactgcgcctgaataacctgatggctagtaaaatttggacacccgatactttttttcataacgggaagaaatccgtggctcacaatatgaccatgccaaataagttgctgagaattactgaagatggaaccttgctctacaccatgagactgaccgtgagggctgaatgtccgatgcatctcgaggacttccccatggacgctcatgcctgtcctctgaagtttggctcttatgcctatacgagggctgaagtggtgtatgagtggacccgggagccagctaggtcggtcgttgtggcagaagacggctcccgacttaatcagtacgacctgttgggccaaactgtcgatagcgggatcgtccaaagcagtaccggggagtacgtggtgatgactacccactttcacctcaagcggaagatcggctattttgtgattcaaacttaccttccttgcattatgactgtgatcctgagccaggtctcattctggcttaacagagagtctgtgcccgcccggactgtctttggcgtgacgacagtcctgaccatgactacccttagcatcagtgcgaggaacagtttgccaaaagtagcctacgccacagctatggattggttcatcgcagtttgctatgcctttgtgttctctgcgctgatcgaattcgccacagttaattacttcacaaaaaggggttacgcatgggacggtaaaagcgtggtgcccgaaaagcctaagaaagtgaaagaccctctcattaagaaaaataacacctacgcaccaaccgccactagctatacacccaacttagctaggggggatccagggctggccacgatagccaaaagcgctacaattgagccaaaggaggtgaagcccgagaccaagcccccagagccaaagaagactttcaattctgtgtcaaaaatagacagactatcaaggattgcttttcctctgcttttcggaatcttcaatctcgtttactgggctacatacttgaacagggagccacagctgaaggctcccactccccaccaatag

SEQ ID NO: 118016 - DNA, 1371 bp, synthetic construct
  misc_feature 1..1371: note = Description of Artificial Sequence: Synthetic coding sequence
  source 1..1371: mol_type = other DNA
atgcggaaatctcctggtctctccgattgcctctgggcctggatcctcctgctgtctaccttgacggggcgctcttatggtcagccctccctacaagacgagctgaaggataacacaaccgtgttcactcgcattctcgataggttgcttgatggctatgacaatagactgagaccaggcctcggagagcgggtgacagaagtgaaaactgacatcttcgtcacctcttttggtcccgtcagcgatcacgacatggaatataccatcgacgtattctttaggcaaagctggaaggatgaacggctgaaatttaaagggccaatgacggtgctccgtctcaacaacttgatggcaagcaagatttggacccctgatactttcttccacaacggtaaaaagtcagtggctcataatatgaccatgccgaataaactcctgcgaattacagaggacggcacactcctttacaccatgaggctgaccgtgcgtgcagagtgtcccatgcacctggaggatttccctatggacgcacatgcttgtcccctgaaatttggatcttacgcatatacacgggccgaggtagtgtacgagtggactcgcgagccagccagatccgtggtggtggctgaggacgggtctcgtcttaaccagtacgacctccttgggcagaccgtcgatagtggcatcgttcagtcgtccaccggcgaatacgtggtaatgaccacccatttccatctgaaaagaaaaatcgggtacttcgttatccagacgtacctgccatgtattatgaccgtgattctgtcccaggtgtctttttggctgaatcgggagtccgtaccggcgaggacagtcttcggcgtaaccacagttcttaccatgactaccctatctatttcagctcggaactctctccccaaggttgcatacgctacagctatggactggttcattgcagtttgctacgcatttgtattctctgccctcatagaattcgccactgtcaactactttactaaaagagggtacgcctgggacggcaaaagtgtggtgccggaaaaacccaaaaaagtgaaggatcccctcattaagaagaataatacatatgctccgactgcgacgagctatactcctaatctggccagaggcgaccctgggcttgccaccatagcaaaaagtgctaccattgagcccaaggaagtgaagcccgagaccaaaccaccagagcctaaaaagaccttcaattccgtgagcaagatcgacagactgtcccggatcgccttcccattgctgtttggcatattcaacctggtgtactgggccacttaccttaaccgggaaccgcaactgaaagcgccaactccgcaccaatag

SEQ ID NO: 118017 - DNA, 1371 bp, synthetic construct
  misc_feature 1..1371: note = Description of Artificial Sequence: Synthetic coding sequence
  source 1..1371: mol_type = other DNA
atgcggaaaagtcccggactcagcgactgcctgtgggcttggatactgctgctgtcaacactgaccgggcggtcatatggacagcccagcctgcaggatgaacttaaggataataccactgtgtttacccgcatcctggatcgcctcttggacggctacgataacaggctccgccccggtttgggcgagcgcgtgacagaggtcaaaacagatatcttcgtaacctcctttggaccagttagtgaccacgatatggaatacacaattgatgttttcttcagacagagttggaaggacgaacggcttaagttcaagggccccatgacagtgctgagattaaataatttaatggcttcgaaaatctggacgccagatacattctttcataacggaaaaaagagtgtggcgcacaacatgaccatgccaaataagttgctacggatcactgaagatgggacgcttctgtacacgatgcgactgacagtgcgagctgagtgtccaatgcatctggaagacttcccaatggacgctcacgcttgccccctgaaattcggatcatacgcctatacccgggccgaggtggtatatgagtggacaagagaacctgctcgtagcgtggtggtcgcagaagacgggtctcggcttaaccagtatgacctgctgggacagactgtggactcaggaattgtgcagagttctacaggggagtatgtggtgatgacaacccatttccatctcaaacgcaagatcggctacttcgtaatccagacgtatcttccctgtattatgaccgtgatccttagtcaggtgtccttttggctcaatagagagagcgtgccagcacgcaccgtgtttggagtgactactgtcctaacaatgaccaccttgtcaattagcgcacggaatagccttccgaaggtggcttacgcgacagctatggattggttcattgcagtgtgttatgcgttcgtcttttcagcactgattgagttcgccacagtcaactacttcacgaaacggggctacgcatgggacgggaaatcggttgtacccgagaagccaaaaaaggtgaaagatcccctcataaagaaaaataatacctacgctccgacagccaccagctacacccctaacctcgcccgtggcgatccaggacttgcgactattgctaagtctgccacgattgaacctaaggaggtcaaacctgagacgaagccgcctgaacctaaaaagacctttaatagcgtctcaaaaattgatcggctgtcacgcatcgcatttccccttctgttcggtatattcaatcttgtgtactgggctacgtatctcaacagggagccccagctgaaagcccccacccctcatcagtag

SEQ ID NO: 118018 - DNA, 1371 bp, synthetic construct
  misc_feature 1..1371: note = Description of Artificial Sequence: Synthetic coding sequence
  source 1..1371: mol_type = other DNA
atgcgcaagagtccgggtctctccgattgtctgtgggcctggattctgctgctgtccactctgaccggtagaagctacgggcagccaagtttgcaggacgaactaaaggacaatacgaccgtatttactcgcatccttgataggctactagacggctatgataatagactcagacccggtctgggagaaagagtgaccgaggttaaaacggatattttcgttacctcttttggacccgtgtccgaccacgacatggagtataccatcgatgtgtttttccgccagtcttggaaggatgagcgactgaagttcaaggggccgatgaccgtgttgagattaaataatctgatggcttcgaagatttggacacctgacactttctttcataatggcaaaaagagtgtagcacacaatatgaccatgccgaacaaacttttaagaataaccgaggatggaaccctgttgtacacaatgaggctgaccgttcgcgccgaatgtcctatgcacctcgaggattttccaatggatgcgcatgcctgcccgctcaaatttggttcttacgcctatactcgtgcagaggtcgtgtatgagtggacccgcgagcccgcccgtagtgtggttgtcgccgaagacggctcgcggcttaatcagtatgatcttctgggccagaccgtggattccggtatcgtgcaatctagcacgggcgagtatgtagttatgactacccatttccacctcaagcgaaaaatcggctacttcgtgatacaaacatatcttccgtgcatcatgacggttattctgtcccaggtcagcttttggctgaacagagagtctgtccctgccagaaccgtgtttggcgttaccaccgtgttaacaatgactaccctctcaattagcgccaggaattcacttccgaaggttgcttatgccacagccatggactggttcattgccgtgtgttatgctttcgtattcagcgccctcatcgagtttgcgactgtgaattatttcacaaagcgcgggtacgcgtgggacggcaagagcgtcgtaccagaaaaacctaagaaagtgaaggatcctcttataaagaagaacaacacatacgcacccactgctacttcttacactcccaacctagctcggggcgacccggggttagccaccattgctaaatccgcaactatcgaacccaaggaggtgaaacctgagacgaagcctccagagccaaagaaaaccttcaattcagtgtccaagattgaccggctgagccgcatagcttttccccttcttttcgggatctttaatctggtgtactgggccacctaccttaacagagaaccacagttaaaggccccaacgccccaccagtag

SEQ ID NO: 118019 - DNA, 1371 bp, synthetic construct
  misc_feature 1..1371: note = Description of Artificial Sequence: Synthetic coding sequence
  source 1..1371: mol_type = other DNA
atgcgtaagagccccggtctgtccgattgcttgtgggcctggattctgcttttatccactctgacgggaaggagttatggccagccaagtctgcaggatgagcttaaagacaacactacggtcttcacccgcatattagacaggctgcttgacggctacgataaccgcctgaggccagggctcggggaacgtgtcacggaggtcaagaccgacatctttgtgacatcttttggaccggtgagcgatcacgatatggagtacaccatcgacgttttctttcggcagtcttggaaggatgagcgtttgaagttcaagggcccaatgaccgtcctacgactcaataatttgatggcttcaaagatctggacgcctgacaccttcttccacaacggcaagaagtccgttgctcacaacatgaccatgccaaataaattattgcggattacggaggacggcactctcttatacaccatgcggttaaccgtgcgagcagaatgtccaatgcatctcgaggattttcctatggacgcccacgcttgtcctctgaagtttgggtcctatgcatataccagggcagaggtggtgtacgagtggacaagagagccggccaggagcgtagtggtggcagaagacggatctagactgaaccaatacgatctccttggacagacagtggacagcggaattgtgcagtcaagcacaggtgagtatgtggtgatgactactcattttcatctgaagcgcaagattggatatttcgtgatccaaacctaccttccctgcattatgactgtgatcctgtctcaagtgagcttttggttgaacagggaatctgtgcctgctagaactgtttttggcgtcacaactgttcttaccatgaccactctctcaatcagcgcccgaaatagcttaccaaaggttgcctatgccactgccatggactggtttattgctgtctgttatgccttcgtgttcagcgcactgatcgagttcgctacagtgaactacttcactaaaagggggtatgcatgggacggaaagtcggtggtgccagagaaaccgaagaaggtcaaagaccctctgattaagaaaaacaatacttacgcgccaacagccacctcctacaccccgaacttagctaggggggatcccggcttggcaaccatcgctaagtcggcaactattgagccgaaggaagtgaaacccgagacaaagccgccggagcccaagaagacttttaactccgtgagtaagatcgatcgactgagtcgcatagctttcccactgctgttcggaatcttcaacctcgtctactgggcaacctaccttaatagggaacctcagttgaaagctccgacaccgcatcagtag

SEQ ID NO: 118020 - DNA, 1371 bp, synthetic construct
  misc_feature 1..1371: note = Description of Artificial Sequence: Synthetic coding sequence
  source 1..1371: mol_type = other DNA
atgagaaagagccctgggctctcagactgcctatgggcctggatacttcttctgtcaaccctgactgggcggtcttacggacaaccttccctacaggatgagcttaaggacaacacaacggtattcactaggatcttagataggctgctggacggctatgacaacagattgcgtcctggcctgggtgaaagagtaaccgaagttaagaccgatatctttgttacttcctttgggccagtatctgaccatgacatggagtatactatcgacgtgtttttccggcagtcatggaaggacgaacgattgaagttcaaagggccgatgacagtgctgcggctgaacaatctgatggcaagcaaaatatggactcctgacaccttctttcataatgggaagaaaagcgttgcacacaacatgaccatgcctaacaagctgttacgcattaccgaggacggaaccttgttatacaccatgaggttaacagtccgagctgagtgtcctatgcacctagaggatttcccaatggatgctcacgcatgtcccctaaagtttggatcctatgcctacacccgcgcagaggtcgtctacgaatggacccgcgaaccagcccggtcggtggtagtggcagaagacggcagccgcctcaaccagtacgatctgctaggccagaccgtcgactccggaattgtccagtctagcacgggcgaatatgtagtaatgactactcattttcatttgaaacgcaagatcggctatttcgtgattcaaacctatttaccctgcatcatgaccgtgatattgtcacaggtctccttctggcttaatagagagtcagtgccagccaggaccgtcttcggtgtcactacggttctcaccatgacgactctttccatatcggcaaggaactctcttccaaaagtcgcctatgcgacagccatggactggtttattgctgtgtgttatgcctttgtcttctcggccttgatagagtttgccactgtcaattacttcactaagcgtggctatgcctgggatggtaagagcgttgtgcctgagaaacccaaaaaggttaaagatcctctgattaagaaaaataatacgtacgctccaaccgccacaagttacaccccaaaccttgcccgaggggatcctggactggccacaattgccaagtcagcgaccatagagcctaaggaggtgaagcccgagactaagcctccagagcccaagaagacctttaattctgtatctaagattgatcgactgagccgcattgcctttcccctgctctttggaatattcaatttggtctattgggccacttacctcaaccgtgaaccacagctgaaggctccaacaccgcatcagtag

SEQ ID NO: 118021 - DNA, 372 bp, synthetic construct
  misc_feature 1..372: note = Description of Artificial Sequence: Synthetic coding sequence
  source 1..372: mol_type = other DNA
atgcgaaaatccccaggccttagcgactgcctctgggcctggattcttctattatctaccttgaccgggcgaagctatgggcagccaagtctacaagatgagctgaaggacaacacaacagtgtttactcgaattctggaccgactgctggacggatatgacaatcgtttacggcctgggctgggggaaagggtaaccgaggtgaagaccgatatattcgtcacttcattcggtccggtgtctgaccatgatatggagtacacgatcgacgttttcttcagacaaagctggaaggatgagcggctcaagttcaaaggtcccatgactgtgctgcgtcttaacaatcttatggccagcaagatctggacctag

SEQ ID NO: 118022 - DNA, 1356 bp, synthetic construct
  misc_feature 1..1356: note = Description of Artificial Sequence: Synthetic coding sequence
  source 1..1356: mol_type = other DNA
atgaaaactaagttgaatatttacaatatgcagtttcttctgttcgtgtttctcgtgtgggatcctgcccgactggtgcttgccaatattcaagaggacgaagctaagaacaacattaccattttcacccgaattctggatagactgctagatgggtacgataaccggctcaggcccggactgggtgactctatcactgaggtttttaccaatatttatgtgaccagctttgggccagtatctgatactgacatggagtacactatcgatgtcttcttccgtcaaaaatggaaggacgaacgtctgaagtttaagggccctatgaacatactcaggctcaataacctcatggcctccaagatctggactcccgacacattctttcataatggaaaaaagtcagtggcccacaatatgacgatgcccaacaagttgctccgaatccaggatgacgggacactgctctacactatgaggctgacagtgcaggctgagtgcccaatgcatcttgaggactttccaatggacgctcattcctgcccactgaagttcggtagctacgcctatacaacgagtgaggttacctacatttggacatacaacgctagtgacagcgttcaggtcgcccccgatggtagtcggttgaatcaatacgacctgctggggcagagtataggcaaggagacaatcaagtcttccaccggcgagtacaccgtcatgactgctcattttcaccttaagaggaagattggatattttgttatccagacctatctgccatgcatcatgaccgttattttgagccaagtgtcattttggttgaatcgggagtcagtaccagctcggaccgtattcggtgtgaccacagtccttacaatgacgaccctctcaatttccgccagaaactccttgcccaaggttgcctacgcaacagcgatggactggtttatcgccgtttgctatgcctttgtgttcagcgctctcatcgaattcgccacagtcaattattttacaaaacgggggtgggcatgggacggaaaatctgtcgttaatgacaagaaaaaagaaaaggcatcagtgatgatacaaaacaatgcctacgccgtggccgttgccaactacgctccaaatctgtctaaggatcccgtactcagtaccataagtaaaagcgccactaccccggaaccgaataaaaaaccagagaacaagcctgctgaagccaaaaaaacttttaacagtgttagcaagattgatagaatgtccaggatcgttttccccgttctgtttggcacctttaatctggtgtactgggcaacatatttaaacagagaacccgtgctgggggtcagtccgtag

SEQ ID NO: 118023 - DNA, 1356 bp, synthetic construct
  misc_feature 1..1356: note = Description of Artificial Sequence: Synthetic coding sequence
  source 1..1356: mol_type = other DNA
atgaaaacaaaactgaacatctataatatgcagttccttctttttgttttcctggtttgggacccagccagattagtgttggccaacattcaggaggatgaggccaagaataatataaccattttcacgcggatcctggatcgcctattagatgggtacgataatagacttagacccggtctcggtgactctattactgaggtattcactaatatctacgtgacatcttttggccccgtgtccgataccgatatggaatacaccatcgacgtattctttcgccaaaaatggaaggatgagcgcttgaagttcaaaggccccatgaacattctacggcttaacaatctaatggcttctaagatctggaccccagacacctttttccacaacggaaagaaaagtgttgcccacaacatgaccatgcccaacaagctgctgcggatccaggatgatggcactttgttatatacaatgcggctgacggtgcaggccgagtgccctatgcacttggaggattttcctatggatgcacactcatgccccctgaaattcgggagctatgcctataccacctctgaggtgacctatatctggacctacaacgccagtgattccgtgcaggtggcccctgacggaagccggctcaaccagtatgatctgctggggcagagtatcggaaaagagactataaagagcagcacaggggagtacacagtgatgactgctcattttcaccttaaacgcaaaatcgggtatttcgtcattcagacatatctgccatgtataatgaccgtcatcctcagccaggtttccttttggctgaacagagaatccgtccccgcaaggactgtgttcggagttaccaccgtgctcactatgactaccctgagcatttcggcaagaaactctctgcctaaagtagcatatgcaaccgctatggattggttcattgcagtgtgctatgccttcgtattttcggcactgatcgaatttgctactgtcaactattttaccaagagagggtgggcatgggatggcaaatcagttgtgaatgacaaaaagaaagaaaaagccagtgtgatgattcagaacaatgcttatgccgtcgctgtggctaactatgcaccgaatttgtccaaagatccggtgctatccactatcagcaaatcagcgacaacgcctgaacccaataaaaaacctgagaacaaacctgctgaagcaaaaaagactttcaactcagtgtctaaaatagataggatgtccaggatcgtcttccctgtactatttggtacatttaatctagtgtactgggccacatatctgaatcgggagcctgtattgggcgtttcaccgtag

SEQ ID NO: 118024 - DNA, 459 bp, synthetic construct
  misc_feature 1..459: note = Description of Artificial Sequence: Synthetic coding sequence
  source 1..459: mol_type = other DNA
atgaaaactaagttgaatatctacaatatgcaatttctattattcgtgttcttggtctgggatcctgcacggctggtattagcgaatattcaggaggatgaggccaaaaacaatattaccattttcacgcgcatcctggatcggctactagacggctatgataaccggctaaggccaggtctgggcgattcgatcactgaagtcttcaccaatatctatgtgacatcatttggccccgtgtctgataccgacatggagtacacgatcgatgtgttttttcggcagaagtggaaagatgaacgcctaaaatttaagggcccgatgaatatccttcggctaaacaatctgatggcgagcaagatttggacgcctgacacatttttccacaacggcaaaaaatccgtggctcacaacatgaccatgcctaataaactgttgcgcatacaagatgacggctag

SEQ ID NO: 118025 - DNA, 414 bp, synthetic construct
  misc_feature 1..414: note = Description of Artificial Sequence: Synthetic coding sequence
  source 1..414: mol_type = other DNA
atgaagacaaaactaaatatctataatatgcaatttctgctcttcgtgtttctggtgtgggacccagcgcggttggtcctagccaatatacaggaagatgaggccaagaataacatcactattttcactcgcattctggatagactactggatggatacgataatcgtttaagaccaggtctgggtgatagcatcactgaggtctttacaaacatatacgtaacctcattcggccccgtgagcgacactgacatggagtataccattgatgtgttctttcggcagaagtggaaagatgaacgcctgaagtttaaggggcccatgaatatcctgaggctaaataacctgatggcgtccaaaatatggacacccgacacattttttcataacggtaaaaagagcgttgcccattag

SEQ ID NO: 118026 - DNA, 1536 bp, synthetic construct
  misc_feature 1..1536: note = Description of Artificial Sequence: Synthetic coding sequence
  source 1..1536: mol_type = other DNA
atgaaaaccaaactgaacatttataatatgcaattcctgttgttcgtcttcctggtttgggatcctgcaaggctcgtgctagctaatatccaagaggacgaggcaaagaataacatcactatatttacacggatcctagaccgccttctggatgggtatgataaccgccttaggcctggcctgggcgactctatcactgaagtatttacgaacatttatgtgacatcattcggcccggtgagtgacacagacatggagtacacgatagacgtgttctttaggcaaaagtggaaggacgagcgtctgaaatttaaggggccgatgaacattctgcgccttaacaacctcatggccagcaagatttggactccagacaccttctttcataatggcaaaaaaagcgttgctcacaatatgaccatgcccaacaagctcctgcgcattcaagatgatggcactctcctttacactatgcggttgacagtgcaagcagagtgcccaatgcacctggaggatttcccgatggatgcccatagctgccccttgaagttcggcagctatgcatatactaccagtgaagtaacttacatctggacttataatgcgagcgacagcgtgcaggtggccccagatggctcccgtctgaatcagtatgatcttctgggacagtctatcgggaaagagaccattaagtcttcgaccggcgagtatactgtgatgacagcacactttcacctgaagaggaaaatcggttactttgttattcaaacatacctaccctgtatcatgacagtcatattgtcccaagtgagcttctggctaaaccgcgagagcgttcctgccaggactgtgtttggcgttactactgtgttgacaatgaccaccctatccatcagtgcccgcaactctctcccaaaagtggcctatgcaaccgctatggattggtttatcgcagtctgttacgcctttgtcttcagtgccctcatcgagttcgccacagtcaattacttcaccaaacggggctgggcctgggacggtaaatcagtcgttaatgataagtcccctagcatcaaagccgaggggatcactctgacctacaactctgtgaaggccatattgcaaggcgcgaagctcatttggagtaagtacattgcattttcttggccatcactttttcaggaaaagactctggagtatctggagaaatggatggattgtttgacgttcaaacaaagttccaagaaggagaaggcaagtgtgatgatacaaaacaatgcatatgccgtggccgttgctaactatgcacctaatctgagcaaggatccagtactgagtacgatttcaaaaagcgccacgaccccagagccaaacaagaagcccgaaaataagcccgcggaagccaagaagacctttaattccgtgagcaagatcgaccggatgtccaggatcgtgtttccagtacttttcggtaccttcaacctggtgtactgggcaacttatctgaatagagagcccgtcctgggtgtctcgccctag

SEQ ID NO: 118027 - DNA, 1356 bp, synthetic construct
  misc_feature 1..1356: note = Description of Artificial Sequence: Synthetic coding sequence
  source 1..1356: mol_type = other DNA
atgaagaccaaattgaacatctacaacatgcaatttctcctcttcgtcttcctagtgtgggacccagcaaggctcgtgctcgcaaatatccaggaggatgaggctaaaaataacattacaatattcacacggatattggatcggctcctggatgggtacgataaccgccttcggccagggctgggtgactccataacggaggtgtttacaaatatctacgtaaccagcttcggtcccgttagtgatactgatatggaatacaccattgatgtcttctttaggcagaagtggaaggacgaacgcctcaagtttaaaggcccgatgaacattctgcgactgaataacttaatggccagtaagatatggacacccgacacattcttccacaacggtaaaaaatccgtggcacacaacatgaccatgcccaataagttgttgagaatccaggacgacggaactctcctctatacaatgagactcacggtgcaggccgaatgtccaatgcaccttgaagattttcccatggacgcccactcttgtccactgaagttcggcagttacgcctatactactagcgaggttacatatatatggacttacaacgcttccgatagcgtgcaggtggctcccgacggctctaggcttaatcaatacgatctcctggggcagtcaatagggaaagagactatcaagtcctcgaccggcgaatatacagttatgacagcgcactttcacttgaagcgcaaaataggctacttcgtcatccagacctatttaccatgcataatgacagtgatcctctcccaggttagcttctggctgaatcgcgaatccgtgcctgcacgcactgtgttcggagttacaaccgtgctcactatgacaactctgagtataagcgctcggaattcactgcccaaggtcgcatacgccactgctatggactggtttatcgctgtctgttacgcttttgtgttcagtgcactgatcgagtttgctaccgtgaactattttactaagagaggatgggcttgggacggcaaatctgttgtcaatgacaagaagaaagagaaggccagcgtcatgattcaaaacaacgcttacgcagtcgccgttgcgaactacgcccctaacctgtctaaggacccagtgctgtccacaatttctaagagtgcaacaacaccagaacctaataagaagccagaaaacaagccggcggaggcgaaaaagacctttaactccgtgagtaagatcgaccgcatgagtcgaattgtgtttcctgtgttgttcgggaccttcaatttagtgtattgggcgacctacttaaatcgggagccggtgctaggcgtgtctccctag

SEQ ID NO: 118028 - DNA, 1356 bp, synthetic construct
  misc_feature 1..1356: note = Description of Artificial Sequence: Synthetic coding sequence
  source 1..1356: mol_type = other DNA
atgaaaaccaaactcaacatctacaatatgcaatttctcctgtttgtattcctggtgtgggaccctgcacgtctggtgcttgcaaacattcaggaggacgaggctaagaataatattaccattttcacaaggattctcgataggttgctcgacggctacgacaacaggctaaggccaggactgggagatagcatcacagaggtattcaccaacatctacgtgaccagctttggacccgtgtctgacaccgatatggagtatacgattgatgtgttcttccgtcagaaatggaaggacgaaagactaaagttcaaggggcctatgaacatcctaagactgaacaacttgatggccagcaagatctggacccccgatacattctttcataatggtaaaaaaagtgtagcccacaacatgacgatgcccaataagctcttgaggatacaagacgatggtactcttctttacaccatgcgactgactgtgcaggcagagtgtccaatgcatctggaggactttcctatggatgcccattcctgcccgctgaaatttgggagctacgcatatactacatccgaagtaacctacatctggacctataacgcttctgacagcgtccaggtcgccccagacgggtcccgattaaaccaatacgatctgcttggacaatccataggcaaggaaaccatcaagtccagtacgggcgagtacacggtgatgacagcacacttccacctgaaacgaaagatagggtacttcgttattcagacatacttgccctgtataatgacggtgatcttgtctcaggtgtccttttggctgaatcgggagtccgtgccagcccgaactgtgtttggcgtgacaaccgttctgactatgacgaccctgtccattagtgcgcgaaactcactccctaaggttgcatatgctactgcaatggattggtttatcgccgtttgttacgccttcgtcttctcagccctgatcgaattcgcgactgtcaactatttcactaaacgcggttgggcatgggatggaaaatctgtggtgaacgataaaaaaaaagagaaagcctctgttatgatccagaacaatgcctacgcagtggctgtggcaaattatgcccccaacctctccaaggatcccgtgctcagcaccatttctaaatctgccactactccagaaccgaacaaaaaacctgaaaacaaacctgccgaggcaaagaagacatttaactctgtcagtaagatagacagaatgagccggatagtctttcctgtgcttttcggtacctttaatctggtttactgggctacatatctcaatcgcgaaccagtcctcggagtgtcaccatag

SEQ ID NO: 118029 - DNA, 1104 bp, synthetic construct
  misc_feature 1..1104: note = Description of Artificial Sequence: Synthetic coding sequence
  source 1..1104: mol_type = other DNA
atgaagactaagctcaatatttataacatgcagtttttactgttcgtgtttttagtgtgggacccagcccgcttagtcttagccaacatccaagaggacgaggcaaagaacaacataacaattttcacgcgtatactggataggttgctggatggctatgacaacagactgcgccctgggctcggtgacagcattactgaggtcttcacaaatatctatgtcacgagcttcggtcctgttagcgataccgatatggaatacactatcgacgtctttttccgccaaaagtggaaggatgagaggctcaagtttaagggcccgatgaatatactgagactgaataatttgatggcctcaaagatttggactccagacactttcttccataacgggaaaaaatccgtcgctcataatatgaccatgcctaacaaattgctgaggatacaagatgacggcactctcctgtataccatgaggctgaccgttcaagctgaatgcccaatgcacctggaggattttcccatggatgcccattcttgtcctctcaaatttgggagttacgcatataccacctctgaggttacctacatttggacctataacgccagcgattctgtccaggtagctccagatggaagtaggcttaaccagtatgatttactggggcaatcaattggcaaggaaactattaaatcatccactggggagtacacagtgatgacagcacactttcatctgaagaggaaaatcggatattttgtgatacagacctacctgccctgcataatgacagtcatcctgagccaggtgtctttctggcttaatagagaaagcgtgccagccagaactgtcttcggtgttactaccgtgctgacgatgacaactctgtccatcagtgcccgtaacagtctgcccaaggtggcctatgcaaccgccatggattggttcatcgctgtttgctacgcgtttgttttttctgcactgattgagttcgcaacagtgaattatttcaccaagcgcggttgggcctgggacggcaaatcagtggtgaacgataaagtctcggaatcttttcgcgtgattatcatcaagaaaatcccatag

SEQ ID NO: 118030 - DNA, 1371 bp, synthetic construct
  misc_feature 1..1371: note = Description of Artificial Sequence: Synthetic coding sequence
  source 1..1371: mol_type = other DNA
atgaggctgaagatcacgctccccagtctcagggagttccttactgacttctggatggtgaccatcataggcctggaccaagattgggaagagtacacaatcgatgtattctttcggcaaaaatggaaagacgagcggctgaagttcaaaggacctatgaatattttgcggctgaataacctgatggcctctaaaatctggacaccagacacctttttccacaacggtaaaaagtccgtagcacacaacatgactatgcctaacaagctgttgcggatccaagacgatggaacgttgctgtatactatgaggctcacagttcaggcggagtgccctatgcatctcgaggacttccccatggatgctcactcttgccctcttaagtttgggtcctatgcgtacacaacctccgaagtcacctacatttggacctacaacgcctcggattctgtccaggttgcccctgacggcagtcggcttaatcagtacgatctactcggtcagagtattggcaaagaaacaatcaagtcgagcacaggggaatacacagtgatgacagctcacttccacctgaagcgaaaaataggatactttgtcattcagacctacctgccctgcatcatgaccgtgatccttagccaggtctcattctggcttaatcgcgaatcggtgccagcaagaaccgtattcggagtcacaactgtgttgaccatgacgacgctctcaatatccgcacggaattcattaccaaaggtggcatacgccaccgccatggactggttcatagccgtttgttatgccttcgtttttagcgccctgatcgagttcgctacggtcaactacttcactaagcggggctgggcatgggacgggaaatccgtggtaaatgataaatctccaagtattaaagcggagggtattaccttaacctataatagtgtgaaggcaatcctgcaaggcgccaagctcatctggtccaaatatatcgctttctcttggccgagtctctttcaagagaagactcttgaatacctggaaaaatggatggactgcctcacattcaagcaatcatcgaaaaaagagaaggcctcagtcatgattcagaataacgcttacgccgtggccgtagctaactatgctcccaacctcagcaaagatcccgtgttgagcaccatctccaaatccgctacaacgcctgagccaaacaagaagcccgaaaataaaccagccgaggccaaaaaaacatttaactccgtgagcaagatcgatcggatgtccagaatagtttttccagttctgtttggtacattcaatctggtatattgggccacctatctgaaccgcgaaccagttctaggagtatccccatag

SEQ ID NO: 118031 - DNA, 1479 bp, synthetic construct
  misc_feature 1..1479: note = Description of Artificial Sequence: Synthetic coding sequence
  source 1..1479: mol_type = other DNA
atgatcattacccagacctcccactgctatatgacttcactcggaattcttttcctgattaacattctacccggaacaaccgggcaaggagagagcagacgtcaggaacccggagatttcgttaagcaagatatcggcgggttatctcccaagcatgcccccgatatcccggacgactcaaccgacaatattacgattttcaccagaatccttgatcgcctattggatggttacgataaccgcctcagaccaggtttgggggacgcagtcaccgaggttaagactgatatttatgtcacatctttcggccctgtttcagacacagacatggaatacacaatcgacgtattctttcgccagacctggcatgatgagaggctcaagttcgatggccccatgaagattctgccactgaacaatttgctggccagtaaaatctggacaccagacactttctttcataatggcaagaaatccgtcgctcacaacatgaccacaccaaataagttgttgcggctggtggataacggcacactgctgtatactatgaggttgacgatccatgcagagtgccccatgcatcttgaggacttcccgatggacgtacatgcctgtcctttgaaatttggctcttatgcctacacaaccgccgaagtggtgtacagttggacactaggtaaaaataaatccgtggaggtggctcaagacgggtcaaggttaaatcagtacgacctgttgggccacgtggtcggcactgaaatcatcaggtcatctactggggaatatgtcgtgatgaccacacattttcacctgaaaagaaagattggctattttgtgattcagacatacctcccatgtataatgactgtaattctctcccaggtgagcttctggctgaatagagaaagtgtgcccgcgcgcaccgtgttcggtgtgacaacggtgctcacgatgacgaccctttccatctccgcccggaattccctgcccaaagttgcttatgctactgccatggactggtttatcgcggtttgctacgcttttgtcttctctgccctgattgagttcgccacagtcaattacttcaccaaaagaagttgggcgtgggaagggaaaaaggttccggaggcactggagatgaagaaaaaaaccccagccgctcccgccaagaagacatccaccaccttcaacattgtggggaccacgtatcccattaacttggccaaagacaccgagttcagcactattagtaagggggcagccccgtctgcatcctctaccccaactattattgcctcccctaaggctacctatgtgcaggacagtcccactgaaacaaaaacatacaactctgtgagcaaggtggacaaaatttcccgcattatttttccggtgctgttcgccatcttcaatctagtatattgggcaacctatgtaaatcgcgaatcagcgatcaaagggatgatccgcaaacaatag

SEQ ID NO: 118032 - DNA, 1479 bp, synthetic construct
  misc_feature 1..1479: note = Description of Artificial Sequence: Synthetic coding sequence
  source 1..1479: mol_type = other DNA
atgataataacgcagacctcccactgctacatgactagtctgggtattctgttcttgattaatatcctaccagggacaacagggcagggcgagagccgacgtcaggaacccggcgatttcgtcaagcaagacatcggcggtctgagtccaaaacacgcccctgacatcccagacgactccacagacaacataacaatattcaccaggatcctagacagactgctcgatgggtatgacaacaggctgcgccctggcctgggggacgccgtgacagaggttaaaactgacatctacgtcaccagcttcggtccagttagtgacacggatatggagtacaccattgatgtgttctttcggcagacctggcacgatgagaggcttaagtttgacggaccaatgaaaatcctgccattaaataacctgctggcatcaaagatttggacgcccgacactttcttccataacggtaaaaagagcgttgctcacaatatgacaacccctaataagttattgcgcctcgtagacaatgggactttgctctatactatgaggctgactattcatgcagaatgccctatgcacctagaagacttcccgatggatgtgcacgcttgtcctttgaagtttggcagctatgcttatactaccgccgaggtggtctattcctggaccctcggcaagaataagtcagttgaggtggcacaggacggctcgcgtctcaaccaatacgacttgctgggtcatgtggttgggaccgaaatcattaggtccagcactggcgagtacgtggtgatgacaacccattttcatctaaaaaggaagatcggctactttgtgatccagacataccttccttgcataatgaccgtgatcctgtcccaggtgtcgttttggctcaacagggaatccgttcccgcaaggaccgtgttcggcgttaccacagtgctgactatgactacgttatccatttcagcaagaaactctctgcctaaagtggcgtatgccactgctatggactggttcattgccgtctgctatgccttcgtgttttccgcccttatcgagttcgccacggtgaattactttacaaaacgttcctgggcatgggaggggaaaaaagtgcccgaggccttggagatgaaaaagaaaaccccagcggccccggctaagaaaacctccaccaccttcaatatagtgggaaccacatatccaatcaacctcgccaaagacacggagttttcgactatttcaaaaggcgccgccccttccgcaagttcgacgcccaccattattgccagccctaaagccacgtacgtacaggactcaccaacagaaaccaagacctataattctgtcagcaaagtggacaagatttctaggatcatcttcccagttctgttcgccatcttcaatcttgtttactgggctacttacgtaaatcgcgaaagtgccataaagggcatgatacggaagcagtag

SEQ ID NO: 118033 - DNA, 339 bp, synthetic construct
  misc_feature 1..339: note = Description of Artificial Sequence: Synthetic coding sequence
  source 1..339: mol_type = other DNA
gaatacaccatcgacgtgtttttccgacagacttggcacgatgagcgccttaaatttgatggccctatgaagatactccctttaaataacttgctagctagtaaaatatggacccctgacacctttttccacaatgggaagaagtccgtggcccacaatatgaccactcccaacaagcttcttaggctcgtcgacaatggcaccctgctgtatacaatgagaattgaagaagtccaaaaacatcggagtatgatgaagccttcagtgtcttacacagtggcaccgtggatccaagaggggggccccggtggccgccacaggctgaaaatggaaaagtag

SEQ ID NO: 118034 - DNA, 1479 bp, synthetic construct
  misc_feature 1..1479: note = Description of Artificial Sequence: Synthetic coding sequence
  source 1..1479: mol_type = other DNA
atgatcattacacagacatcacactgttacatgactagcctgggtatactgttccttattaatatacttcccgggacaactggccagggagagtctagacgccaggagcccggggattttgtcaagcaggatatcgggggtctttcccctaaacatgcaccagatatcccagacgactcaactgataatatcaccatcttcactcgcatcctggacagattgctggacggttatgataatcggctgcgcccaggtctgggggacgctgtaacagaagtgaagaccgatatttacgtgactagctttggacctgtctccgatacagacatggagtacactatcgacgtttttttcagacagacttggcacgacgaacgactgaaatttgatgggccaatgaaaatcctgcccctgaataatctcctcgcaagcaaaatctggactcccgatactttcttccacaacggtaaaaaatccgtggcccacaacatgacgacgcccaataagctcctcagattggtggacaacggtactctcctgtacactatgcgcctcactattcacgctgaatgtcccatgcatctggaggactttccaatggacgtacacgcctgccctttgaaatttgggtcatacgcctacaccactgcagaggtggtatattcgtggactctgggtaagaacaagtctgtcgaagtggcccaggacggcagccggctaaaccagtacgacctgctaggacacgtggtcggcactgagattatccgcagcagcacaggtgagtacgtggtcatgacgacccacttccatttaaagaggaagattggatactttgtgattcagacctacctcccctgtattatgactgtaatcctgagtcaggtgagtttctggttgaatagggagagcgtgccagctagaaccgtctttggcgtgacaaccgtgctcactatgacgacactgagcatcagcgctaggaattcacttcctaaagttgcctacgcaacagccatggattggttcatcgcagtgtgctacgcctttgttttttcagccttaatcgagttcgccacagttaactatttcaccaaacgctcttgggcctgggaggggaaaaaagtgcccgaagctctcgaaatgaaaaagaaaaccccagcagcccccgccaaaaaaaccagtacaacgtttaatatagttggaacaacttatcccattaacctggctaaagataccgagttctctactatatctaaaggggctgcgccgagcgcttctagcacccccactatcatcgcctcaccgaaagctacctatgttcaggattcacctacagagactaagacatataacagtgtgtctaaggtcgacaaaatatctcggataattttcccggttctgtttgctatctttaatcttgtctattgggcgacctacgttaacagggagagtgccatcaaagggatgatcagaaagcagtag

SEQ ID NO: 118035 - DNA, 1665 bp, synthetic construct
  misc_feature 1..1665: note = Description of Artificial Sequence: Synthetic coding sequence
  source 1..1665: mol_type = other DNA
atggttagcgctaagaaagttccggctatcgcgttgagtgccggcgtatcctttgcacttctgcgctttctctgcctggccgtttgcctcaacgagtcacccgggcagaatcagaaggaagagaagctgtgcactgagaacttcacccggatcctggactcgttgcttgacggctacgacaatagattgagaccggggttcggcgggccggtcaccgaagtgaagacagatatctacgtgacgagctttgggcccgtaagtgatgttgaaatggagtatactatggacgtctttttccggcagacgtggattgataagagactcaagtacgatggacccatcgaaatcttgcgtctcaacaatatgatggtgactaaggtgtggacccctgacacattttttcgcaacggcaaaaagagcgtctctcataatatgaccgcaccgaataagctctttagaataatgcgtaatggcaccatcctgtatacgatgcgactgaccataagcgccgagtgtccaatgaggctcgttgactttcctatggatggtcacgcttgccccctgaaatttggaagctatgcttatcctaagagcgaaatgatttatacgtggaccaagggccctgaaaagagcgtggaggttcccaaagagagcagctccttggtccagtacgacttgatcggccaaacagtgtcctccgaaaccattaaatccataactggagagtatatcgttatgacggtttactttcacctgagacggaagatgggatatttcatgattcaaacctatatcccatgcatcatgaccgtcatcttatctcaggtgagcttctggatcaataaggagtcggtcccagctcggaccgtatttggcattaccactgtgctaaccatgaccaccctatcaatctctgcccgccattcactgccaaaagtgagttatgccactgcaatggactggttcattgcggtttgttttgctttcgtcttctcggctcttattgaattcgcagctgttaactattttacaaacatacagatggagaaagctaaacgcaaaacatctaagcccccgcaagaggtgccggccgcccctgtgcagcgtgagaagcaccccgaagcacctttgcagaatacaaacgccaacctaaacatgcgaaagcgcaccaacgcactggtgcactcagagtcagacgtgggtaatcggactgaggtgggcaaccatagctcaaaaagctcaacggtggtgcaagagagctccaagggaacccccagaagctatctggccagcagtccaaatcccttcagtcgcgcaaacgccgcagagacaatctcagctgccagagccctgccaagcgccagccctacttccatccgcacggggtatatgccccggaaagcatcagttgggtcagcgagcacacggcacgtgttcgggtccaggctccagaggattaagacaaccgtaaacacaattggtgccaccggcaagttgtccgcaaccccaccaccgtcggcgcccccaccctccggtagcggcacgagcaagatcgataaatacgctagaatcctctttcccgtcacgttcggagcatttaatatggtgtattgggtggtttacctgagcaaggatacaatggagaaaagcgaaagcttaatgtag

SEQ ID NO: 118036 - DNA, 1389 bp, synthetic construct
  misc_feature 1..1389: note = Description of Artificial Sequence: Synthetic coding sequence
  source 1..1389: mol_type = other DNA
atggacaatggcatgttttctggatttattatgatcaagaatctgctcctgttttgtatttcaatgaacctgagtagccatttcggtttcagtcagatgccgacaagcagcgttaaagatgagactaatgataatatcaccatatttactaggattctggacggcctgctagatgggtatgacaataggttgcgcccaggtcttggggagaggatcacacaggttcgtacagatatttatgtaacaagcttcgggccagtgtcggacacagaaatggaatacaccattgacgtcttctttcgacagagttggaaggacgagaggcttcggttcaaaggaccaatgcaaaggctgccactgaataacctgcttgcttctaagatatggacccccgacaccttttttcacaacgggaaaaaaagtattgctcacaacatgacaaccccgaacaagctgctccgtcttgaagatgacggcacattactgtatacaatgcggcttactattagtgctgaatgccccatgcagctggaggatttcccgatggatgcccatgcatgtcccctgaagtttggctcttatgcctatccaaacagtgaggttgtgtatgtgtggaccaacggatcaactaaaagtgtggtagtggccgaagacggttcccgtctgaaccagtatcacctgatgggacagactgtaggtaccgagaacataagcacctcaacaggcgagtataccatcatgactgcgcactttcaccttaaaaggaagattgggtatttcgtaatacagacctacctgccatgtattatgaccgttatattgagccaggtaagcttctggctgaatcgtgagagtgtgcctgcgagaactgtcttcggggtgacaactgtactgacaatgacaacattgtcaatctcagcccgcaactcccttcctaaggtggcctacgcaactgccatggactggtttatcgccgtgtgttacgcattcgtgttcagcgccctcattgagtttgctacggtgaactacttcactaagaggggttgggcttgggatgggaaaaaggccttggaggccgcaaaaattaagaaaaagcgggaggtcatactcaataaatctaccaacgcatttacaacgggaaaaatgagccatccacctaacatacccaaagaacagacacctgccggaacctccaatactaccagtgtttctgtgaaacccagcgaagagaaaaccagcgagtccaagaaaacttataattccatttcaaaaattgacaaaatgagtaggattgtctttcctgtgctcttcggaactttcaacttggtctactgggcaacatatctgaaccgggagcccgtcattaaaggggcggcttctcctaaatag

SEQ ID NO: 118037 - DNA, 1389 bp, synthetic construct
  misc_feature 1..1389: note = Description of Artificial Sequence: Synthetic coding sequence
  source 1..1389: mol_type = other DNA
atggataacggcatgttctcgggctttataatgattaagaatctcctgctgttttgtatcagcatgaacctgagtagccattttggtttcagccagatgcctacatctagcgtgaaagacgagacgaacgacaacattactatttttacacggattctggatggcctattggacggatacgataaccgcctccgccccgggctcggagagaggataactcaggtgcgaaccgacatttacgtgacctctttcggtcccgtttccgataccgaaatggaatacacgatagatgtgttttttcggcagtcctggaaggatgagagactccggtttaaaggacccatgcaacgcctgccgctcaacaacctgctggcctcaaaaatctggacacccgatactttctttcataacggcaaaaagagcattgctcacaacatgaccacacccaacaaactgctcagacttgaagacgacgggactctgctgtacacgatgaggctgaccatcagtgctgagtgtccaatgcagctcgaggacttccccatggacgcccacgcatgtccgctcaagttcggaagctacgcctaccccaattctgaagtggtctacgtgtggacaaacggcagcaccaaatccgtcgtagtagcagaagacggctcgcggctgaaccagtaccatctgatggggcagactgttggcaccgagaacatctccactagcaccggggaatacaccattatgactgcccacttccacctcaaacggaagatcggctatttcgtgatacagacctaccttccctgtataatgacagttatcttgagccaggtgtcgttttggctgaacagggagagtgtgccggccaggacggtgttcggcgttactacagtactcacaatgactactctcagtatatctgctcgaaatagcctgcccaaagtggcatacgcaaccgctatggactggttcatcgccgtgtgttatgcatttgtcttcagcgccctaattgagtttgccacggtgaattacttcactaagcgcggatgggcttgggacggcaaaaaggctctcgaggccgccaaaattaaaaaaaagcgagaagtgatcttgaacaaaagcaccaatgcattcacaacaggcaaaatgtctcatcctcccaatattcccaaagaacaaactccggccggaactagcaacactactagtgtttcagtgaaacctagtgaggagaagaccagcgagagtaaaaagacatacaacagcatctccaagatagacaagatgtctaggatcgtgttccctgtgctttttggtacctttaacctcgtttattgggcgacatacctcaatcgagaacctgtaatcaaaggggcggcctctccaaaatag

SEQ ID NO: 118038 - DNA, 1389 bp, synthetic construct
  misc_feature 1..1389: note = Description of Artificial Sequence: Synthetic coding sequence
  source 1..1389: mol_type = other DNA
atggataacggtatgttcagcggctttattatgatcaagaatttgctgttattctgtatatctatgaacctgtccagtcatttcggattcagtcagatgcccacctcttcagtgaaggacgaaactaacgacaatatcacaatcttcacccgcatcctcgacggacttctcgacggctatgataataggttacggcccggattaggagaacgcatcacacaagtgcggacagacatctatgttacatcttttggtccggtttctgacaccgagatggagtatacaatcgatgtttttttccggcaatcttggaaagatgaacgactccgctttaagggtcctatgcaacggcttccactgaataacttgctggcctcaaaaatctggactcctgatacgttttttcataacgggaaaaaatccattgcgcacaatatgaccactccgaacaagttactcaggctggaagatgacggtactcttctctacacaatgaggttgacgatttccgccgaatgtcccatgcagctcgaagattttcctatggacgcccacgcctgtcctttgaaattcggctcatacgcttatcctaacagcgaggttgtgtacgtctggactaatgggtccacaaaatccgttgtcgtggctgaggatggttcccgcctgaaccagtaccacctgatgggccagacagtcggtaccgaaaatatatcgacatctaccggagaatataccattatgacggcccacttccacctgaaaagaaaaattggatactttgtgatccaaacttacttaccatgcatcatgaccgtaatcctatcccaggtgtctttttggttgaacagagagtcggtgccagcgaggaccgtcttcggcgtgactacggtgctaaccatgacaacactctctatatctgcgcggaattctctgcccaaagtcgcctacgcgacggccatggactggtttatcgccgtgtgttatgcgttcgtcttttcagccctcatcgaattcgcgacagtcaactacttcactaaaaggggctgggcttgggacggcaagaaagcactagaagccgcgaaaatcaaaaagaaacgagaggtaatcctgaataagagcactaatgcctttactaccggcaagatgtcgcatcctcccaacatcccaaaggagcagacacctgcggggaccagcaatactacgtccgtttcagtgaagcctagtgaagagaagacctcggaatctaagaagacttataatagcatttccaagattgataagatgtcccgcattgtctttcctgtattatttggcaccttcaatttggtatactgggcgacctatctcaatcgtgagccagtcatcaaaggcgcggcttctccaaagtag

SEQ ID NO: 118039 - DNA, 261 bp, synthetic construct
  misc_feature 1..261: note = Description of Artificial Sequence: Synthetic coding sequence
  source 1..261: mol_type = other DNA
atggataacggcatgttttccggctttatcatgatcaagaatttgttgctcttctgcatcagcatgaacctgtctagccatttcggatttagccaaatgcctacttccagcgttaaagacgagactaacgacaatattactatctttacacggatcctcgacgggctattagatgggtacgacaacagactacggcctggactcggcgagcggatcactcaagtgagaacggatatctacgtgacgtctttcggaccttag

SEQ ID NO: 118040 - DNA, 450 bp, synthetic construct
  misc_feature 1..450: note = Description of Artificial Sequence: Synthetic coding sequence
  source 1..450: mol_type = other DNA
atggataacggaatgttttcggggttcatcatgattaagaaccttctgttattctgcatttccatgaaccttagctctcatttcggattctctcagatgcctacaagcagcgtcaaggacgaaaccaacgacaacataaccatctttactcgcattttagatgggctcttggatggctacgacaatcgcttgcgccctggcctaggagaacgcatcacgcaagttcgcaccgatatctatgtcacctcattcgggcctgtgagcgataccgagatggagtatactatcgatgtgttttttcgccagtcctggaaagacgagagacttagattcaagggaccaatgcagcggttgcctctgaacaatttacttgcctctaagatttggacaccagacacattttttcacaatggtaagaaatctatcgcacataatatgaccacgccatag

SEQ ID NO: 118041 - DNA, 501 bp, synthetic construct
  misc_feature 1..501: note = Description of Artificial Sequence: Synthetic coding sequence
  source 1..501: mol_type = other DNA
atggacaatggtatgttttcaggattcataatgatcaaaaacctgctgctgttttgcatttccatgaacctgtccagccatttcggcttcagccagatgcctacgagttccgtaaaggatgagacaaacgataacattactatctttaccaggatccttgatggtctgcttgatgggtacgataatagactgaggccaggcctaggggaacgaattacacaggtgcggaccgacatctacgtgacctctttcgggccggtgagcgatacggagatggagtataccatcgacgtgttcttccgacagtcctggaaagatgagaggctgcgtttcaagggtccaatgcagaggctccctctcaataatctcttagcaagtaaaatatggactccagacactttctttcacaacggaaagaaatctatcgctcacaatatgaccacccctaataaactgctgcgccttgaggacgacggcaccttactctacacaatgcgatag

SEQ ID NO: 118042 - DNA, 51 bp, synthetic construct
  misc_feature 1..51: note = Description of Artificial Sequence: Synthetic coding sequence
  source 1..51: mol_type = other DNA
atggataacggaatgtttagtggcttcatcatgatcaagaacctgctttag

SEQ ID NO: 118043 - DNA, 1362 bp, synthetic construct
  misc_feature 1..1362: note = Description of Artificial Sequence: Synthetic coding sequence
  source 1..1362: mol_type = other DNA
atggcaagctctctgccctggctgtgcattattctgtggctggagaatgccctcggcaaattggaggtggagggcaacttttactccgagaatgtttcacggattttagacaatctcctggagggatacgataatcgcctgcggccaggattcggtggggccgtaacggaagtcaaaacagatatttatgtgacttcgttcggtccagtcagtgacgtggaaatggagtacacgatggacgtgttctttcggcaaacctggacagacgaacggctcaagttcggcggtcctacagagatcttatccctgaataatttaatggttagtaagatatggactcctgacacattcttcaggaacggtaaaaaatccattgcccataacatgactacccccaacaagctcttccggataatgcagaacggcacaatcctgtatacaatgcgtcttaccattaatgcagattgcccgatgcgcttggtcaactttccaatggatggacacgcatgccccctgaagtttggctcctacgcctaccccaaatcagagatcatttatacgtggaagaagggacctctctacagcgttgaggtgcccgaggaatctagctcactgctgcagtacgatctgattgggcagaccgtgagctccgaaactatcaagagtaataccggggagtacgtcattatgactgtttacttccacctgcagcgcaaaatgggctactttatgattcagatctacacaccctgcattatgacggtgattcttagccaggtcagcttttggattaataaagagtcagtccctgcgcgcaccgtctttggcatcactacggtgttaaccatgaccacactttctattagtgctcggcacagcctgcccaaagtatcgtatgcaactgctatggattggtttattgcagtttgcttcgccttcgtcttcagtgccctgatcgagtttgctgcggttaattatttcacgaacctgcaaacacagaaggccaagcgcaaggcccagttcgcagcacctccaacagtgacaatcagcaaggccacagagcctctggaagcagagattgtgctgcaccctgactccaagtatcatcttaagaaacgcatcacaagcctgagcctgcctatagtgtcttcctctgaggcaaacaaagtgttaactcgtgctcctatcttacagagtactcccgtgacacctccacctctgtctcctgcttttggaggtacatctaagatagaccagtattcgcgcattttattcccagtggcgttcgcggggttcaatctcgtatactgggtggtgtacctgtccaaggataccatggaggtgagcagtagtgtggaatag

SEQ ID NO: 118044 - DNA, 1332 bp, synthetic construct
  misc_feature 1..1332: note = Description of Artificial Sequence: Synthetic coding sequence
  source 1..1332: mol_type = other DNA
atggctagctcactgccatggctgtgcattattctttggcttgagaacgctctggggaagctagaggtggagggaaacttttatagcgagaatgtctccaggatcttggataatctgctggagggctacgacaaccggctgcggccaggatttggcggcgccgtcacagaggtcaaaaccgatatttacgtgaccagcttcggtcccgtgagtgatgtagagatgacctggactgatgagaggctgaaattcggtgggccaaccgagatcctatcacttaacaacttgatggtttctaagatatggacccctgacacgttttttcgcaacggaaaaaagagtatcgcacataacatgaccacccccaacaagctatttaggatcatgcagaacgggaccatcttgtataccatgcgtctcacgatcaatgcggattgccctatgaggctggtgaactttccaatggatggccacgcgtgccctttgaagtttggatcatatgcctatccaaagagcgagattatttatacctggaaaaagggaccgctctactcagtcgaagtaccagaagaatccagttcattattgcagtacgatttgattggccagaccgtgagcagcgaaaccataaaatccaacaccggggagtacgtgatcatgacggtctacttccatcttcaaaggaagatgggctactttatgattcagatttatacaccttgcataatgaccgttatcctgtcacaggtgtccttctggatcaataaggagtccgtccccgcgcgcactgtcttcgggatcactacagtcttgaccatgacaacactttctatttcggcaaggcatagcctcccaaaagtcagctacgccaccgccatggactggtttatcgccgtatgcttcgcattcgtcttttcggctcttatagagtttgccgctgtgaactacttcacaaatctccagactcagaaggccaaaaggaaggctcagttcgctgccccgcccacggttacgatctcaaaagccaccgaacctctcgaggcagagatcgtgttacaccccgattcgaaatatcatctgaaaaagaggattacctcgctctcactgcccatcgtatcctcctccgaggccaataaagtactaactcgtgcgcctattcttcaatccacccctgtgacaccaccacctctcagcccagccttcggggggacttcaaaaattgaccagtattctcgcattctgtttccagttgcatttgcagggttcaacctggtgtattgggtggtatacctgtctaaagacacaatggaggtaagcagcagtgtggagtag

SEQ ID NO: 118045 - DNA, 1425 bp, synthetic construct
  misc_feature 1..1425: note = Description of Artificial Sequence: Synthetic coding sequence
  source 1..1425: mol_type = other DNA
atgtggaccgtccaaaatcgggagtctctaggactcctgtcttttccagtgatgatcaccatggtctgctgtgctcatagcaccaatgaacctagtaacatgagttacgtgaaagaaacagtggatagactgctaaagggctacgacatccggctgcgacctgactttggtggaccccccgtcgacgtgggcatgagaattgacgttgcctctatcgatatggtttcagaagtgaatatggattataccctcaccatgtatttccagcagtcttggaaagacaagcgcttgtcctacagcggcatccctctcaatctgaccctggacaatagggttgcagaccagttgtgggtgcctgacacttacttccttaatgacaaaaaatcgtttgtgcacggcgtgaccgtaaaaaatcgcatgattcgcttgcatcctgacggcacagtcctttatggactgcgtatcacaacaacagcggcttgtatgatggatctgagaaggtatcctctcgacgagcaaaactgtacactggaaatcgagtcatacggctacaccactgacgacattgaattctattggaacggaggagagggagcagtcactggagtcaacaaaatcgagttgccacaattctcaattgtcgattacaagatggtcagcaaaaaggtcgaatttaccacaggggcgtatccaagactctcattgtcctttagactcaagcgtaacatcggatatttcattctgcagacgtacatgccatcgacgctgatcacgatcctcagttgggtttccttctggattaactatgacgcctccgcggcacgcgtcgcgctggggataaccaccgtgttaactatgactacgatatctacgcatctgcgagaaacgttaccaaagataccctatgtaaaggctattgacatctacctcatggggtgctttgtattcgtttttctggccctcctggagtatgccttcgtcaactatatcttctttggaaaaggcccacagaagaagggagcttcaaaacaggatcagagcgccaacgagaagaacaagctggaaatgaacaaggtccaggtggatgcccatgggaatatcctactctcgacactggaaatacgcaatgaaacttctggttctgaagtgctcacatccgtgtccgatcccaaggccacaatgtatagttatgattccgcgagtatccagtatcgcaagcctctgagctctcgcgaagcctacggacgtgccctggaccgacacggcgtgccaagcaaaggccggatccgccgaagggcctcccaactgaaggtcaagattcccgaccttactgatgtgaactccatagataaatggtcgcggatgttttttcctatcacttttagcctgttcaatgtggtgtactggttatattatgtccactag

SEQ ID NO: 118046 - DNA, 1215 bp, synthetic construct
  misc_feature 1..1215: note = Description of Artificial Sequence: Synthetic coding sequence
  source 1..1215: mol_type = other DNA
atgacttttgcctgtgggcgcactagcgaggactacactctcacaatgtatttccagcaaagctggaaagataaaagattaagctatagcggcattcccctcaatctcaccctggataatagggtggccgatcaactgtgggtgcccgatacctatttcttgaatgacaaaaaaagctttgtgcacggagttacggtgaagaacaggatgatcagactacatcccgatggcaccgtcttatatggccttaggatcaccacaactgctgcttgcatgatggatctacgcagatatcctctggacgagcaaaactgcacccttgaaatcgagtcgtacgggtataccactgatgatatcgaattctattggaatgggggagaaggggcagtcactggagtcaataagatcgagttgccccaattttcaattgtggactacaaaatggtatccaagaaagtggagttcacaactggggcctaccctagactgtccctcagttttcggttgaagagaaacattggctatttcatccttcagacgtacatgccctccacattaatcacaatcctgtcttgggtatcattttggataaattatgatgccagtgccgcccgtgtggccctgggcattacgacggtgctcacaatgacaacaatttctacacacctgagggaaactcttccaaaaataccttatgtcaaagccatcgatatctacctgatgggatgctttgtgtttgtttttttggcgctcttggagtatgcattcgtcaactacattttctttggcaaaggccctcagaagaaaggcgcgtcgaagcaagaccagagtgctaacgagaagaacaaattggaaatgaacaaggtgcaagtggacgctcatggtaacatcttgctctctaccttggagattcgtaatgagaccagtgggagcgaggtgctgacctccgtgtctgatcctaaggcaaccatgtactcatatgattccgcaagcatccagtacagaaaacccctttcttcacgggaagcatacggacgggcattggacaggcacggtgtgccaagcaagggtaggattcgacgtagagcatcccagttaaaggtcaaaatacctgacctcaccgatgttaacagtatcgataaatggtcccgcatgttcttccccattaccttctctttgtttaacgtggtttactggctgtattacgtacactag

SEQ ID NO: 118047 - DNA, 1539 bp, synthetic construct
  misc_feature 1..1539: note = Description of Artificial Sequence: Synthetic coding sequence
  source 1..1539: mol_type = other DNA
atgtggagagtgaggaagcgcgggtacttcgggatatggagctttcctctgataatcgctgcagtgtgcgcccagagcgtcaacgatccctccaacatgagtttggtgaaagagacggtggacaggctgctgaaggggtacgacattcggctgcggcctgattttggcggtccacctgtggccgtggggatgaacattgacatcgccagtatcgatatggtgtcagaagtaaacatggattatacactgaccatgtactttcagcaggcttggagagataagagactgtcctacaatgtcattcccctgaacttgacactggacaatcgcgtcgcagaccaactgtgggtgccagacacttacttccttaacgataaaaaaagctttgtccatggcgtgactgtcaagaacaggatgatccggctccaccccgacggaaccgtactctacggactgcggattacgaccactgccgcctgcatgatggacctgcgccgttacccactcgatgaacagaattgtacactcgaaatcgagagttatggctataccactgatgatatcgaattttattggaggggtgacgataacgccgtgacgggggttacgaagatcgagttaccacagttttccatcgtcgattataaactgatcaccaagaaggtagtttttagcacgggcagctacccaaggctgtcgctgtctttcaagctgaaacgaaatataggctactttatattgcagacatacatgccctcaattctcattaccatcctctcctgggtcagcttctggataaactacgacgcctcggctgctcgagtcgccctcggcatcaccacagtgctcactatgactacaattaatacgcatctcagggaaacgctgcctaaaatcccctatgttaaagcaattgatatgtacctgatgggatgcttcgttttcgtttttatggccctgcttgagtacgctttggtgaactatatcttctttggacgtggaccacaacgccaaaaaaaagctgccgagaaggcagcttcagcaaacaacgagaagatgagacttgatgtcaataagattttttacaaagatatcaaacagaatgggacacagtatcggtctttgtgggaccccacagggaatctgtcccccacgagaagaacgaccaattacgatttcagtctgtacaccatggaccctcatgaaaacatccttctgtctacactagagataaaaaatgagatggcaacttcagaggctgtgatgggtcttggagatcctagaagcactatgttggcctatgatgcttcttctattcaatatagaaaggccgggttgcctcgacacagtttcgggcgcaatgcgctcgaacggcatgtcgctcagaaaaaatccaggctgagacgccgggcctcccagctcaaaatcacaatccctgatctaacggatgtgaacgccattgacagatggagccggatttttttccccgtggttttctcattttttaacatcgtctactggctatactatgtaaactag

SEQ ID NO: 118048 - DNA, 1425 bp, synthetic construct
  misc_feature 1..1425: note = Description of Artificial Sequence: Synthetic coding sequence
  source 1..1425: mol_type = other DNA
atgtggcgagtgagaaagcgtggttacttcgggatttggtcttttccacttataatcgcggccgtgtgtgcccagagcgtcaatgatccaagtaacatgagcctcgtgaaagagacggtggatcgtcttttgaaaggctatgacatcagactgcggccagacttcggtggtccaccagtcgctgttggaatgaacatcgatatcgctagcattgacatggtttctgaggttaatatggattacaccttgacaatgtacttccaacaggcctggcgcgacaagcgcttgtcctacaatgttatcccactcaatctgacactggataacagagtggccgaccagttatgggttccagatacctattttctgaatgacaagaagagtttcgtgcacggtgtgacagtcaagaacaggatgatccgcctccaccccgacggcacagtcctgtatgggttacggattacaactacggcggcctgtatgatggatctgcggcggtacccccttgacgaacagaattgtaccctggagattgaatcttacggatatacgacggacgatatcgagttctactggaggggtgatgacaatgctgtgaccggcgtgacgaaaatagagctgccgcaattctctattgtcgattacaagttgatcacaaagaaggtggtgttctctacagggtcatacccaagactgtcactctccttcaagctgaagcgcaatataggatacttcatcctacaaacttacatgccatctattctaataacaatcctgagctgggtctccttctggattaattacgatgcctccgctgctcgcgtcgcactggggattactactgttttgacgatgactaccattaatactcacctgcgtgagactctgccaaagatcccatacgttaaggcaatagatatgtacctgatgggctgcttcgtctttgtttttatggccctgttagagtatgcattagtgaattatatctttttcggcaggggtcctcagcggcagaagaaggccgctgagaaggccgcctcagctaacaatgagaaaatgcgtctcgatgtgaacaaaatggatccccatgagaacattctgctctcgacgctcgagattaaaaatgaaatggccacaagtgaggccgtgatggggctgggggacccgaggtcaactatgttggcctatgatgcttcctctattcagtaccgaaaggcgggactcccccggcactcgttcggtagaaatgccctagaacgccacgttgcccagaaaaagtctcgactgagacgcagggcatcccagttaaagattaccatacctgacttaacggatgtaaacgccatcgatcgatggagtcgaatttttttccctgttgtattcagcttttttaacatagtatactggctgtattatgttaattag

SEQ ID NO: 118049 - DNA, 1539 bp, synthetic construct
  misc_feature 1..1539: note = Description of Artificial Sequence: Synthetic coding sequence
  source 1..1539: mol_type = other DNA
atgtggagagtgcgcaagcgtggatactttggcatatggagcttccccctgatcattgctgcagtatgcgcccagtctgtgaacgatcctagtaacatgagcctcgtgaaggaaacggttgaccgtctgctgaaaggttacgacatccggctgcggcctgacttcggaggaccaccagtagctgtggggatgaatatcgatatagcaagtattgacatggtaagtgaagtgaacatggactatactctcacgatgtactttcagcaagcttggagagataagagactttcctataatgttatacccttaaatcttactctggataaccgggtcgcagatcagctatgggtccccgacacctatttcctgaacgataagaagtcctttgttcacggggtaacagtcaaaaatcggatgattagactgcatccagatggaaccgtgctttatggtcttaggatcaccaccacggcagcatgcatgatggatctgaggaggtatccgctcgatgagcagaactgcaccctggaaattgagagttacggatacacaaccgatgatatagaattctattggcgaggcgatgacaacgcagtgacaggagtcacaaaaattgagctcccacagttttctatcgttgattacaaacttataaccaagaaggtcgtattttctaccggctcatatccacggctcagcctgagctttaagctgaagcggaatatcggttatttcatcctgcaaacttacatgccgtcaatccttataacgatcctgtcctgggtgtctttttggatcaattatgacgcttcggccgccagggttgctttggggattaccaccgtgctcacaatgaccacaattaacacccaccttcgagaaacactgccaaagatcccctatgttaaggctatcgacatgtacctaatgggatgcttcgtgtttgtttttatggccctgcttgagtacgcgttggtcaattacatcttcttcggtcgcggcccccaaaggcagaagaaagccgctgaaaaagccgcttccgccaataacgaaaaaatgagactcgacgttaacaagatcttttataaagacatcaagcagaatggaacccagtacagatccctgtgggacccaaccggcaacctcagccctactcggcgaaccactaactacgattttagcttatacaccatggacccacacgaaaacatactattgtctacgctggagataaagaatgagatggccacatctgaagcagtgatgggcctgggagacccacgatctaccatgctggcttatgacgcctctagcatccagtatagaaaggcggggctgccgcgccactctttcgggaggaacgccctggagcggcacgtggctcagaaaaaatctaggctccgccggagggccagtcagctgaaaattacaataccagatttgaccgacgtcaatgctatcgacagatggtctcgtatattctttcctgtcgtattcagcttcttcaacatcgtgtattggttgtattatgtgaactag

SEQ ID NO: 118050 - DNA, 945 bp, synthetic construct
  misc_feature 1..945: note = Description of Artificial Sequence: Synthetic coding sequence
  source 1..945: mol_type = other DNA
atgatggacctgcggagataccctctggacgaacagaactgcacgcttgaaattgagagttacgggtataccaccgatgacattgagttttattggagaggtgacgataacgcagttactggcgtaactaaaattgagcttccccagtttagtatcgtggattataagctgatcactaaaaaggtagtcttttccaccggcagctacccaagactgtccctcagttttaagttaaagcggaatataggttacttcatcctacagacatatatgccctccatcttgattacaattcttagttgggttagcttctggataaactatgatgcatcagccgcaagagtcgctcttggcattaccaccgtattaaccatgaccaccattaatacccacctcagggagactctgcctaagatcccatacgtgaaagctattgacatgtacctcatgggttgttttgtttttgtattcatggcgctgctggagtacgctctagtcaattatattttctttgggcgtggcccacagcgacaaaaaaaggctgctgagaaggctgccagcgccaacaacgagaagatgagactcgacgtgaacaagatggacccacacgagaacatattgctgagcaccctggaaatcaaaaatgagatggctacctctgaggcagtgatgggtctgggggatccccgtagtactatgctggcttacgacgcaagcagtattcaataccggaaagccggactgcccaggcactcattcggcaggaacgctttggaacggcacgtcgcccagaaaaaaagtcgtttgcggaggagggcaagtcaattgaagatcaccataccggacttaacagacgtcaatgccatcgaccgatggagcagaatctttttcccggtcgtattttcattttttaatattgtgtactggttgtattatgtgaactag

SEQ ID NO: 118051 - DNA, 1236 bp, synthetic construct
  misc_feature 1..1236: note = Description of Artificial Sequence: Synthetic coding sequence
  source 1..1236: mol_type = other DNA
atgaatatcgacatagctagcatcgacatggtgagcgaagttaatatggactacacgctgaccatgtactttcagcaagcttggagggacaagagacttagctacaatgtaatccctctgaacctgacgctggacaaccgagtagctgaccagctgtgggtgcccgatacatactttcttaatgataagaaatcgttcgtacatggtgtgacggtaaaaaatcgaatgatccggctccaccctgacggcacggtgctgtatgggctgaggataaccacaactgcagcttgcatgatggatttgaggaggtacccccttgacgagcagaactgtacactggagatcgaatcctatggatatactacagatgacatcgagttttactggagaggcgacgacaacgctgttacaggcgtgacaaaaatcgaactgccacagtttagcattgtcgactataagctgattaccaagaaggtggtttttagcacaggatcttatcctcgcttatctttgagctttaagttaaaaagaaacatcggatattttatcctccaaacctacatgccaagcatcctgataactattctgagctgggtttcattctggattaattacgatgccagcgcagcccgggtggccttgggcatcaccactgttctgactatgactactattaacacacatctcagggagacactgccaaagattccttatgtaaaagctatcgatatgtacctgatgggctgttttgtgtttgtatttatggctttgctcgaatacgccctcgtgaattacattttttttgggcgggggccccagagacagaagaaagcagcagaaaaggcagcgtcggccaacaacgagaaaatgaggctggatgtcaataaaatggacccgcatgaaaacattctgctctctacactggagattaagaatgagatggccacctctgaagcggtgatgggattgggagacccacggtccacaatgctggcctatgatgcatccagcatccagtacaggaaggctggtctcccacgacactcttttggaaggaacgcactcgagagacacgtggctcaaaaaaaaagtcgtctgcgacggagagcatcacagttgaagatcacaatccctgatcttaccgacgttaacgctattgaccggtggtcccggatcttttttccagtggtcttcagtttctttaatatcgtgtactggctttattacgtcaactag

SEQ ID NO: 118052 - DNA, 1425 bp, synthetic construct
  misc_feature 1..1425: note = Description of Artificial Sequence: Synthetic coding sequence
  source 1..1425: mol_type = other DNA
atgtggcgggtacggaagcgaggatatttcggcatctggtccttccctttaattattgccgcagtatgcgctcagagcgtgaacgaccctagcaacatgagcttggtaaaggagacagtggaccgcctccttaaggggtatgatattcgcctgcgccctgatttcggtggaccaccggtcgccgtggggatgaatatagacatcgccagcatcgacatggtctctgaagtcaacatggattacacacttactatgtacttccagcaggcttggcgcgacaaacgcttaagttacaatgtgatcccgcttaacctgactttggacaaccgcgtcgcggatcagttgtgggtccccgacacatacttcctcaatgacaaaaaaagtttcgtccacggcgtaaccgtaaagaaccgcatgatccgtcttcacccagatggaaccgtcctttatgggttgaggattaccactacagcagcctgcatgatggatcttcggcgctacccactcgacgaacagaactgcacactagagattgaaagctacgggtacactacagacgatatcgagttctactggcggggggatgataatgcagtaacaggcgttaccaaaattgaacttccacaattctccatagtggattacaagctgatcactaagaaagtggtgttttccacaggcagttatcctcgactatccttgtcgtttaagcttaagagaaatatcggatacttcatcttacagacatacatgccttcaatcctcatcacgattctgagttgggtctctttttggattaactatgacgcctctgcagctagggtagctctgggtatcaccaccgtgctcactatgacgactattaacacgcatttacgcgagacacttcctaagatcccatacgttaaagcaatcgacatgtacctgatggggtgttttgtcttcgtttttatggccctgttagagtacgctcttgtgaattatatctttttcggacgggggcctcagcgccagaaaaaggcagccgaaaaggcagccagtgccaataatgagaaaatgcggttggatgtgaacaagatggatccccacgagaacatcctgctgagtacccttgaaattaaaaatgaaatggcaacttccgaagccgtcatgggcctcggagacccacggtcaacaatgctggcttatgatgcttcttccatccagtatagaaaggcggggctgccacgacactccttcggacggaatgcgctggaacgacatgttgcacaaaagaaatctcgactcaggcgcagggccagtcaattgaagatcaccattccagacctgaccgacgtcaacgctattgataggtggagtaggattttttttcctgtcgtgttctcatttttcaacatcgtgtattggctatattatgtcaactag

SEQ ID NO: 118053 - DNA, 1422 bp, synthetic construct
  misc_feature 1..1422: note = Description of Artificial Sequence: Synthetic coding sequence
  source 1..1422: mol_type = other DNA
atgtgctctggactgctggagctgctgttgccgatatggctgtcttggacactgggcacaagggggtctgagccaagaagcgttaatgatcctggtaacatgtcattcgtgaaggagacagtagacaagctgctgaaaggatacgacattcgcctcagacctgattttggtggcccccctgtatgcgttgggatgaacattgatatcgcgtctattgacatggtctctgaggtaaatatggactacaccctgactatgtatttccagcagtattggagggataagagactcgcctactccggcatcccattaaatctgacgttggacaatcgcgttgccgaccagctgtgggtgcccgatacatatttcctgaacgacaaaaagagctttgtgcatggcgtgacggtcaagaatcgcatgataaggctgcaccccgatggtacagtcttgtatggacttaggatcaccacaacagctgcctgcatgatggatctgcgtagataccccctggatgagcaaaattgcacactcgaaattgaaagctacgggtataccactgatgacatcgaattttattggcgcggaggggataaggcagtgacgggcgttgagcgaatcgagcttccacagttttcaattgtggaacaccgtctggtctccagaaatgtagtgtttgccacgggagcttaccctaggctgtcattgtctttccggctgaagaggaacattggatattttatattgcagacatacatgccctctatactaatcaccattctttcttgggtttcattctggataaattatgacgcgtccgccgcgcgtgtggctttggggatcactacagtgttgacgatgacaactatcaacacccacctgagggagaccctgccaaagatcccctacgtgaaggccattgacatgtacctgatgggctgttttgtgttcgtcttcttggcccttctcgagtatgcatttgtaaattacattttcttcggcaggggtcctcagcgccagaagaagcttgctgaaaagacggcaaaggcaaaaaacgatcggtctaaatcagagtcgaacagagtggacgctcatggcaacattttacttacgtctcttgaggtgcacaacgaaatgaatgaagtgagtggcggcataggcgacaccagaaattcagctatttcttttgataatagtggcattcaatatcggaaacagtctatgccccgggagggacacggacggttcctgggagacaggtctctgccccacaaaaaaacacacctgaggagaagatcaagccagttaaaaatcaaaattcctgacctcaccgacgtcaatgctatagacagatggtctcgcatcgtgttcccttttaccttctcccttttcaacctggtctactggctttattacgtcaattag

SEQ ID NO: 118054 - DNA, 1422 bp, synthetic construct
  misc_feature 1..1422: note = Description of Artificial Sequence: Synthetic coding sequence
  source 1..1422: mol_type = other DNA
atgtgggggctggctggcgggagattgtttggcattttttccgctcccgtcttagtcgccgtggtatgctgtgcacagtctgttaatgatcctgggaatatgtccttcgtcaaggagacagttgacaagctcctcaaaggttatgatatcaggctgagacccgatttcggtggaccacccgtatgtgtcggcatgaacattgatattgcgagtatcgatatggtctcggaggtgaacatggactacaccctcacgatgtatttccagcagtactggcgcgataaaagattggcctactccggaatcccactcaacctgacactcgacaaccgcgtagccgatcagctatgggtgccggacacttatttcctaaacgacaaaaaatcctttgtccatggggtcacggtgaaaaaccggatgatcaggctgcatcccgacgggactgtgctgtacggccttcggataacaacaaccgcagcatgcatgatggacttacggcgctatcccctggatgaacagaactgcacgcttgaaatagagtcctatggctacacaactgatgacatcgagttctattggcgcgggggcgacaaggcagttactggagtagaacgcattgagctgccacagttttctattgtggaacaccggctcgtgtccaggaacgtcgtgtttgcgactggcgcttatccccgactgtcactgtctttccgactaaaaaggaacataggttactttattctgcaaacatacatgccttcgatactcatcacaattcttagctgggtgagcttctggattaattacgatgccagtgctgctagagtagccctggggatcacaaccgtcctgacgatgacaaccattaacacgcacttgcgcgagaccctacctaagattccctacgttaaagctatcgacatgtacctgatgggttgtttcgtcttcgtcttcctcgccctattagaatatgcgttcgttaattacatattcttcggacgggggccacaacgacagaagaaactcgcagaaaagacagcgaaggctaaaaatgatagaagcaaaagcgagtccaacagagttgatgcccacggcaatatcctgctgactagcctggaagtacacaacgagatgaacgaagtatctgggggcatcggagatacacggaattctgccatctcctttgacaacagtggcattcaataccggaaacagtcgatgccccgcgaaggacatggcaggttcctcggcgaccgttccctgcctcacaagaagacgcatctccggcgcaggtcctcacagctaaagattaagatccccgatctgacagacgtcaatgccatcgacagatggagccggatagtattcccctttaccttctctctgttcaacttagtctattggctgtattatgtgaattag

SEQ ID NO: 118055 - DNA, 1209 bp, synthetic construct
  misc_feature 1..1209: note = Description of Artificial Sequence: Synthetic coding sequence
  source 1..1209: mol_type = other DNA
atgtgggccacttatcagactgaggaagactataccctgacaatgtatttccaacagtactggcgcgataaacgcctcgcttacagcggcatccccctgaacttaactctagataaccgggtcgctgatcagctctgggttcccgacacatatttcctgaatgacaaaaagtctttcgtgcacggcgtgacagtcaagaaccgtatgattcggcttcaccccgacggcaccgtactttatggtttgcgcatcaccacaaccgctgcatgcatgatggacttaaggagatacccacttgatgaacagaactgtactcttgaaatcgaatcatacggatacacaaccgacgatatcgagttttactggcgaggcggcgataaagccgtcacaggtgtggagcgaattgaactaccccagttcagcatagtcgagcataggctcgtgagtcgcaatgtagtgtttgccacgggagcttacccgagactgagcctgtcgtttagactcaaacggaatattggctactttatcctgcaaacatatatgccaagcatactaattacaatattgtcctgggtttccttttggatcaactacgacgcatctgcagcgagagtcgcacttgggattaccactgtgcttacaatgaccactatcaacacccacctgcgcgaaacgctcccaaaaatcccatacgtgaaggcgattgacatgtaccttatgggttgtttcgtgtttgtctttctcgccctcctggagtatgcctttgtgaactacattttttttggccggggtccacaacgccagaagaaactcgcagaaaaaacggccaaagccaaaaacgacagatccaagtcagagagtaatcgtgtggacgctcatgggaacattctgcttacatccctcgaggtccacaatgagatgaacgaagtgagcggggggatcggcgatacacggaactcggcaattagcttcgataacagcggcattcagtaccgcaagcagtcaatgccacgcgagggacacggacgattcctcggggatcgctctctccctcacaaaaaaacccacttgagacggcgctctagccaattaaagataaagatccccgacttgactgatgtgaatgctattgacaggtggtccaggattgtatttccgttcacattttcattgtttaacttggtatattggttgtattacgtcaactag

SEQ ID NO: 118056 - DNA, 1167 bp, synthetic construct
  misc_feature 1..1167: note = Description of Artificial Sequence: Synthetic coding sequence
  source 1..1167: mol_type = other DNA
atgtatttccaacaatattggcgagataaacgccttgcttactcaggaattcccttgaatttaaccctcgataacagagtcgcggaccagctgtgggtacctgacacatactttttaaatgataagaaaagtttcgttcacggggtaacagttaaaaacagaatgattagactccatcctgatggaactgtcctgtacggactgcgtatcacaacaactgcagcgtgtatgatggacctgcggcggtacccactggacgaacagaattgcacgctcgaaattgagtcgtatgggtatactacggacgacatcgagttttattggagggggggcgataaggccgtgacaggagtcgaacgcattgaactcccccagtttagtatagtggagcacaggttagtgagccggaacgtggtgttcgcgacgggggcatacccaagactctcgctgtccttcagacttaagaggaatatcggttactttatccttcaaacctatatgccctccatcctgatcacgattctctcttgggtttcattttggataaattacgatgcttccgctgctagggtggccttagggatcaccacagtgcttacaatgacaaccatcaatactcacttgcgtgagacgttgcccaaaattccctacgttaaggccattgacatgtacctgatggggtgtttcgtctttgtctttctcgccttactggagtacgcctttgttaattatatattcttcggtcgagggccacagaggcagaagaagctagctgaaaagactgcaaaagccaagaacgatagaagcaagtctgagtccaaccgggtggacgcccacggtaatatactactgactagcttagaggttcacaacgaaatgaacgaagtttctggcggcattggggacactagaaattccgccatttccttcgataactctggaatccagtaccggaaacagtccatgcctcgcgagggacacggccgttttctgggcgataggtctctgccacataaaaagacccacttgcgccgaaggtccagccagctgaaaataaaaatcccggatctgaccgatgttaacgcaatcgacaggtggagtcgcatcgtgttcccctttacattttcccttttcaatcttgtatattggctctattacgtaaactag

SEQ ID NO: 118057 - DNA, 417 bp, synthetic construct
  misc_feature 1..417: note = Description of Artificial Sequence: Synthetic coding sequence
  source 1..417: mol_type = other DNA
atgtactttcagcaatactggcgcgataaacgattagcctattccggtatacccctaaacctaactctcgataatcgcgtggccgatcagctgtgggtgcccgatacctactttctgaatgataagaaatccttcgtacatggggtcaccgtaaaaaatcgtatgatacggctgcacccggatggaacagtcctctacggcctgagaattacgacaacagcagcctgcatgatggacctgaggcgctaccctctagacgagcagaactgcaccttggagatagagtcgtatggctacacaacagacgatatagaattttactggcgcggcggcgataaggctgtcactggagtggagaggatagaactcccacagttttcaatagtggaacaccgcctcgtgtccagaaatgtgtag

SEQ ID NO: 118058 - DNA, 1359 bp, synthetic construct
  misc_feature 1..1359: note = Description of Artificial Sequence: Synthetic coding sequence
  source 1..1359: mol_type = other DNA
atggacgccccagcacggctgctcgccccgctgctcctgctctgcgcccagcagttgcgaggcactcgggcgatgaacgatatcggtgattatgtcggatccaatttagagatttcttggctccctaacctcgacggcctgattgcaggctacgcacgcaattttaggccggggatcggtggcccgcccgtgaacgtcgcactggcattggaggtcgcatcaatcgaccacattagtgaagccaacatggaatatacaatgactgtgttcttacatcagtcgtggcgcgattcccgtctgagttataaccacaccaacgagaccctgggccttgacagccgattcgttgacaagttgtggcttcccgacaccttcattgtgaacgccaagtccgcctggttccacgatgtcactgtggagaacaagctaattcggctgcagcccgatggtgttattctgtactccatcaggattaccagtacggtggcctgtgacatggacctggctaaataccccatggacgagcaggaatgcatgttggatctggaatcatacgggtactcttcagaagatattgtgtattactggtcagaatcacaagagcacatccatggactcgataaactccagctggctcagttcactattacttcataccgattcacgacagagcttatgaactttaagtcggccgggcagtttcctcggctttccctgcactttcatctcagacggaaccgtggagtgtacatcatccagagttacatgccctcagtactgctcgtggcgatgtcttgggtgtccttttggatttcacaagctgcagtccctgcccgtgtctctctcgggattaccacggttctgacaatgacgaccctgatggtgagtgcccggtctagccttccacgcgcctcagctattaaggccctggacgtatacttctggatttgctacgtttttgtgttcgctgctctggtggagtatgctttcgcccactttaatgctgactatcgcaagaaacaaaaagccaaggtgaaagtttcccggccaagggcagaaatggatgtgcgaaacgcaattgtcctctttagcctcagcgctgcaggagtgacccaggagctggccatctctcgcaggcagcgtagggtgcctggtaacctgatggggagctatcgctcagtcggggtcgagacaggggaaacaaagaaagagggagccgcccgcagtggaggacagggggggatccgggccaggctccgccctattgacgccgatacgattgacatctacgcccgggccgtttttccagccgccttcgctgcagtaaatgtgatttactgggctgcctacgccatgtag

SEQ ID NO: 118059 - DNA, 1521 bp, synthetic construct
  misc_feature 1..1521: note = Description of Artificial Sequence: Synthetic coding sequence
  source 1..1521: mol_type = other DNA
atgctgtccaaggttctgcctgtgttgctggggatcttactcatcctgcagtcgcgcgtggaagggccacagacggaatcgaaaaacgaggcgtccagcagggatgtggtctacggcccacaaccgcagcccctggagaaccagttactgtccgaggagacaaagagtactgaaacagagactggctctcgggtgggtaaactgcccgaggcatctcggatcctgaataccatcctgtctaactatgaccacaagctccggcccggcattggagagaaaccaacggtggtaacagtcgagattagcgtaaatagcctgggaccactcagcatcctcgatatggagtatacgatcgacattatcttttcacaaacgtggtatgacgagcgactatgctacaacgatacttttgagtccctagtcctgaatggaaacgtggtttcacagctttggattccggatacctttttcaggaatagcaagcgtactcacgaacacgagattaccatgccgaaccaaatggtgagaatttacaaagatggtaaagtcctgtacactatcagaatgactatcgatgctggctgtagcctgcatatgctgaggtttccgatggactcccacagctgtcctctgtcattctcgagcttcagctaccctgaaaacgaaatgatttacaaatgggaaaacttcaaactggagattaatgaaaagaactcttggaagctgtttcagtttgatttcactggtgtatctaacaaaacagagattatcacgacaccagttggggatttcatggtaatgaccattttttttaatgtgtccaggaggttcgggtatgttgctttccaaaactacgtgccttctagcgtgaccacaatgctgtcatgggtaagtttctggataaagactgagagcgcccccgcaagaaccagcttgggcattaccagcgtcctgacaatgacaacacttggaacgttcagccgtaaaaatttcccccgagtatcatatataacagctttagacttttacattgccatctgctttgtgttctgcttctgtgctctcttggaatttgccgtgctgaatttcctgatctacaaccagaccaaggcccacgcaagtcctaaattaaggcacccaaggataaacagtagggctcatgcaagaacccgggctaggtctcgtgcctgtgctcgtcagcaccaagaagccttcgtatgccagatcgttacgaccgagggaagcgatggcgaagagcggccgtcttgttctgcgcagcaacccccaagcccggggagcccagagggcccacgcagcctctgctccaagctggcatgttgtgaatggtgtaaacgctttaagaaatatttctgcatggtgcccgactgtgagggaagcacctggcagcaggggaggctctgcatccacgtttatcgacttgataattattctcgagtagtattcccagtgacctttttctttttcaacgtcctgtactggctggtgtgcctaaatctgtag

SEQ ID NO: 118060 - DNA, 420 bp, synthetic construct
  misc_feature 1..420: note = Description of Artificial Sequence: Synthetic coding sequence
  source 1..420: mol_type = other DNA
atgaggtccccctgtcccaccaggtggagtgcctctaccaggatggcgcggtgttgtacccagctggtgtcataccccgagaacgaaatgatttacaagtgggagaacttcaagctagaaatcaacgaaaaaaatagctggaaactttttcagtttgatttcaccggagtttctaacaaaaccgagatcatcacaacccctgttggagacttgaatgaggaacctcgagacctgcctcgagtcgccccacgggcgaccttggagacactatttacgcaccctgatcaggtgcagggcagtgagggtacggcactgattgtttcccgcatgtggatggagcccgtgacccaacccgcaatctgtcgggagaggcatctggtgctgctcccctttaaaataccgaggcaagaagacttctag

SEQ ID NO: 118061 - DNA, 1398 bp, synthetic construct
  misc_feature 1..1398: note = Description of Artificial Sequence: Synthetic coding sequence
  source 1..1398: mol_type = other DNA
atgggccctctgaaggcatttctcttttcacccttcttgctgaggagtcagagtcggggcgtgaggcttgtcttcttgctactgactctccatttaggtaactgtgtggataaagctgacgatgaagatgatgaggatttgacagtgaacaagacttgggttctggccccaaaaatccacgagggtgacatcactcagatcctgaactctctacttcaagggtatgataacaagctcagaccggacatcggcgtcaggcctacggtaattgaaacagacgtctatgttaactccattggcccggttgatcccattaatatggagtatactatcgacatcattttcgctcaaacgtggtttgattctcggctaaaatttaactccaccatgaaggtactcatgctcaactctaatatggtgggcaaaatctggattccagacacctttttcaggaactcccgaaagtccgatgcacattggatcaccacccctaacagattgcttaggatatggaacgacggtagagtactgtataccctgaggctgacaataaacgctgaatgttacctgcagcttcataatttccctatggatgaacacagctgcccattagagttctcttcatacgggtatccgaaaaatgaaatcgaatacaagtggaaaaagccatcagtggaagtcgcagatcccaagtattggcggctttaccagtttgcttttgtcggcctccgtaactctactgaaataacccatacgatttccggagactatgtgattatgaccatttttttcgatctcagcagacgcatgggctactttaccatacaaacatacattccatgcatcctcaccgtggtgctctcatgggtgagtttctggataaacaaggatgctgtcccggcccggacatctttaggcatcacaaccgttctgaccatgacgaccttaagcacgatcgcccgtaaatctctgcccaaagtgtcctacgtcaccgccatggacctttttgtgtctgtgtgtttcatctttgtgttcgctgccttgatggaatacggtacgctgcactattttacctccaaccagaagggaaagaccgccaccaaggatcgaaaattgaagaataaagctagcatgacacctggtcttcatccaggaagtacactgatccctatgaataatatttccgtccctcaggaagacgattatggctaccagtgcctggaaggcaaagattgcgcaagtttcttttgttgtttcgaggattgtcgcactggaagctggcgagaaggacggatccatatccggattgctaagatagattcatatagccggattttctttccaaccgccttcgctttgtttaacctcgtctactgggtgggatacttatatctgtag

SEQ ID NO: 118062 - DNA, 1260 bp, synthetic construct
  misc_feature 1..1260: note = Description of Artificial Sequence: Synthetic coding sequence
  source 1..1260: mol_type = other DNA
atggggccactgaaggcttttttgttttcaccttttcttcttaggagccagagcaggggagtgagactggttttcctcctgcttacactgcaccttggaaactgcgttgacaaggcagacgatgaggatgacgaggacttgacggtaaataaaacttgggtgctggcccccaagattcacgagggcgacatcacacagattcttaattccttgttgcagggctatgacaacaagcttagaccggacattggtgtgcgccccaccgtaatagagaccgacgtatacgtcaactctattgggcccgtggatcccataaatatggagtatactatcgatatcatcttcgctcaaacatggtttgacagccgtctgaaatttaactccaccatgaaggtcctgatgctgaatagcaacatggtagggaagatttggattccggacacattcttcagaaactcacgcaaatctgacgcacactggattaccaccccaaacagactcctccggatatggaacgacgggagagtgttgtataccctaagacttactatcaatgccgaatgctatcttcagctgcataacttccccatggacgagcactcttgcccgctagagttctcctcctatggctaccccaagaatgagatcgaatataaatggaagaagccaagtgttgaagtggccgatcctaagtactggagactgtatcaattcgcgtttgtagggctgagaaattctactgaaatcactcataccatatcaggagattatgtcattatgacaattttctttgacttaagtcggaggatgggctacttcacgatccagacctatataccatgcatcttgaccgttgttctcagttgggtcagcttctggatcaacaaggacgctgtgccggcaaggacctcactcggcataaccaccgtcctcaccatgacgaccctgtccactatcgctcggaagtccctgccgaaggtgagctatgtgacggctatggatctatttgtaagtgtgtgcttcatcttcgtctttgcggccctcatggagtacgggaccttgcattatttcactagtaatcaaaagggtaagacagcaaccaaagatcggaaactgaaaaacaaggcatctatgacgcctgggctgcatcctgggagcactttaatccctatgaacaacatttcagtaccacaggaagatgactacggctatcagtgtttagagggacggaaagacacccacactcactgtcagaattag

SEQ ID NO: 118063 - DNA, 1428 bp, synthetic construct
  misc_feature 1..1428: note = Description of Artificial Sequence: Synthetic coding sequence
  source 1..1428: mol_type = other DNA
atgtctagtccgaacatctggtcgaccgggagttctgtttattctacccccgtgttttctcagaagatgaccgtgtggatcctcttgttgctgagcctgtaccctggtttcacctctcaaaaatccgacgatgattacgaggactatgcatcaaacaaaacttgggtgctaacacccaaagtgccagagggggatgtcaccgtgatactgaacaatctgctggagggttatgataataagctgcggcctgatataggggtgaagccgacactaatacatacggacatgtacgtcaactccatcggcccagtgaacgccatcaacatggagtacaccatcgacatcttttttgcccagacctggtatgatcgccgccttaaatttaattctacaatcaaggtactcaggttgaacagcaatatggtgggcaaaatatggatcccggacacattcttcaggaatagcaagaaggcagacgcccactggattaccacccccaataggatgctacgcatttggaatgacggccgcgtcctctatacactgcggctgactatagatgctgagtgccaactgcaattgcacaattttcccatggatgagcatagctgcccactcgaatttagcagttacgggtaccctagggaagagatcgtctatcaatggaaaagaagcagtgtcgaagtcggcgacacaagatcttggaggctgtatcaattttcatttgtgggcctgcgaaatactaccgaggttgtcaagactaccagtggcgactacgttgtgatgtccgtgtacttcgacctgagccgacgcatgggatatttcacaattcagacctatataccttgcacactgatcgtggtcttgagctgggtcagtttctggatcaataaggacgccgtgcctgcccggaccagtctgggcataacaaccgtccttaccatgacaaccctatctacaattgccaggaaatccttaccaaaggtgtcctacgtgacagcaatggatttgtttgttagcgtgtgtttcatcttcgtgtttagcgcactagttgagtatgggactttgcactatttcgtctccaatagaaagccttctaaagataaagacaagaaaaagaagaatcctctgctacgcatgttcagtttcaaggcccctactatcgacatccgccccaggtctgctaccatccaaatgaataacgctacccacctgcaggagcgagatgaagaatatggctacgaatgtctggacgggaaggactgtgcttcttttttttgctgcttcgaagactgtcgcaccggagcctggagacacggtcgaatccatatcaggatagccaaaatggatagctacgcgaggatcttctttccaaccgcgttctgcctgtttaacctggtgtactgggtgagctacttgtatctgtag

SEQ ID NO: 118064 - DNA, 1404 bp, synthetic construct
  misc_feature 1..1404: note = Description of Artificial Sequence: Synthetic coding sequence
  source 1..1404: mol_type = other DNA
atgtccagtccaaatatttggagcactggtagcagtgtgtactctacccccgtattcagccagaagatgacagtgtggatcctcctgttactgtctttgtaccccggcttcaccagtcagaagtccgatgacgactatgaggattacgcctccaacaaaacatgggtactgacaccgaaagtgcccgagggcgatgtgacagtaattctgaataacttgctcgaaggttatgataacaagctgcgaccggacataggcgttaagcctaccctgatccacacagatatgtacgtcaatagtattggccccgtgaatgctattaacatggaatacaccatagacattttctttgcgcaaacctggtatgatcggaggctgaagtttaactcgacaattaaagtcttgcgtctgaacagtaacatggtggggaagatctggattcctgacaccttcttccgcaacagcaaaaaggctgatgctcattggatcacaaccccaaaccggatgttgcgaatctggaacgacgggcgagtcctctataccctcagactgacaattgatgccgaatgtcagttgcagctccataacttcccaatggacgaacatagctgtcctctcgaattcagcagctatggctacccgcgtgaggagatcgtgtaccagtggaaacgatccagcgtcgaggtcggcgacaccaggtcttggcggctgtatcaatttagcttcgtggggctcaggaacacaaccgaggtggtaaagacaaccagcggcgactatgtggtaatgagtgtctacttcgatctatcacggagaatggggtacttcacgatacagacctacataccttgcacgctgattgttgtgctcagctgggtcagcttttggattaacaaggacgccgtccctgcaaggaccagccttgggatcaccactgttctgaccatgactacactcagcacaatcgcgcgaaaatcccttccaaaagtctcctatgtgactgctatggacctgttcgtgtctgtttgttttatttttgtgtttagcgccctggtagagtacggcacactgcattacttcgtctcaaataggaaacccagcaaggacaaggacaagaaaaagaaaaacccagcccccaccatagacattagaccaaggtccgcgaccatccaaatgaataatgcgactcatctgcaagagcgtgatgaagagtacggatatgaatgtctcgacggcaaggattgtgcaagcttcttctgttgctttgaagattgtaggaccggtgcttggaggcatggcagaatacacatcagaatcgccaagatggattcgtatgcacgaatattctttcctactgccttctgtctgtttaatctcgtctattgggtgtcttatctttatctgtag

SEQ ID NO: 118065 - DNA, 1119 bp, synthetic construct
  misc_feature 1..1119: note = Description of Artificial Sequence: Synthetic coding sequence
  source 1..1119: mol_type = other DNA
atgtatgtcaattctattggtcccgtcaacgcaataaatatggaatacaccatcgacattttcttcgctcaaacatggtacgaccgcagactgaagttcaatagcacaatcaaggtgttgcggcttaactctaacatggtgggcaagatttggatccccgacacattcttcagaaactcgaagaaggccgacgcccattggataacaacacctaatagaatgctgaggatatggaacgatgggcgcgtgctgtataccctgagactgactattgatgcagaatgccagttgcagcttcacaacttccctatggacgaacattcttgccccctcgagttctctagctacggatacccaagagaagagatcgtgtaccaatggaaaagaagttccgtggaggtcggcgacaccagatcctggagactgtatcagttcagttttgtgggcctgcgtaatactaccgaggttgtgaaaacgaccagcggagactacgtagtaatgagtgtctacttcgacctttccaggcgcatgggatacttcactatccaaacatacatcccttgcacgctgatcgtcgttctcagttgggttagcttctggataaataaggacgctgtgcccgccaggactagtttgggaatcactactgtactgacaatgaccacgctatccacaatcgccaggaagtctctgcctaaggtgtcgtatgtcacagctatggatctgttcgtgagcgtctgtttcatctttgtttttagtgcgctcgtcgaatacggcactttgcattacttcgtttccaataggaaaccctcaaaagataaggataagaagaaaaagaacccggcccccactatagatatcaggcctagatctgccaccattcagatgaataacgccacgcacttacaggaacgcgacgaggaatacggctacgagtgcctggatggcaaggactgcgcctccttcttttgctgttttgaagactgtcgcacgggggcatggcgacacgggcgtattcacattcgaattgctaaaatggacagctatgccagaatattcttcccaacagctttttgtctgtttaatctcgtttactgggtgtcgtatctctacctatag

SEQ ID NO: 118066 - DNA, 1404 bp, synthetic construct
  misc_feature 1..1404: note = Description of Artificial Sequence: Synthetic coding sequence
  source 1..1404: mol_type = other DNA
atggcacctaaattgttacttctactctgcctcttctccgggttgcacgctcggagcaggaaagtggaagaagatgagtatgaagactcatcatcgaatcagaagtgggtattggcaccgaagagccaggatactgacgttacgctaattttgaacaaactcttgagggagtacgacaaaaaattgaggccagatatcgggattaaaccgacagtaatcgacgtcgatatctatgttaattccattggcccagtctctagcatcaatatggagtatcaaatagacattttcttcgcgcagacttggacggattcgcgattaaggtttaattccacgatgaaaatacttaccctgaatagcaacatggtgggcctcatatggattcccgacacaatctttcggaatagcaaaaccgctgaggcccattggattacaactcctaaccagctgctgcggatctggaacgacggcaagatcttatacacgttgagactgacaatcaatgcagaatgtcagctgcagctacacaatttccctatggatgaacacagttgccccctgatcttctcaagctatggctaccccaaagaagagatgatctatcggtggcgcaagaactcggtggaagcagctgaccagaaaagctggcggctttatcaattcgattttatgggtctccgaaataccactgagattgtgacaacaagtgccggcgattacgtagtcatgacaatctacttcgagttgtcccgacgaatgggttacttcacaatccaaacatatatcccttgcatactcaccgttgtactgtcatgggtttcattttggattaagaaggacgcaacccctgccaggaccgcactcggcatcaccacagtgctcacaatgactaccctgtccacaatcgctcgcaaaagcctgccccgcgtttcgtacgtgaccgcgatggacctgtttgttacagtgtgcttcctttttgtgtttgccgctctgatggagtacgcaaccttaaactactacagcagctgcaggaagcctactactactaaaaagaccacctcactgcttcatccagatagttccaggtggatcccagaacgtatttctctccaggcaccatcaaattattctctgctggacatgagaccgccaccaacggctatgatcactttgaacaattcagtgtattggcaggagtttgaagatacctgcgtgtatgagtgtctcgacggcaaggattgtcaaagtttcttctgctgctatgaagagtgcaagagcgggagctggagaaaagggagaatacacattgacatcttagagctggactcatactctagggtcttttttccaacaagtttcctgttattcaacctggtgtactgggttggttatctttacctttag

SEQ ID NO: 118067 - DNA, 1323 bp, synthetic construct
  misc_feature 1..1323: note = Description of Artificial Sequence: Synthetic coding sequence
  source 1..1323: mol_type = other DNA
atgaattactcactgcatctcgcattcgtgtgtttgagtttgtttacggaacgtatgtgtatccaaggatcccaatttaacgtcgaagtggggagatctgacaaactctctctcccaggattcgagaatctcaccgctgggtataacaagttcctgagacccaatttcgggggcgagccagtgcagattgccctaacactcgacattgcgagcatttcatccatatctgagagtaacatggactataccgcaacaatttatctcagacagcgctggatggaccagcggctcgtgttcgaggggaataagagtttcacactggacgctcgcttggtggagttcctctgggtgccagacacatatattgtggaaagcaaaaagagcttcctgcatgaagtgactgtgggtaatagactaatccgcctattctcaaacggtaccgtactgtacgccttacgcatcacgacgaccgttgcgtgcaatatggatttatccaagtaccctatggacacccagacctgtaagcttcagctggagagttggggctatgacggcaacgatgtagaattcacttggctccgagggaacgattccgtgcggggcctggagcatttacgtctggctcaatacaccatcgagagatatttcacgctcgtaactcggagccagcaagaaacaggcaattacacccggcttgttcttcaattcgaactgcggcgaaatgtgttatatttcatacttgagacgtacgtccccagtacattcctggttgtcttgagttgggtgagcttttggatctcactagactcggtaccagcacggacatgcataggagtcacaactgttctgtccatgacaaccctcatgatcggctcgcggacatccctacctaacactaactgtttcattaaagccatcgacgtgtatctcggcatatgtttttctttcgtctttggggcgctactggagtacgccgtggcacattactcttcgcttcagcagatggccgctaaggacagagggacaactaaggaggttgaggaggtgtctataactaacattattaacagcagcattagttcgttcaagagaaaaatctcctttgcctccatcgaaatttcgtccgacaacgtggactactctgacctgaccatgaagactagcgacaaatttaagtttgtctttcgtgaaaagatgggcagaattgtggactattttactattcaaaaccctagcaatgtagatcactatagtaaattgctgtttccgctgatttttatgctggccaatgtcttttactgggcctattacatgtatttttag

SEQ ID NO: 118068 - DNA, 159 bp, synthetic construct
  misc_feature 1..159: note = Description of Artificial Sequence: Synthetic coding sequence
  source 1..159: mol_type = other DNA
atgaattattcgttacacttggcttttgtttgtctgtccttgttcacagaaagaatgtgcatccaaggaagccaatttaatgttgaggtcggaaggtctgataagttaagcctacccgggttcgagaatttgaccgccggttataacaaattcctctag

SEQ ID NO: 118069 - DNA, 1323 bp, synthetic construct
  misc_feature 1..1323: note = Description of Artificial Sequence: Synthetic coding sequence
  source 1..1323: mol_type = other DNA
atgaactattccctgcatctggcctttgtatgcctgtctctatttaccgaacgcatgtgcattcagggatcacagttcaacgtggaagtaggcagatccgataaactttctttaccgggtttcgagaacctgaccgctgggtataacaagttccttcgcccgaattttggcggcgagcccgttcagattgccctgaccctagatatcgcatctatcagctctatcagtgaatcgaatatggactatacagcaactatttatctgcgccaaaggtggatggaccagcggttggtgttcgaagggaataagagtttcacactggacgcccgactggtggagttcctgtgggttcctgatacctacatcgttgagagtaaaaaatctttcctacacgaagtcaccgtgggcaaccggctgataaggctcttttcgaatgggacagtcctttacgccctgagaatcactacaaccgtggcatgtaatatggatctcagcaaatatccgatggatacccagacctgcaagctgcagctcgagtcctggggttacgacgggaatgatgtggagtttacttggctccgcgggaacgatagcgtgcgcggactcgagcatctgcgtcttgctcagtacactattgagaggtactttacattggtcaccagaagccagcaagagactgggaattacacaagactggtgctccagtttgaacttcggcgcaacgtgctgtatttcatattagaaacttatgtgccctcaactttcctggtagtgctgagctgggtcagcttctggatctccctggacagtgttccagcgcgcacatgcattggagtgacaacagttctctctatgaccactctgatgatcggatcacgaacaagcctccctaacacaaactgcttcattaaggcaatcgacgtttatctgggcatctgcttctcattcgtttttggtgcactgctggagtatgcagtcgcccactattcatctttgcagcagatggcagcaaaagaccgaggaaccaccaaagaagtggaggaggtctcaatcaccaatatcattaatagtagtataagttccttcaagaggaagatcagtttcgccagcattgaaatcagttctgataacgtcgattacagtgatctgacgatgaaaaccagcgataaatttaagtttgtttttagagaaaaaatgggccgtatcgtggactatttcaccatccaaaatccgagtaacgtggaccactactcaaaacttctgtttccccttatcttcatgctggctaatgtcttttattgggcatactatatgtatttctag

SEQ ID NO: 118070 - DNA, 180 bp, synthetic construct
  misc_feature 1..180: note = Description of Artificial Sequence: Synthetic coding sequence
  source 1..180: mol_type = other DNA
atgaactattcacttcacctcgcctttgtgtgtctctctctattcactgaacgtatgtgtatccagggatctcagtttaatgttgaagtcggcagaagtgacaagctgtcccttccagggttcgagaatttgacagcaggttataacaagttcttgcgcccaaacttcggtggtgaatag

SEQ ID NO: 118071 - DNA, 279 bp, synthetic construct
  misc_feature 1..279: note = Description of Artificial Sequence: Synthetic coding sequence
  source 1..279: mol_type = other DNA
atgaattattcactccatctggcttttgtctgcctgtccctcttcacggaacgcatgtgcatccaaggatcccagtttaatgtggaggtagggagatcagataagctcagcttacctggattcgaaaacctaacagcagggtataataagtttcttcgtcccaactttggaggtgagcctgtgcagattgcactcactttggacatcgcaagtatctcctccattagtgaatccaacatggactataccgccactatctatctgagacagcgctggtag

SEQ ID NO: 118072 - DNA, 516 bp, synthetic construct
  misc_feature 1..516: note = Description of Artificial Sequence: Synthetic coding sequence
  source 1..516: mol_type = other DNA
atgaattatagcttgcacctggctttcgtgtgtctgtcactctttacagaacgcatgtgcatccaggggtcccagtttaatgtcgaagtgggaaggtcggataagctgtccctgcctggattcgagaatctgaccgcggggtataataaatttctgcgcccaaactttggcggggaacccgtccagatcgctctgactctggacattgctagtattagttccatctctgagagtaacatggattatacagcaactatttacctgagacagcggtggatggaccagcggctcgttttcgagggcaacaagtccttcacacttgacgcccggctagtcgaatttctgtgggtgcctgacacatatattgttgagagcaagaagtctttcctgcatgaggtgactgtcgggaacaggctcatccgtctgttctcaaatggtaccgttctttacgccctgagaattacaacaactgtggcctgcaacatggacttgtcaaagtacccaatggacacgtag

SEQ ID NO: 118073 - DNA, 570 bp, synthetic construct
  misc_feature 1..570: note = Description of Artificial Sequence: Synthetic coding sequence
  source 1..570: mol_type = other DNA
atgaattacagcctccatttggctttcgtctgtttaagcctcttcaccgaacggatgtgtatccaaggttctcaattcaacgtggaagtgggacgtagcgacaaactcagcttacccggctttgaaaacctgacggcagggtacaacaagtttctgagacccaactttgggggcgagccagtgcagatagccctgacgctggacatagcaagtataagctcaatttctgagtctaatatggactacaccgctaccatatatttacgtcagcggtggatggatcaacggttggtattcgagggcaataagtctttcactctagacgctaggctcgtggagttcctgtgggttcccgatacttacatcgtggaatccaaaaagtcttttctgcatgaagtgaccgtgggaaataggcttattcggctgtttagtaatggtacagtcctatacgctttgcgaattacaaccaccgtcgcctgcaacatggatctgagcaaatatccaatggatacgcagacctgcaaattacaactcgagtcttggggttatgatgggaatgatgtggagtag

SEQ ID NO: 118074 - DNA, 564 bp, synthetic construct
  misc_feature 1..564: note = Description of Artificial Sequence: Synthetic coding sequence
  source 1..564: mol_type = other DNA
atggattataccgctacaatttacctccggcaacggtggatggaccaaaggctggtgtttgagggtaacaagtccttcaccctggacgaagtgacggtggggaatagattgatacgcctattctctaacgggacggtcctgtacgccttgaggatcaccactaccgtagcctgcaatatggacttatctaaatatcccatggacactcagacctgcaagctgcaattggagagttgggggtatgatggtaatgatgttgaattcacttggttacggggaaatgactccgttaggggcctcgaacacttacgacttgctcagtacaccatcgaacggtatttcaccttagtcactagatcgcaacaggagaccggaaactacactaggctcgtgctccaattcgagctgagacgcaatgtactctattttatcctggaaacctatgttccttccacctttctggtggtactctcgtgggtgtctttttggatttcacttgattctgtgcctgcccggacctgtatcggtgataataagggaagtcgacgatctcaatactattag

SEQ ID NO: 118075 - DNA, 2826 bp, synthetic construct
  misc_feature 1..2826: note = Description of Artificial Sequence: Synthetic coding sequence
  source 1..2826: mol_type = other DNA
atggcctccccaaggtcctctggacagcccggcccgcccccgccaccaccccctccacctgcacgtctgctgcttctgctgctgctaccacttctcctcccgctggcccccggggcttggggttgggctcggggcgctccacggcctccaccttcctccccacctctcagcattatgggactgatgcctctgaccaaggaggttgcaaaagggtcaatcggacggggcgtgctgcctgccgttgagctggctatcgagcagattcgcaacgagtcactgctgcggccatacttcctcgatttacggctgtacgacaccgagtgtgacaatgcaaaggggttaaaagccttttatgatgcgatcaaatatggaccaaatcatctgatggtgttcggaggtgtgtgtccaagcgtgacctctatcatcgccgagagtttacagggttggaatctggtccagttgtcttttgcagccaccaccccagttctcgctgataagaaaaaatacccttacttctttagaactgtgccttccgacaatgccgtaaaccctgccatcctgaaactactaaagcactaccagtggaaacgagtgggaactctaacccaagatgtgcagcggtttagcgaggtaagaaacgatctgacaggtgtgctgtacggtgaggatattgagatctcagacactgaaagcttttctaatgacccttgtacaagcgttaaaaagctgaagggtaacgacgtgagaatcattttgggacagttcgaccagaatatggctgccaaggttttctgctgtgcttacgaggagaacatgtatggctccaaatatcagtggatcatacctggttggtacgaaccttcctggtgggagcaggttcacaccgaagccaacagctcacggtgcttacgcaaaaatctccttgcagccatggagggctacattggggttgacttcgagccactgtcaagtaagcagattaagaccatatccggtaaaaccccgcaacagtacgagagagagtataacaacaaaagatccggggtgggcccttctaagttccacggctacgcctacgacggcatctgggtgatcgctaagaccctacagcgtgctatggagacacttcatgcctcctcacggcaccaacggatccaggactttaattacacagatcatacactcggaaggattatccttaacgctatgaacgagacaaacttcttcggggtgaccggacaggtggtctttcggaatggcgaacgcatggggaccatcaagtttacccaatttcaagattcccgcgaggtgaaagtgggcgaatacaacgcagtcgcagatacactcgaaatcattaacgacaccattcgctttcagggctccgaacccccgaaggacaagaccatcatccttgaacagctccgcaaaattagtctccccctgtattctatcctctctgccctgactatactaggcatgatcatggcgagcgccttcctgttctttaacattaagaataggaaccagaagctaatcaagatgagctctccatatatgaacaatctcatcatcttgggcgggatgctttcgtacgccagcatcttcctgtttgggctcgacggttctttcgtctctgaaaagactttcgagaccctgtgcacagtgcggacatggatactcaccgttggatatacaacagcctttggcgccatgttcgccaagacttggagggtccacgctatcttcaaaaacgtcaaaatgaaaaagaaaattattaaagatcagaaactcctcgttattgtggggggtatgctgctcatcgatctttgtatcctcatttgctggcaggccgtggacccgctgagaaggaccgtcgagaagtactccatggaaccagatcctgccgggcgggacatttcaataagacctctcttggagcattgtgaaaacacccatatgacaatttggctaggtatagtttacgcatacaagggcctcctgatgctgttcggatgttttctggcatgggagacgcgcaatgtcagcatccctgccctgaatgattcgaaatatataggtatgagtgtctacaatgtgggcatcatgtgtattattggcgccgctgtttcatttcttactcgagatcagccaaatgtgcagttttgcatcgtggctttagttatcatcttctgttccacaatcaccttatgtctagtttttgtccccaaactgatcactcttcgcaccaatcccgacgcagccacccaaaatcgcagatttcaattcactcaaaaccagaagaaggaggatagcaaaactagtacatcagttacatccgtgaaccaggccagcacatcccgcctggagggccttcaatccgagaatcatcggcttagaatgaaaatcacagaattggacaaagacctggaggaggtgaccatgcagctgcaggacacaccagagaaaaccacttacatcaagcagaatcactatcaagaactgaacgacatcctgaatttgggcaattttactgagtcaactgacggaggcaaggctatactgaagaaccaccttgaccagaacccacagctacagtggaacacaacggagccgtcccggacttgcaaggaccccattgaggacatcaatagtcctgagcatattcagcgtaggctatcactccagctgcccatcctgcaccacgcctatctgccctccataggaggggtggacgcaagctgcgtctccccttgtgtgtccccaacagcttccccgaggcacagacacgtgcccccgtcatttagagtgatggtttccggcttatag

SEQ ID NO: 118076 - DNA, 1179 bp, synthetic construct
  misc_feature 1..1179: note = Description of Artificial Sequence: Synthetic coding sequence
  source 1..1179: mol_type = other DNA
atgcggcctggcttcgggggtcccgccatccccgtcggggtggacgtgcaagtggagagtctggatagtatatctgaagtagacatggacttcaccatgaccttgtatctgagacattattggaaagacgaacggctgtctttcccctccaccaacaatctgagtatgacgtttgacggcagactagttaagaagatttgggtaccagacatgtttttcgtccactctaaacgatcatttattcatgacaccaccacagataacgtaatgctgagagtccagccagacggcaaggtgctgtattctctgagggtgaccgtcaccgctatgtgtaatatggacttttccaggtttcctctcgacacacagacatgtagcctggaaatcgaaagttacgcttatacagaggatgatctgatgttgtactggaagaaggggaacgactccctcaagacagatgagaggatatcgctgagtcagtttcttattcaggaattccatactacaacaaaactggctttttacagctctacagggtggtacaatcgcctgtatatcaactttacactccgacgccacatttttttctttcttttgcaaacctattttcctgccacattgatggtaatgctttcctgggttagtttctggatcgataggcgcgcagtgccagcacgggtcccattaggaatcaccaccgtgctgacaatgtccaccatcattacaggcgtgaacgcatccatgccgagagtgtcttatataaaggctgtcgacatctacctatgggtcagtttcgtgttcgtgtttttgagtgttctggagtacgccgccgttaattatctaacgacagtacaagagcgaaaggagcagaagctcagagaaaaacttccatgtacttctgggttgccaccccctagaacagccatgcttgatgggaactattcagatggcgaggtgaatgatctggataattacatgccagagaacggcgagaaaccagaccgcatgatggttcagctaaccctcgcctcagagaggagctctccacaacgaaagagccaaagatcttcatatgtttctatgcgcattgacacgcatgccatcgataaatattcaaggatcatatttcccgccgcctacatcctgttcaacttgatctattggtctattttcagctag

SEQ ID NO: 118077 - DNA, 1389 bp, synthetic construct
  misc_feature 1..1389: note = Description of Artificial Sequence: Synthetic coding sequence
  source 1..1389: mol_type = other DNA
atgctggctgtgcctaatatgcgcttcggaatattcttgctctggtggggctgggtgcttgcgaccgagtctcgcatgcattggcccggaagagaagttcatgagatgagtaaaaagggcagccccattcttagaaggtcccccgatattacaaaatcccccctgaccaaaagcgagcaactgctgcgcatcgatgatcacgatttctcaatgcgaccgggattcggcggccccgctattcctgtgggcgttgatgtccaggtggagagcctggactctatttcggaggtcgacatggacttcactatgacgctttaccttaggcactactggaaggatgaaaggctgtcatttccttctactaataatctgtcaatgacattcgacgggagactggtgaagaaaatctgggtcccggacatgtttttcgttcatagtaagcgctcctttatccatgatacaactactgataatgtcatgttaagggtgcaaccggatgggaaagtgctctactccctccgggtaaccgtgacagccatgtgtaacatggacttctcccgattcccccttgacacacagacctgttccctggaaatcgaaagctacgcttacaccgaggacgacctcatgctctactggaaaaagggtaacgacagtttaaaaacagatgagaggatcagtctgtcgcaattcttgattcaggagttccatactactaccaaactagccttctacagcagcaccggttggtataaccgcctttacataaacttcactttgcggcggcatatattctttttcctgctccaaacatatttcccagctactttgatggtcatgctgtcctgggtgtccttttggattgacagacgggcggtcccggcacgcgtgcccttgggcattaccacagtgctgaccatgtccactatcatcaccggggtcaatgcttctatgcctcgggtcagttacatcaaagctgtcgatatctatctgtgggtgagcttcgtctttgtcttcctttcagtgttggaatacgccgctgttaactacctcaccaccgtgcaggaaagaaaagaacaaaaacttagagagaagctgccctgtaccagcggactgccacctccccggactgccatgctagatggaaactactctgacggggaggtgaatgacttggataattacatgcccgagaacggtgagaaaccagaccggatgatggtgcagttgactctagctagcgaaagaagctccccccaacgtaagtcccagagaagctcatacgtgtccatgaggatcgacacccatgcgatcgataagtattccagaattattttccccgccgcctatatcctgtttaatctgatctattggtccatttttagttag

SEQ ID NO: 118078 - DNA, 1179 bp, synthetic construct
  misc_feature 1..1179: note = Description of Artificial Sequence: Synthetic coding sequence
  source 1..1179: mol_type = other DNA
atgcgcccgggattcggagggcctgcgatacctgtgggggtcgatgtacaggtggaaagtctggactctataagtgaggtggatatggattttacaatgacgctgtacttgcgtcattattggaaggatgagagattgagctttcctagtaccaacaacctgagcatgaccttcgatggccgcctcgttaagaagatttgggtacccgatatgttttttgtgcatagcaaacgctcctttatccacgatacaactacagacaatgttatgctgagagttcagccagatggcaaggtgttgtattcgctgcgggtgacagtcactgccatgtgcaacatggacttttcaagattcccactggacacgcagacatgcagccttgagatagagagttacgcttacacagaagatgacctgatgctgtactggaagaaaggcaatgattctctcaagacagacgagcggattagtctgagccagttccttatacaggagttccacacgacgactaaactggctttctatagctcgacaggatggtataacaggctgtatataaactttacactgcgccgtcatatcttctttttcctactgcagacttattttcccgctacccttatggtgatgctgtcgtgggtatctttttggatcgatagacgtgccgtccctgcacgcgtgccacttgggatcacaactgtgctaaccatgagtacaattattactggagtgaacgcaagcatgcctagagtgtcctacatcaaagctgtcgacatttatctctgggtgtcgtttgttttcgtgttcctgagcgtcctggagtacgctgcagttaattatctgactacggtgcaggaacgtaaagagcagaaattgcgcgaaaaattgccctgtacaagtggtctcccccccccgaggaccgccatgcttgacgggaattactccgatggcgaggtgaacgacctggacaactatatgcctgagaatggggaaaagcccgatcgcatgatggtacaattgaccttggccagcgagagatccagcccccagagaaagagtcaaaggagttcttatgtgtctatgcgcattgacacccatgccatcgacaaatacagcaggatcatctttcccgcagcctatatattatttaacctcatttactggagcatcttcagttag

SEQ ID NO: 118079 - DNA, 1440 bp, synthetic construct
  misc_feature 1..1440: note = Description of Artificial Sequence: Synthetic coding sequence
  source 1..1440: mol_type = other DNA
atgctggccgtgccaaacatgcggtttggtattttcttgctgtggtgggggtgggtgctggctacagagtctaggatgcactggcccgggcgcgaagtgcacgagatgtcaaaaaagggtcgtcctcagcgccagagaagagaggtgcatgaggacgcacacaagcaggtgtctcccatcctgcggaggagtcccgacatcacaaagtcgcctttaacaaaaagcgagcagttattacggatcgatgaccatgacttctccatgaggccgggctttggcggaccagctatcccagtgggagttgatgttcaggtggagtccttggactcgatatcagaggtggatatggatttcacgatgaccctgtacttgcgccactattggaaggacgagcggctgtccttcccaagcactaataatctgagcatgacctttgacggccgcttagtgaagaagatctgggtgcctgatatgttttttgtccactctaaacggtcattcatccacgatacaaccacagataatgtgatgctccgggttcaacctgacggaaaggtgctgtactcccttcgtgtgacggtaacggccatgtgtaacatggacttctcccgctttcctctggacacacagacatgcagccttgaaatagagtcttacgcctatactgaggatgacttaatgctctactggaagaagggcaacgatagtctgaaaacggatgagcgaatctcattatctcagttcctgatccaggagtttcacacgactaccaagctggccttttacagctcaacggggtggtacaatcgattgtacatcaacttcaccctccgaaggcatattttcttctttcttctgcagacatatttcccggctaccctgatggtgatgttatcctgggtgagcttttggattgaccggcgtgcagttccagccagagtacctctcgggattactacagtcctgactatgagcaccataatcacaggggttaacgcttctatgccccgtgtgagctatatcaaggccgtagacatatatctgtgggtgagctttgtttttgtgtttcttagcgttttagagtatgccgcagtcaattatcttaccacagtgcaggaacggaaggaacagaaattacgcgagaagctaccctgtacatctggtctccctcccccccggactgccatgctggatggcaattactcagacggtgaagttaacgacttggataactatatgcccgagaatggtgaaaaacccgacagaatgatggtgcagctgactctcgcctcggagagatcctctccccaaagaaagtcgcagagatcctcatatgtctcaatgaggattgatacccatgctattgataaatacagtcgaatcatattccctgcagcatacattctgtttaatttgatctactggagcattttcagttag

SEQ ID NO: 118080 - DNA, 1473 bp, synthetic construct
  misc_feature 1..1473: note = Description of Artificial Sequence: Synthetic coding sequence
  source 1..1473: mol_type = other DNA
atggtcaagcccggaggaatctgcagtgctaccggctactggaaggcagcattttgtctcacggacgtccacaaaatgccgtacttcacgcgactcatcttatttctgttttgcctgatggtgctggtggagtcaagaaaaccaaagcgaaaacgctggaccgggcaggtagagatgccaaagcccagtcatctgtataagaagaacctcgacgtgaccaagattcgcaaagggaaaccccagcagctcctgcgcgtcgatgagcatgatttcagtatgaggcctgcttttggagggcccgccatccctgtgggcgtggacgtgcaagtagaaagtttagattcaatatctgaagtggatatggatttcacaatgacactctacctccgccactattggaaggacgagagactggcattctcatctgctagtaataagtcaatgacattcgatggtaggctggtgaaaaagatctgggtgccggatgtattcttcgttcattctaagcgttccttcacccatgacaccaccacggacaatattatgctcagggtcttccctgacggacacgtactgtattccatgcggataaccgtgacagcgatgtgtaatatggacttctcgcatttcccactggacagtcagacatgttcattagaactggagtcttatgcgtatactgacgaagacttaatgctttattggaaaaatggcgacgaatctctgaagaccgacgaaaaaatctccctgagccagttcctgattcaaaagtttcacacaacgtctcgtctggctttctacagttccacaggatggtacaacagattgtacatcaatttcaccctgcggcgacacatttttttttttctactgcagacttactttccagcaaccctgatggtaatgctctcctgggttagcttctggatagacagaagagccgtgccagctcgtgtcagtctgggaattactacggttctgactatgaccactataatcacgggggttaacgcgtcaatgccccgggtaagttacgtgaaggccgtggatatctacctctgggtgagcttcgtgtttgtgttccttagtgtgctcgagtacgcagcagtgaattatctcaccaccgtgcaggaaaggaaagaaaggaagctccgcgagaagttcccatgcatgtgtgggatgctgcacagcaaaacaatgatgttggatgggtcctactccgagtccgaagcaaattctctcgctgggtacccccggtcacacattttgacagaagaggagcggcaggacaaaattgtcgtgcatctcggcttaagcggcgaggccaatgccgcccgtaaaaagggattactgaaggggcagaccggttttcgtatctttcagaacacacacgcaatagacaaatactcccgcctgatcttcccagcaagttatattttttttaacctcatctactggtcggtgttcagctag

SEQ ID NO: 118081 - DNA, 453 bp, synthetic construct
  misc_feature 1..453: note = Description of Artificial Sequence: Synthetic coding sequence
  source 1..453: mol_type = other DNA
atgcttcgcgccgctgtcatccttctactcattaggacttggctggcagaaggtaactaccctagtcccatcccgaagtttcactttgagttttctagcgcagtcccagaggtggtgctgaatctatttaactgtaagaactgtgcgaacgaagccgttgtacagaagatcctagaccgggtgttaagtcgttacgatgttcggcttcgtcctaatttcggaggcgtacttgaaactaactccacgtggggcctcaacgacgacgagctaatggcacatggccaggagaaagattcgtcatccgaaagcgaggacagctgccccccttctcctgggtgtagcttcaccgaaggctttagctttgatctgtttaatccggattatgtgcctaaagtggacaagtggtccaggttcttgttcccgctggccttcggtttatttaacatcgtgtag

SEQ ID NO: 118082 - DNA, 1899 bp, synthetic construct
  misc_feature 1..1899: note = Description of Artificial Sequence: Synthetic coding sequence
  source 1..1899: mol_type = other DNA
atgggtatccggggcatgttacgcgctgcagtgattttgcttcttatcagaacgtggctcgccgaaggcaactatcctagccctatcccaaagtttcacttcgagtttagcagtgctgttcccgaggtcgtcctgaatttgttcaattgcaagaactgtgctaacgaagccgtggtacagaaaattctggatagagtcctgtcccgatacgacgtaagacttcgccccaatttcgggggggctcctgtcccagtgcgcatctcaatttacgtgacctccattgagcagattagcgagatgaatatggactacaccatcacaatgtttttccatcagacctggaaagacagccggcttgcttattatgaaacaaccctgaatctgactctagattaccgcatgcacgagaagctgtgggtgccagactgttacttccttaacagcaaagatgcctttgtgcacgacgtaacagtcgaaaacagggtcttccaactgcacccagacggcaccgtacgctacgggattagactgacgacaacggccgcctgtagtctggatctccataaatttccaatggacaagcaggcgtgcaatcttgtcgttgagagttatgggtacactgtcgaagacattatcctgttttgggatgataacgggaacgccattcatatgacagaggagttgcacattccacaattcacattcctgggccgcactatcacatctaaagaggtgtacttttatactggctcatacataaggcttatcttgaaattccaagtgcagagagaagtcaactcttatctggtgcaggtctactggcccaccgtgctgacgaccattaccagctggatctctttttggatgaattacgactcttcagctgccagggttactatcggacttacttctatgctgatactgacaacgatcgacagccacctaagagataaactgccaaacatttcatgtatcaaagccatcgatatctacatcctagtgtgcctgtttttcgtgtttctgtcccttctcgagtatgtgtacatcaattacctgttttacagtaggggcccgaggaggcagccccgtaggcataggaggcctaggcgggtcattgcaaggtataggtaccaacaagtggtggtgggaaacgtgcaggatggcctcattaatgtggaggacggcgtgtcttcactaccgataactccagcccaggcaccccttgcctcacctgagtcattgggcagtctgacttccacatcagaacaggcgcagttagccacctctgagagcctctctcccttgacatcactatcaggccaggctcctctggcgactggagaaagcctgtctgacctcccaagtactagcgaacaagcgcgccattcttacggcgtaaggtttaacgggttccaggctgatgatagcatttttcccactgagatacgtaaccgggtggaagcccacgggcacggggtaacacacgaccacgaagattcgaacgaatcactgtcctccgacgagcgccatggtcacggtccatcgggcaaaccaatgttacatcacggcgaaaagggtgtgcaagaggcagggtgggacctggatgacaacaacgacaaaagtgactgtttagccatcaaggaacagttcaagtgtgacacaaactccacgtggggccttaacgatgacgaactgatggcacatgggcaggagaaagactcctcttccgaatccgaggactcgtgcccaccttctccaggttgttctttcaccgaaggctttagctttgacctctttaacccggactacgtgccaaaggtcgacaaatggagcaggttcttgttccctctggcattcgggctgttcaatattgtatattgggtctaccacatgtactag

SEQ ID NO: 118083 - DNA, 1083 bp, synthetic construct
  misc_feature 1..1083: note = Description of Artificial Sequence: Synthetic coding sequence
  source 1..1083: mol_type = other DNA
atggatagctcaaactgtaaggtaatcgcgcctttgttgagccagagataccggcgaatggtaacaaaggatggccactccactcttcagatggacggcgcccagcgtggactggcctacctgcgggacgcatggggaatcctgatggatatgagatggaggtggatgatgctcgtattctctgcctcattcgtggttcattggctggttttcgctgtgctgtggtacgtcttagccgaaatgaacggtgatctggagctggaccacgacgccccgcccgagaaccacaccatctgcgtaaaatacatcactagtttcactgccgccttcagtttcagcctggaaacgcagttgaccataggatacgggacaatgttcccgagtggggattgcccttctgctatcgccctgttagccatccagatgctgctgggcctcatgttagaggcttttattacaggcgcatttgtcgctaagatcgccagacccaagaacagagcgtttagcattaggttcacagacactgcagtcgtcgctcacatggacgggaaaccaaatctgattttccaagtagctaatacacgtccatctccattgacctcagttagagtaagcgcggtgctttatcaagagagagagaacggtaaactctaccaaacttctgtggattttcaccttgatggcatctctagcgacgagtgtccattcttcatctttcctctgacctattaccactctataacaccaagctccccattggctaccctcctgcaacacgaaaacccgtcccactttgagctggtggtttttctgagcgctatgcaagaaggaactggcgagatttgccaacgcaggaccagctatttgccgagcgagatcatgctacatcactgctttgcatcgttgttgactcgcggttctaagggcgagtaccagatcaaaatggaaaactttgataaaaccgtgcctgagttccccacaccactcgttagtaaatccccaaatcgaactgatttggatatccacatcaatggtcagtctattgataactttcagatctcggagacagggttgaccgagtag

SEQ ID NO: 118084 - DNA, 2106 bp, synthetic construct
  misc_feature 1..2106: note = Description of Artificial Sequence: Synthetic coding sequence
  source 1..2106: mol_type = other DNA
atggctgtctcagccggctcggcacggacgagcccctcaagcgggtttctgatggttctggatataccccaggaaagagggctgagtagtctcgacaggaagtacctggatggtcttgatgtgtgccggttcccgctattagacgcattgagaccccttcctttagactggatgtatctggtgtatacaattatgttccttggcgccctgggcatgatgcttgggctgtgctataggataagctgtgttctgtttctccttccctattggtatgtgtttcttctcgacaaaacaagttggaataaccacagttacctttacggcctactggcgttccagttaaccttcatggatgccaatcactactggtcggtagatgggctgctgaacgcccaccggcggaatgcccatgtgccactgtggaattatgcagtgctgcggggtcagattttcatcgtctatttcatcgcaggcgtaaaaaaactggacgcagactgggtggagggctactccatggaatatctgagccggcattggctattttccccttttaaattactcctcagcgaggagcttacctcgctgctggttgtccattggggcggactactgctggacctgtcagcggggttcctgttattcttcgatgtgagcaggtcgattgggctgttcttcgtgtcctacttccactgcatgaactcacaactcttcagcatcggcatgttttcgtacgttatgctggcaagcagccccctgttttgttctcctgaatggcctaggaagctggtgtcctactgtccccgcaggttgcagcagttattgccgttgaaggccgccccccaaccaagtgtgtcttgcgtctacaagcggagccgcggcaaaagcgggcagaagcctggacttagacatcagttaggagctgcctttacgctgctgtacctactggaacagctcttcctgccgtatagtcacttcctgacacaaggttataataactggaccaatggactgtatggatactcttgggacatgatggtgcattcacgttctcaccagcatgtgaagatcacttatcgggacggacggaccggggagttagggtatctcaatccaggagtattcacccaaagtcgccggtggaaagatcacgccgatatgctaaagcagtacgctacctgtctctctaggcttttgccaaagtacaatgtcacagagccacagatttactttgacatttgggtgtccattaacgaccgcttccagcagagaattttcgacccccgggtggatattgttcaggccgcatggagcccttttcagagaacctcctgggtccaacccctgctaatggatcttagcccctggagggccaaactccaagaaataaaatccagtctggacaatcataccgaggtcgtgtttatcgccgactttccgggactccacctcgagaacttcgtttcagaggacctgggcaacaccagtattcagctgctacagggggaggttacggtcgaactagtggcagagcagaaaaatcagacgctgcgggaaggggagaagatgcagctgcccgccggggaatatcacaaagtgtacacaacttcccctagtccttcatgttatatgtacgtatacgtcaatacgacagagctggctctggaacaggatctcgcctatctccaggagctgaaagagaaagtggagaatggatccgagactggtccattgcctcccgaactgcagccactgctcgaaggagaggtgaagggtggccccgaacctacacctctggtacagacctttcttagaagacaacaacggctccaagaaatagagaggcggagaaatacaccatttcacgaaaggttttttagattcctgctgagaaagctgtatgtgttcaggcgcagttttctcatgacttgtattagtctgcggaacctgatcctgggcagacctagcctagagcaactggcccaggaggtaacctacgctaatttaagaccgtttgaggcagtaggagaattaaatccatccaacacagactcctctcactcaaatccacccgaatctaatcctgaccccgttcatagcgaattctag

SEQ ID NO: 118085 - DNA, 957 bp, synthetic construct
  misc_feature 1..957: note = Description of Artificial Sequence: Synthetic coding sequence
  source 1..957: mol_type = other DNA
atggcttcccccggatgtttgctatgtgttctaggcctgctgctctgcggagccgcttccctggagcttagtaggccacacggggatacagctaaaaagcccatcatcggcattcttatgcagaagtgtaggaataaggtcatgaaaaactacgggcggtattatatcgccgcatcttacgtcaaatacctcgaaagcgctggagctagggttgtccctgtgcgccttgacctcactgagaaggattacgaaatcttgtttaagtcaattaacggcatcctttttccaggaggtagcgttgacttacggcgctccgactacgcgaaggtcgcaaagattttctataacttatctatccagtctttcgacgacggagactatttccccgtttgggggacttgtcttggcttcgaggaattgagtctgctgattagcggagaatgtctgctgaccgccacagacaccgtggatgttgctatgcctctgaactttaccggaggacagttgcattcacgaatgttccaaaacttcccaactgagctactgctgtccctggctgtggaaccactgaccgccaacttccataaatggagcctctccgtcaaaaacttcactatgaacgagaagctcaaaaagttttttaatgtgctgaccaccaacaccgatgggaagattgaatttataagtaccatggaagggtacaagtaccccgtgtacggcgtccaatggcaccccgaaaaagccccctatgaatggaagaaccttgatggaatcagccatgcgccaaatgctgtaaagactgctttttatttggcagagttcttcgtgaacgaagctaggaagaataaccaccactttaaatccgaatctgaagaggaaaaagccttgatctatcagttttcaccaatctacacaggaaacatctctagcttccagcaatgttacatctttgactag

SEQ ID NO: 118086 - DNA, 345 bp, synthetic construct
  misc_feature 1..345: note = Description of Artificial Sequence: Synthetic coding sequence
  source 1..345: mol_type = other DNA
atggccaatagcggctgcaaagacgtgaccggcccagacgaggaaagctttctctacttcgcctacggtagcaacctcttaacagagcgaatccatctgcgcaacccgagcgccgcgtttttttgtgtggcacgactgcaggattttaagctcgattttggtaattcccagggcaagacttcacagacttggcatggggggattgcgacaatcttccagtctcccggcgacgaggtttggggggttgtctggaagatgaacaaatccaacctgaatagtctggacgaattattcgcctgggtgcaaaaaaagatggtctgtaggtggtccatcaaaagaagttag

SEQ ID NO: 118087 - DNA, 567 bp, synthetic construct
  misc_feature 1..567: note = Description of Artificial Sequence: Synthetic coding sequence
  source 1..567: mol_type = other DNA
atggctaacagcgggtgcaaggatgttaccggaccagatgaagagtcttttttgtacttcgcttatgggagcaatctcctgaccgagcgaatccacttacgaaatccaagcgctgcatttttttgcgtcgcgcggctccaggatttcaagttggactttggaaactctcagggaaagacctcgcagacctggcacggtggtatcgccaccatattccagagccctggagacgaagtctggggagtagtgtggaaaatgaacaaaagtaatcttaactccctggacgaacaggagggtgtcaaaagcggaatgtatgtagtcattgaggtgaaggtggcaacacaggagggcaaagagatcacctgtcgatcttacttgatgacaaattatgagtccgctcctcctagcccacagtataaaaagattatctgcatgggggcaaaagagaacggcctccctcttgaatatcaggaaaagcttaaggccattgagcccaacgactacacaggtaaggtttccgaagagatcgaagacattattaagaaaggggaaacccagaccttatag

SEQ ID NO: 118088 - DNA, 384 bp, synthetic construct
  misc_feature 1..384: note = Description of Artificial Sequence: Synthetic coding sequence
  source 1..384: mol_type = other DNA
atgttcaacccgatccaccatttggactactataaaaagacccttccttctgaactgaactggttggggcagatgtggttgaaatttgggtgctctggtttccgccaggagggtgtgaaaagcggtatgtatgttgttatcgaggtgaaagttgcaacacaggaaggaaaggagattacttgtcgttcatatctgatgacaaattacgagtccgcccccccctcccctcaatataagaagatcatatgcatgggtgccaaggagaatggcctgcccctggagtaccaagagaagttaaaggcgatcgagccaaacgactacacaggtaaggtttccgaggaaatagaagacatcatcaaaaagggagaaacgcaaacgctctag

SEQ ID NO: 118089 - DNA, 285 bp, synthetic construct
  misc_feature 1..285: note = Description of Artificial Sequence: Synthetic coding sequence
  source 1..285: mol_type = other DNA
atggccaacagcggatgtaaggacgtaacaggcccggatgaggagagctttctgtattttgcttacggctccaacctgttgaccgaacggattcaccttaggaatcccagtgctgctttcttctgcgtggcccgcttgcagatcatttgcatgggggctaaggaaaatggtctgcctcttgaatatcaggaaaaactcaaggctatagagcctaacgactataccgggaaggtatctgaggagatagaggacataatcaaaaaaggggagacccagaccctctag

SEQ ID NO: 118090 - DNA, 501 bp, synthetic construct
  misc_feature 1..501: note = Description of Artificial Sequence: Synthetic coding sequence
  source 1..501: mol_type = other DNA
atggccaactccggatgtaaagacgtaactgggccagatgaggaatccttcctgtattttgcctatgggtcgaatcttctgacagaacggatccacctcaggaacccctccgcggcatttttttgcgtggcccgcttgcaggactttaaactggattttggcaattcgcaggggaagaccagccaaacgtggcatggtggaatcgcaactatctttcagtcccctggtgacgaagtttggggcgttgtctggaagatgaataagtctaacctgaacagcttggatgaatggagaaagaagaggcacactgctttccaaaatcagggaaatcatccctgtaagcacaagacaaggatgtgggaccgcgatcctaagatcccggtgcagaacttatccctggccttatgttggcaggcgcaatcagggcatggaacttgcaatcgcttattcgcttgggtgcaaaaaaagatggtttgcagatggtctattaagcgatcctag

SEQ ID NO: 118091 - DNA, 1710 bp, synthetic construct
  misc_feature 1..1710: note = Description of Artificial Sequence: Synthetic coding sequence
  source 1..1710: mol_type = other DNA
atgaagaagaaacttgtcgtgctcggattactggccgtggtgctggtgctggtgattgtcggcctatgcctgtggctgccatctgcctctaaagaaccagataatcatgtatacacaagagccgcagttgccgccgatgctaaacagtgctcaaaaataggtcgggatgcactgcgggatggcggcagcgccgtcgatgctgccattgccgcactgctttgcgtgggtttaatgaacgcacactccatggggatcggtggtggccttttccttacaatctacaacagcacaactagaaaggcagaagtaattaacgcccgggaagtggcacctcggctggcatttgcaactatgttcaattcctccgagcaatcacagaagggggggctgtcggttgccgtgccaggggagatcaggggctacgagctggctcaccagaggcacgggaggctgccttgggcaaggctttttcagccatcgatacaattagcacgtcagggtttccctgtgggcaagggtttagccgcggccctggagaacaaaaggaccgtcatcgagcagcagcctgtcctgtgcgaagtattctgccgggaccggaaagtgctgcgagaaggtgagaggttgaccctgccccagcttgcagacacctatgagacattggctatagagggtgcccaggctttctacaacggatcattgactgcgcagatagtcaaggatatccaagcagctggcggaatcgtgacagctgaagatctcaataattaccgtgccgagttaatcgaacacccccttaatatctccctcggagacgtcgtcctgtatatgccttcggctcccctgagcggtccagttttggcgttgatcctaaatattctgaaaggctataatttttcccgagaatctgttgagtcaccggaacagaagggtttgacgtaccataggattgtcgaggcattcaggtttgcttacgctaagcgcaccctgctgggagaccccaaatttgtcgacgtgaccgaggtcgtgaggaacatgacctccgaattttttgccgcgcagttgcgcgcccaaatttcggacgacacaactcatcctatctcatactacaagccagagttttacaccccagacgatggcggcaccgcccatcttagcgttgtcgctgaggatggcagcgctgtgagcgccacttccacaatcaacctgtatttcggctcaaaagtgcggtctccagtaagtggcatcctctttaataatgaaatggacgacttctcaagcccgagcataacaaacgaattcggagttccccccagccccgcaaattttatacagccggggaagcagccactctccagcatgtgccctacaatcatggtcggacaggacggacaggtgcgtatggttgtcggagccgctggcggaacacagattactacggcaactgccttagccatcatctataatctgtggtttggatacgacgtcaaaagggccgtcgaggagccccggcttcacaatcaactcctgcccaacgtgaccacggtcgaacgaaacattgatcaagcggtgactgctgcactcgagacccgacatcatcacacccaaattgcttcgacgttcattgctgtggtgcaggccatcgtcagaaccgccggcggatgggccgcagcctctgattcacggaaaggaggggagcccgccggctactag

SEQ ID NO: 118092 - DNA, 1710 bp, synthetic construct
  misc_feature 1..1710: note = Description of Artificial Sequence: Synthetic coding sequence
  source 1..1710: mol_type = other DNA
atgaaaaagaaactagtcgtcctgggccttctcgctgtggttcttgtcctcgtgattgtgggactgtgcttatggctcccaagtgcatcaaaagagccagataaccacgtatatactagggcagccgtagcggccgatgcaaaacaatgttctaaaatcggccgagacgccctgcgtgacggcggctcggccgtcgatgccgcaatcgccgctttgctatgtgtgggcctgatgaacgctcactccatgggaattggggggggtctgttcttgaccatatacaattctacaacaaggaaagctgaagttatcaacgcacgcgaagtcgctccaagactcgccttcgcaacaatgtttaacagttcagaacagtcgcagaaaggcggactttccgtcgccgtccccggggagatacgcgggtacgagctggcccatcagaggcacggaagactgccttgggcacgtctttttcagccatcaatccaactcgccaggcaggggttccctgtgggcaagggcctggcggcggcactggaaaacaaacggaccgtgatcgaacagcaaccagtcctgtgtgaagtcttctgtcgggatagaaaggtgttgcgtgagggagaacgattgaccctgcctcagcttgccgacacctatgaaacattggctatcgaaggcgcgcaagcattttataacggcagtttaactgcacagatcgtgaaggacattcaggctgctggaggaatcgtgaccgcagaggatctgaataactatagagcggaactgatcgagcaccccctcaacatcagcctgggtgatgttgtcctatatatgccgagcgcgcctctgtctgggccagtgctcgcactcatcctgaacattctcaaaggctacaacttctcacgagaaagcgtggaatcaccagagcagaagggcttgacctatcacaggattgtcgaagcctttcggtttgcctatgccaagcgtaccctgctgggggaccccaagttcgtggatgtgacagaagtggtccggaatatgacgagcgagttttttgccgcacagttaagggctcaaatttcagatgatactactcaccccatatcttactacaagcctgaattttacacccctgatgatggcgggacagcccatcttagcgttgtcgccgaagacggttctgctgtatcagctacttcaaccatcaatctgtatttcggatccaaggtgaggagccccgtgagtgggattctcttcaataacgaaatggacgatttcagtagcccaagcattacaaacgagtttggagttcccccttctccagcgaactttatccagccaggcaagcagccactttcaagcatgtgccccaccattatggtgggacaggacgggcaagtacgtatggtggttggcgctgctggagggacccagatcaccaccgcaaccgctctcgccataatttataacctgtggtttgggtacgacgtcaagcgggctgtggaagagcccagattgcataaccaactgctccccaacgtgactacggtggagcggaacatagaccaggccgtcaccgccgcgctagaaacaagacaccaccatactcagatagcatcaaccttcatagccgtggtgcaggccatcgtaaggaccgccggtggatgggccgcggccagcgatagccgcaaaggaggggagccggccggatattag

SEQ ID NO: 118093 - DNA, 1710 bp, synthetic construct
  misc_feature 1..1710: note = Description of Artificial Sequence: Synthetic coding sequence
  source 1..1710: mol_type = other DNA
atgaagaagaagttggtcgtactaggactgcttgccgtagtgctcgtgcttgttatagtagggctttgcctctggctgccatccgccagcaaagaacctgacaaccacgtttatacacgcgcggccgtcgcggccgatgcgaagcagtgttccaagattggcagggatgccttgcgggatggtgggtctgccgtcgacgccgccatcgcagccctgctctgcgtaggcctgatgaatgcccattcaatgggaattggtggagggttattcctgaccatctataatagcacaacccggaaggctgaagtgatcaatgcccgggaggtagctcctcgcctcgcattcgcaacgatgtttaatagctctgagcagagccagaagggtggactgagtgtggcagtacccggcgagatacgaggatacgaactggctcatcaacgacatggtcggctgccatgggcccggcttttccagccaagtatccagctggcccggcaggggttcccagttggtaaggggctggctgctgcgcttgagaacaagagaaccgtaattgaacagcagcctgtcctgtgcgaagttttctgtcgggacagaaaagtcctcagagaaggggagcggcttaccttaccccaactggccgacacttacgagactttggccattgaaggcgcccaggccttttacaatggtagtctgaccgctcagattgtaaaggatatccaggccgccggcggaatcgtcactgctgaggacctgaacaattaccgggcagaactgatcgaacatcctctgaatattagcctcggagacgtggtactttacatgcccagtgcacctttgtcagggcccgtgttggcactcatcctaaatattttaaaaggttataatttcagtcgggagtccgttgaatcgcccgaacagaagggactcacttaccataggattgtggaggctttccgattcgcgtatgcaaaacgcactcttctcggcgaccccaaatttgtcgacgtcactgaggtggtaagaaatatgacgtccgagttcttcgcggctcagctgcgggcccaaatcagtgatgacacaactcatcctatctcctattacaaaccagaattttatacacctgacgacggcggaacagcacatctctcagtggtggccgaggacggatctgcggtctctgctacttctaccatcaacctgtactttggaagcaaggtgcgttcccccgtctctggcatcctgttcaacaacgaaatggatgatttcagcagcccctcaatcaccaacgagtttggcgtccctccctctcctgctaactttatccagcctggaaaacaaccattaagtagcatgtgtcccaccattatggttggccaggatggacaagtgcgcatggttgtgggtgctgccggcggcacacagataacaaccgcaactgccctcgccatcatatacaatctctggttcggttacgacgtgaaacgcgcggtggaggagcctcgtttgcataatcaacttttgcctaatgtaactactgtggagagaaatattgaccaggcagtaaccgccgcactagagacacgacaccaccatacacaaatagcctcgactttcatcgctgtcgtacaagcaatcgtcagaactgccgggggctgggccgccgcatccgattcccgaaagggaggtgagccagctggctattag

SEQ ID NO: 118094 - DNA, 1710 bp, synthetic construct
  misc_feature 1..1710: note = Description of Artificial Sequence: Synthetic coding sequence
  source 1..1710: mol_type = other DNA
atgaaaaagaagttggtggttttaggactattggcagtggtgctggtgctagtgatagttggcctttgcctctggctcccctccgcgtctaaggagcctgataaccacgtctacacaagagctgcggttgctgccgacgccaagcaatgttctaagattgggcgagacgctctgcgcgacgggggaagtgccgtggatgccgctatcgctgctctattatgtgtagggctcatgaatgcccattccatggggatcggaggcgggctttttctcaccatctataatagtaccacccggaaagctgaggttattaatgctcgcgaggtagcaccccgactggcttttgctaccatgtttaacagttcagaacagtctcagaagggcggtctctccgtagcagtgcccggggagatcagaggctacgagcttgctcatcaaagacatggtcggctcccttgggccaggttattccaaccgtccatccagctggcccgccagggcttccccgtgggtaaaggcctggccgccgccctggagaataagaggaccgtgatagagcagcagccagtgctctgcgaggtcttttgcagggacagaaaggtattgcgggaaggagaacgcctgacactcccccaattagcagacacctatgaaacccttgccatcgagggagcacaggccttttacaacggaagcctgacagctcagatcgtgaaagatatccaagccgctggggggatcgtgaccgcagaggacctgaacaactaccgagctgagctcatcgaacatccgctcaatatttctctcggggacgtggtgctttatatgccatctgcaccccttagcggcccagttctggcactgatcctcaacattcttaagggatataactttagtcgcgaatcggtagaatctccagagcagaaggggctcacctatcacaggatcgtggaggcctttcgttttgcatacgcgaaaaggacactcttgggggatcccaaatttgtggacgtaaccgaggtcgtgcgcaacatgaccagtgaattctttgccgcgcagcttcgggcccagatctctgatgataccacccatccaatttcctactataagccagagttctatacacctgacgacggaggtactgcgcatctttccgttgtcgcagaagacggatcagcagtgtccgcaactagcactattaacctgtactttggcagcaaagtgagaagccctgtctctggtatcctctttaataacgaaatggacgacttttctagcccctctatcacaaatgaattcggggtacctccctcaccagcgaatttcattcagccgggaaagcagccgttgtcatcgatgtgtccgacgattatggttggacaggatggccaggtgcgcatggttgtaggggccgctggcggaacacagatcaccaccgccacagccctcgcaatcatttacaatctatggtttggttatgacgtcaagagagccgtcgaggaaccacgattgcacaatcagctcctccctaacgtgactactgtggaaagaaacattgaccaggccgtcaccgctgcccttgaaacaaggcaccaccatacacagattgcaagtacattcattgccgtcgttcaggccatcgttaggacagccggcggttgggccgcggcttccgacagtaggaaagggggggaacccgccggatactag

SEQ ID NO: 118095 - DNA, 678 bp, synthetic construct
  misc_feature 1..678: note = Description of Artificial Sequence: Synthetic coding sequence
  source 1..678: mol_type = other DNA
atgacatccgaattttttgctgctcagctgcgcgctcaaatctccgacgacaccactcatccgataagctactataaacctgaattctatactcctgatgacgggggcaccgcccatctctctgttgtggcggaggacggatcggccgtgtcagcaaccagcacaattaacttgtactttggctcaaaggtgagaagtccggtgagcggtatcctgtttaacaatgagatggatgacttctctagcccttctattactaatgaatttggtgttcccccttcacccgcaaactttattcagcccgggaagcaaccccttagttcaatgtgccctactattatggtaggtcaggacgggcaagtcaggatggtggtaggcgctgctgggggtactcagattaccaccgctaccgctttagcaattatctataatctgtggtttgggtacgacgtgaagagagctgtggaagagccaagactccacaaccagctgttgcctaatgttacaaccgttgaacgcaacatcgatcaagccgtgaccgccgcactggagacccgccatcatcatacacagatagcatccaccttcatcgctgtggtgcaagctatcgtgaggactgccggtggttgggccgccgcttccgattcaaggaaagggggcgagcctgccggatattag

SEQ ID NO: 118096 - DNA, 678 bp, synthetic construct
  misc_feature 1..678: note = Description of Artificial Sequence: Synthetic coding sequence
  source 1..678: mol_type = other DNA
atgactagtgaattttttgctgctcaattacgggcccagatttcggatgacaccacccaccccatttcctattacaaacccgagttttatactccggacgatgggggcactgctcacctcagcgtagtcgccgaggacggttcagctgtgtctgctacctccaccataaatctgtactttggctcgaaggtgcgcagtccagtctccggcattctgtttaacaatgaaatggacgattttagtagcccgagcattaccaatgaatttggtgtcccacctagccccgccaactttattcagccggggaagcaaccgctctcctcaatgtgtcctacaatcatggtcggacaggatggtcaggtcaggatggtggtgggagccgctggtgggactcaaattaccaccgctaccgcactggctatcatttataacttatggttcggatatgacgttaaaagggctgttgaggaaccccggctgcataatcagctacttcctaatgtcaccacagtagaacgcaatattgaccaagccgtcaccgcagcccttgagacacgccatcatcacacccaaattgcatctacttttatcgccgttgttcaggcaattgtacggaccgctggaggctgggctgcagcttccgactccaggaaaggtggtgagccagcggggtactag

SEQ ID NO: 118097 - DNA, 678 bp, synthetic construct
  misc_feature 1..678: note = Description of Artificial Sequence: Synthetic coding sequence
  source 1..678: mol_type = other DNA
atgacctcggaattcttcgctgcccagttgagagctcaaattagtgacgataccacacaccccattagctattacaaacccgagttttacacccctgacgacggcgggactgcccacctatccgtcgtagctgaggacgggagcgccgtttctgcaacatccaccatcaatctgtattttggttctaaagtgagaagtccggtgagtggcatcctttttaacaatgaaatggatgatttctctagcccttctattacgaatgagtttggcgtgcctccaagcccagctaattttatacaacctggtaagcagcccctgagctcaatgtgccccacgattatggtaggccaagacggccaggtacgcatggtggtaggagcagctggcgggacccagattacaaccgctaccgcactggccatcatctacaatctctggtttggatacgatgtcaaaagggccgtcgaggagccaaggttgcataaccagttgctgcctaacgttacgacagtggagcggaatatcgaccaggctgtgactgcggctctggaaacaaggcaccaccatacacagatcgcttccacctttatcgcggtggtgcaggctatcgtgcgaactgcagggggatgggccgcggcctccgactctaggaaagggggcgagcccgcgggatattag

SEQ ID NO: 118098 - DNA, 1710 bp, synthetic construct
  misc_feature 1..1710: note = Description of Artificial Sequence: Synthetic coding sequence
  source 1..1710: mol_type = other DNA
atgaaaaaaaaacttgtggtgctcggcctactggcagtggtcttggtgttggtgatcgttgggctgtgcctgtggctcccaagtgcctcgaaagaacctgataaccacgtgtacactcgggccgccgtggctgccgacgccaagcaatgtagcaagatcggacgggatgcattgagagatgggggatctgcggtggacgctgcaatcgccgcactgctgtgtgtgggcctgatgaatgcacactctatgggcatcgggggtggtctctttttaaccatctacaattccacgactaggaaggcagaggtcattaacgcgcgcgaggtagccccccggcttgcgtttgccacaatgtttaacagttccgagcagagccagaagggagggttgagcgtcgctgtgcccggcgaaatccggggttatgagttagcacaccagaggcacggtcggctgccatgggcccgtttgttccagccttccatccagttggcgaggcagggtttccctgttggcaagggactagccgccgcactcgagaataaaaggacagtcatcgagcaacagcctgtcttgtgcgaggtattttgtcgggatcgcaaggttctccgggagggggagaggttaactctgccccagttagccgatacttatgagaccctcgccatcgagggggcccaggccttttataacggttctctgacagcacagatagtgaaagatatccaggctgcagggggtatcgttaccgccgaggatttaaataattatagggccgagttaatcgagcacccacttaacatctccctgggtgacgtagtgctgtacatgcccagcgccccactgagcggacctgtgctcgctcttattcttaatatccttaaagggtacaatttttcccgcgagagcgtcgaatcccccgaacagaaggggcttacctatcatcgaatcgtggaggcctttcggttcgcctatgccaagaggactcttctgggagaccctaaattcgtcgacgtcactgaagtcgtcagaaatatgacgtctgagttttttgccgcccagctcagagcccagatttcagatgataccacccatccaatctcttattataagccagaattttataccccagacgacggtgggaccgcacacctgagtgtggtggccgaggatggctctgcagtgagcgcaacatccactattaacctgtacttcggttcgaaggtgcgctcccccgtgtccgggatcctgttcaataacgaaatggatgacttttcatccccaagcatcactaatgaattcggcgttccaccatccccagcaaatttcattcagcctggaaaacagcctctcagcagcatgtgtcccactatcatggtgggacaggacgggcaggtgaggatggtggtcggcgccgctggtggcacccagatcaccacggcaactgccctggctattatttataacctctggtttggctacgatgtgaagagggcagtggaggagccaaggttacacaatcagctactgcctaacgtgacaactgtcgagcgcaatatcgaccaagccgtcacagcagccttagagacaaggcatcaccacacacaaatagcctccaccttcatcgcggtcgtgcaggcgatcgtacgcacagcgggtggctgggctgctgcatccgactctcggaagggcggggagcctgcgggttactag

SEQ ID NO: 118099 - DNA, 363 bp, synthetic construct
  misc_feature 1..363: note = Description of Artificial Sequence: Synthetic coding sequence
  source 1..363: mol_type = other DNA
atgaaaaagaagttggtcgttctgggactcttagcagtagtcctcgttctggtgatcgtaggactctgtctttggctccctagcgcttccaaagagcctgacaaccatgtttacacccgagcggccgtcgccgccgatgccaaacagtgttccaagattggtagggacgccctgcgtgacggtggctctgctgtagacgccgcaatcgcagcccttctgtgtgtggggcttatgaacgcccactccatgggcattggaggcggtttgttcctgaccatttacaattccacgacacgtaaagccgaagtgattaacgcccgcgaagtcgctccacgactggccttcgcaactatgtttaactag

SEQ ID NO: 118100 - DNA, 1392 bp, synthetic construct
  misc_feature 1..1392: note = Description of Artificial Sequence: Synthetic coding sequence
  source 1..1392: mol_type = other DNA
atgaagaagaagctggttgttttgggccttctggccgtggtgttggtgctcgtcatcgtgggcctctgtctgtggctgccttcagcctctaaggagccagataaccatgtgtatacccgtgccgcagttgctgcggacgctaagcaatgctcgaaaatcggtcgcgacgcattgagggatggggggtccgcagtcgacgccgcaatcgccgcgctgctctgcgtggggctcatgaacgcccattctatgggaatcggcggggggttatttctaacaatctacaatagtacaacacggaaggccgaagtgataaacgcaagggaggtggcacctagattggcctttgccacaatgttcaacagttccgaacagtctcaaaaaggcggcctgtccgtggctgtgcccggcgagattcgcggctacgagttagctcaccagagacatggaagactcccgtgggcgagactgtttcagccctcaatacagctcgcacgccaaggatttcctgttgggaaaggactggcggccgcactcgagaacaaacgaacagtgattgagcagcaacctgttctgtgcgaggtgttttgtcgagatcggaaggttctgagggagggggagcgcctcaccctaccgcagcttgcggatacttatgagacacttgccattgaaggggctcaggcgttttacaatggctcactcacagcgcaaatagtgaaggacatacaggcagctgggggaattgtgactgcagaggacttgaataactaccgtgccgagttgattgaacatcctctgaatatttccctcggcgatgttgttctatatatgcctagcgccccactcagcggccctgtcttggctctgatcctgaacatactcaaagggtacaacttctccagagaatctgtggaatcgccagagcagaaagggctgacttatcaccgtatagttgaggctttccggttcgcttatgccaagcgaactctccttggcgaccctaaattcgtggacgtgaccgaggttgtccggaacatgactagtgagtttttcgccgcccagctgagagcccagatcagcgacgatacaacgcaccctataagctactacaaaccggagttttatacaccagatgatggaggtacagcacacttgagcgtggtggctgaggacggttctgctgtgtccgccacgagcactataaatctgtacttcggtagcaaggtccgcagccccgtgtccgggatactctttaataatgaaatggacgacttcagctccccaagcattaccaatgagtttggtgtacctcccagccctgccaattttattcagcctggaaagcagcccctgagttcaatgtgtcctacgatcatggtgggccaggacgggtag

SEQ ID NO: 118101 - DNA, 243 bp, synthetic construct
  misc_feature 1..243: note = Description of Artificial Sequence: Synthetic coding sequence
  source 1..243: mol_type = other DNA
atgaaaaaaaaactagtggtccttggtctgttggcagtcgtgctggttttagtgattgtagggctttgtctctggctcccgtctgcctctaaggaaccggataaccatgtctacacacgagcagcagtggcagcagacgcaaagcaatgttccaagatcggacgtgacgctcttcgcgacggcggaagtgctgtggatgcagcgatcgccgctctgctgtgtgttgggctaatgaatgcctag

SEQ ID NO: 118102 - DNA, 525 bp, synthetic construct
  misc_feature 1..525: note = Description of Artificial Sequence: Synthetic coding sequence
  source 1..525: mol_type = other DNA
atgaagaagaagctggtcgtcctaggcctcctggcagttgtcctcgtgctcgtcattgtaggcctgtgtctgtggctcccttcagcttccaaggagcctgacaaccatgtgtatacccgggcagccgttgccgccgacgctaaacagtgtagcaagatcggtagagacgccctcagggatggagggtccgccgtggacgccgccatcgctgccctgctgtgcgtcggccttatgaacgctcatagcatgggaatcggcgggggtctgttcctcacgatctacaactcgactacaaggaaagctgaggtgatcaatgctagggaggttgctcccagactcgcctttgccactatgtttaatagttcagagcagtcacagaagggtgggttaagtgtagctgtgccgggtgaaatccggggatacgagctggctcaccagagacatggcaggttgccctgggcccgcctttttcagccttctattcagctggctaggcaaggcttccctgtaggtaaagggttgtag

SEQ ID NO: 118103 - DNA, 381 bp, synthetic construct
  misc_feature 1..381: note = Description of Artificial Sequence: Synthetic coding sequence
  source 1..381: mol_type = other DNA
atgaagaaaaaactggttgtcctgggattactagccgtggtgctggtgctcgtaatagtaggattgtgcttgtggttaccgtccgcaagtaaagagcccgataatcacgtgtacacccgagccgccgtggctgcagatgctaagcaatgctcaaaaattggcagagatgccctccgggacggcggatccgctgtggatgccgctatcgctgcactcctctgtgttggcctgatgaacgctcattccatgggaattgggggagggctgtttttgacgatctacaatagcacgacccgcaaggcagaggtaattaacgcacgggaagtagctccacgtcttgcattcgccaccatgtttaactcatctgagcagtcccagtag

SEQ ID NO: 118104 - DNA, 330 bp, synthetic construct
  misc_feature 1..330: note = Description of Artificial Sequence: Synthetic coding sequence
  source 1..330: mol_type = other DNA
atgaagaagaaattggtggtgctcggtctcctggccgtggtgctggtgctggtgattgtgggactgtgcctatggttgccctccgccagtaaagagcccgataatcacgtttacaccagagccgctgtggctgcagatgccaaacagtgctccaaaataggacgcgatgcccttcgggatggcgggtctgctgtcgatgctgccattgcggccctgctctgtgtcggcctcatgaatgctcacagtatgggaattgggggtggtctatttcttaccatctacaactcgacaaccaggaaggccgaggttatcaatgctagagaggtttag

SEQ ID NO: 118105 - DNA, 336 bp, synthetic construct
  misc_feature 1..336: note = Description of Artificial Sequence: Synthetic coding sequence
  source 1..336: mol_type = other DNA
atgaagaaaaaacttgttgtactgggactgttggctgtcgtattggttctggtcatcgtgggcctgtgcctgtggctgccttcggcctccaaagaacccgacaaccacgtgtatacacgggcggctgtggctgctgacgcaaagcagtgctcaaagattggcagggacgctctgcgggacggcggctcagcggtagatgccgccattgcggctctgctctgcgtgggcctcatgaatgcccacagtatgggcatcggtggcggtctgttccttaccatttataatagtactacacggaaggccgaggtgatcaacgcaagagaggtcgcaccctag

SEQ ID NO: 118106 - DNA, 114 bp, synthetic construct
  misc_feature 1..114: note = Description of Artificial Sequence: Synthetic coding sequence
  source 1..114: mol_type = other DNA
atgaagaagaagctggttgtcctgggcctgttagctgtagttctggtcctagtcattgtggggctgtgtttgtggcttccgagcgctagtaaagagccagataatcatgtatag

SEQ ID NO: 118107 - DNA, 207 bp, synthetic construct
  misc_feature 1..207: note = Description of Artificial Sequence: Synthetic coding sequence
  source 1..207: mol_type = other DNA
atgaagaagaagctggtggtgttggggttgctcgctgtggtattggtgctggttatcgtaggactgtgcttgtggttgccctccgcttccaaagagcctgacaatcacgtatatacacgtgccgctgtcgcggcggatgctaagcaatgcagcaaaattggtcgcgatgcactccgtgacggggggagcgccgttgacgcggcttag

SEQ ID NO: 118108 - DNA, 381 bp, synthetic construct
  misc_feature 1..381: note = Description of Artificial Sequence: Synthetic coding sequence
  source 1..381: mol_type = other DNA
atgaagaaaaaactagtggttcttgggctgctagccgtcgtgctggtgctcgtgattgtggggctctgtctttggctgccgagtgcctctaaggaaccagataaccatgtgtacaccagggctgccgttgccgctgatgctaaacagtgctcaaagattggccgggacgctctcagagatggtggatccgctgtggatgcagctatcgccgcactcctgtgtgtaggactgatgaacgcccatagcatgggaatcgggggcggcctcttcctcaccatctataatagcacaacaaggaaggccgaggtgatcaatgcccgagaggtggccccccgcctggccttcgccaccatgttcaactcctccgagcagtctcaatag

SEQ ID NO: 118109 - DNA, 351 bp, synthetic construct
  misc_feature 1..351: note = Description of Artificial Sequence: Synthetic coding sequence
  source 1..351: mol_type = other DNA
atgaaaaagaagctggtggtgttgggtctgctggctgtggtgctggtcctggtgatcgtgggcctgtgcctttggctgccctccgcttccaaggaaccagataaccacgtctatacacgcgctgcagttgccgccgatgctaaacagtgctcgaagattggcagggatgccctgcgcgatgggggatcagctgtggacgccgccattgcagcactgctctgtgtgggccttatgaacgctcatagtatgggcattggcggtgggctcttcttgactatttataattcaactacccggaaagccgaagtgatcaacgcccgcgaagtggcgcctcggcttgcatttgcttag

SEQ ID NO: 118110 - DNA, 384 bp, synthetic construct
  misc_feature 1..384: note = Description of Artificial Sequence: Synthetic coding sequence
  source 1..384: mol_type = other DNA
atgaaaaaaaaacttgtcgtactggggctcctcgcagtcgtcctggtgctggtaatagtggggctttgtctctggttgccaagcgcatcaaaggaaccggacaatcatgtgtacactcgcgctgccgtcgctgccgacgccaaacaatgctctaaaattggtcgcgacgcactgcgggacggcggttcagccgtagatgccgcaattgccgctttactgtgtgtaggccttatgaacgcccacagcatgggaatcggcggtgggctgttcctaacaatttataactctactactagaaaggctgaggttataaatgcccgggaggtcgcccctcgactcgcattcgctactatgtttaattcttccgagcagtcacagaagtag

SEQ ID NO: 118111 - DNA, 297 bp, synthetic construct
  misc_feature 1..297: note = Description of Artificial Sequence: Synthetic coding sequence
  source 1..297: mol_type = other DNA
atgaaaaagaaattagtggttctgggacttctcgcggtcgtgcttgtgttggtcatcgtcggcttgtgtttgtggctgccaagcgcaagtaaggaaccggataaccacgtgtataccagagccgcagtggcggccgatgccaaacagtgctccaaaatcgggcgagatgccctgcgggacggaggcagtgctgtagacgccgccatcgccgcccttctgtgcgtaggacttatgaatgcccacagcatggggattggagggggtctcttcctgaccatttacaacagcactacctag

SEQ ID NO: 118112 - DNA, 93 bp, synthetic construct
  misc_feature 1..93: note = Description of Artificial Sequence: Synthetic coding sequence
  source 1..93: mol_type = other DNA
atgaaaaaaaaactagttgtcttgggactcctcgcggtggtgctggttctggtcatagtggggctctgcctgtggcttcccagtgcttcctag

SEQ ID NO: 118113 - DNA, 1710 bp, synthetic construct
  misc_feature 1..1710: note = Description of Artificial Sequence: Synthetic coding sequence
  source 1..1710: mol_type = other DNA
atgaagaagaaattggtggtactcggtttattggccgtagtgttggttctggtgatcgtgggtctctgtctttggctgccatctgcatccaaggagcctgataatcacgtatataccagagctgctatggccgccgacgcaaagcagtgcttggaaattgggcgcgacacactgcgggacggtggcagcgccgtggatgccgccattgctgcgctgctatgtgtgggtcttatgaatgctcactccatgggaatcggagtgggactcttcctgacaatctacaatagcactactagaaaggccgaagtgattaacgcccgcgaggttgccccacgcctagctttcgcctctatgttcaattcgtctgaacaatcccaaaagggaggactgtcagtggctgtgccaggggagattcgcggttacgaactagcccatcaaaggcatgggcgcctcccctgggcgcggctgttccagccttccattcaactggcccggcagggattccccgttggcaagggcctcgctgctgttctggagaataaaagaaccgtgattgaacagcagccggtgctgtggtatgtgttctgccgcgacagaaaggttcttcgggaaggggagcgtctcaccctccccaggctggctgacacatacgagatgctcgctatcgagggtgcccaagctttttacaatggtagtcttatggcgcaaattgtgaaagacatccaagcagctggaggaattgtcacagccgaggatcttaataactaccgggcggaacttatcgagcaccccctgaacatctcactgggcgacgctgtgctctatatgccttctgcccggctaagcggccccgtgttagcgcttatattaaacatcctcaaggggtacaatttcagcagagaatcggtggagactccagagcagaaaggattgacatatcacagaatagtggaggctttccgcttcgcctatgctaaacggactctcctgggcgaccccaagtttgtcgatgtgactgaagtggtgagaaacatgaccagcgagttcttcgcagctcaactgcggagccagataagcgaccacacaacgcaccccatctcgtactataagccagagttttataccccggacgacggcggaacagctcatctctccgtggtagccgaagatggcagcgccgtttctgcaacttcaacaataaacctctactttgggtccaaagtttgcagccccgtctcaggtattctatttaacaatgagtggacaacgagcgccctgcccgccttcactaacgaattcggagctcccccctcacctgccaactttatccaacctggcaagcagccactgctctctatgtgtctcacaatcatggttggccaggacggtcaggtgaggatggtggtcggcgcggcgggcggcacacagattacaacagacaccgctctggccatcatctataatctatggtttggatatgacgtgaagagagccgtggaagagccacggctgcataataagctgcttcccaatgtcacaaccgttgagcgcaatatcgaccaagctgtaaccgctgctctcgagacacgacatcaccatactcagattgcctccactttcattgccgtcgttcaagccatcgtccgtaccgccggtggctgggccgctgccagcgactcacggaagggcggagaacctgccgggtactag

SEQ ID NO: 118114 - DNA, 1680 bp, synthetic construct
  misc_feature 1..1680: note = Description of Artificial Sequence: Synthetic coding sequence
  source 1..1680: mol_type = other DNA
atgaagaaaaagctggtagttctcggactactcgctgttgtgttagtgctggttattgtggggctgtgtctgtggctgccctccgcgtccaaggaacctgataatcacgtctataccagagccgccatggcggcagatgcaaagcagtgcctggagatcggccgggataccctgagagatggggggagcgcagtggacgccgccatagcggcgcttttgtgcgtcggactgatgaatgcccactcgatgggcatcggcgtagggctgttcctaacaatttacaattccactactagaaaggccgaagttatcaatgcccgggaagttgcgcctaggctggcttttgcctcaatgttcaacagttctgagcaaagccagaaaggcggattgtctgtggccgtgccaggcgaaatcagaggctatgagttagcccatcagagacatgggcgattgccttgggcgcgcctgttccaaccctcaatccagctcgctcgacagggctttcccgtgggaaaaggcctcgctgcagtgttagagaataagcgaaccgtgatagaacagcaaccagtgctttggtatgtcttctgccgagaccgtaaggttttgcgcgaaggagagcggctcaccctgccccgactggctgacacctatgaaatgctcgctatagagggagcacaggctttttacaacggctcacttatggcacaaatcgtcaaggacattcaagccgccggagggatcgttaccgctgaggacctcaacaattatcgtgctgaacttatcgagcatcccctgaacatttccttaggcgatgcggtgctgtatatgccctctgcacggctgtctggcccagtactcgcacttatcctgaatattttgaagggttacaatttcagccgcgaatcagtggagacccctgagcagaaaggccttacttatcaccgaatcgttgaggccttccgattcgcatacgccaagcgtacattactgggcgaccctaaatttgtcgatgtaaccgaggtggtgcgcaatatgacctctgaattcttcgcagcccagctcagatcccagattagcgaccacactacccacccaatctcttactataagcccgaattttatacacccgacgatggcggaaccgctcacctgtcggtcgttgctgaggatggatctgccgtgtccgcaacgagtaccatcaacttgtacggcatactattcaataacgagtggaccacaagcgcccttcctgcctttactaatgaatttggcgccccaccttctcccgcgaactttattcagcccgggaagcagcctttgctgagcatgtgtctcaccataatggtaggccaggatggtcaggtgcggatggtagtgggagcagcaggtggaacacaaattaccacagatacagcactcgccatcatctacaacctttggttcggttatgatgtgaaacgagctgtggaggagcctagactgcataataaactattgccaaacgtgacaacagtcgaaagaaatatagatcaggcggtcaccgccgccctagaaacaagacatcatcacactcagatcgccagcacgttcattgctgttgtgcaggccattgttagaacggccggaggctgggccgccgcctccgatagcaggaaaggaggcgaaccagccggatactag

SEQ ID NO: 118115 - DNA, 1710 bp, synthetic construct
  misc_feature 1..1710: note = Description of Artificial Sequence: Synthetic coding sequence
  source 1..1710: mol_type = other DNA
atgaagaagaagctcgtcgtcctgggactgctcgcggttgtactcgtgctcgtcatcgtgggcctgtgtttgtggctgccctccgcaagtaaagagccagacaatcatgtgtatacccgggctgccatggctgccgatgctaagcagtgtttggagatcgggcgcgatacgttgagagatggcgggtcggccgtcgatgctgcaatagccgccctgctctgtgtaggactcatgaacgctcacagcatgggaatcggagttggtctatttctgaccatctataactcaacaacccgcaaggcggaagttattaatgcgagagaagtcgcaccccgcctcgcctttgcgtctatgttcaattcttctgagcaatcgcagaagggcggcttgtcagtggccgttccaggggaaattagaggctacgaacttgcccaccagagacacggcaggctaccctgggcccggctgtttcagccaagcatccaactcgctcggcagggttttcccgtaggcaaagggctggctgccgtgttggagaacaagcggaccgtgattgagcaacaaccggttctgtggtatgttttttgtagggatagaaaggtactgcgagaaggagagaggctcactctgccaaggctggcggatacttacgagatgctggccatcgaaggtgcccaagcgttctataacgggagtcttatggcgcagatcgtcaaggatatacaggccgcagggggcattgtgacagctgaagatctgaataattaccgcgccgagctaattgaacatccccttaacatatcgctgggcgatgcagtgctctatatgccctcagcccggctgagcggcccagtactggcgctgatccttaacatcctaaaaggctataacttctctagagaatctgttgaaaccccagaacagaaagggctgacttatcaccgaatcgtggaggcatttaggttcgcttatgcaaagaggaccctcctcggggaccctaaatttgtggacgtaactgaagtcgtcaggaatatgacttctgaattcttcgccgcgcagctccggtcacaaatatcagaccacacgacacaccccatttcctactataaaccagagttttacacacctgacgatggagggaccgcccatctcagcgtggtggctgaggacggctctgcagttagcgcaactagtacgatcaatctttacttcggatcaaaagtgtgttccccggtgagtgggattttgtttaataacgagtggaccactagtgcactgcccgcctttaccaacgaatttggagctccccctagcccagccaacttcattcagcccggaaaacagccactactaagtatgtgcttgaccattatggttgggcaggacggacaggtccgcatggtggtgggtgctgccggcggcactcagatcacaaccgacacagctttggctattatctacaatctgtggtttgggtatgacgtcaaacgggcagtggaggaaccgagactgcataataagcttctgccgaatgttacaactgtcgaacgcaatatcgatcaggccgtcacagccgccctggagaccagacatcatcatacacagatcgcaagtacatttatagctgttgttcaggccattgtgagaaccgcaggggggtgggcggccgccagcgattctagaaagggcggggaaccagctgggtactag

SEQ ID NO: 118116 - DNA, 1665 bp, synthetic construct
  misc_feature 1..1665: note = Description of Artificial Sequence: Synthetic coding sequence
  source 1..1665: mol_type = other DNA
atggctcggggctacggcgcaaccgttagtctggttctgctgggccttggccttgctctggctgtcattgtcctggcggtggtcctgtctagacaccaggctccttgcggaccgcaggctttcgcccacgcagctgtcgccgccgatagtaaggtgtgctcagatatcggacgggccatcctgcagcagcagggcagccctgtggacgccactattgctgctctagtatgcaccagcgtcgtcaacccgcagagcatgggactggggggtggtgtgatcttcaccatctataatgtgaccaccggcgcccagtggattggagtgcctggcgaacttcgcggctacgccgaggcccatagacgccatgggagactgccatgggcacaattattccagccaaccatagcactcctgcggggaggacacgttgtggctccagtgctgtcccgcttcctgcacaacagcattcttcggcccagcctccaagcctctacactgcgccagctgtttttcaatggtaccgaaccactgagaccccaggatccactgccatggcctgcgcttgctaccaccctcgagactgtcgcaaccgagggcgtcgaggtgttttataccggaaggctggggcagatgcttgtcgaggacattgctaaagaagggtcccagctgactcttcaggatctcgccaaatttcagcccgaggtggtggatgcccttgaggtgccccttggggactacacgctctactcgccgccaccgccagccgggggagccatccttagcttcattctaaatgttttgagggggttcaatttttccactgaatccatggcccggcccgaaggacgcgtgaacgtctaccaccacctggtcgaaaccctgaaatttgccaagggccaaaggtggaggctgggagacccgaggagtcaccctaaactgcaaaatgcctcaagggacctgttgggcgagacattggctcagctcatccggcagcaaattgatgggcggggggaccaccagcttagccattatagcctggcagaggcttggggccatggaaccggaacatcccatgtgtccgtcctcggcgaggacggctctgccgtggccgctacctcaactatcaatacccccttcggagccatggtatattctccaagaacagggattatattaaacaacgaactgttagatctgtgtgagcgctgcccacgaggcagcggaaccacccctagccctgtgtccggagatagagtcggtggtgcccctggacggtgttggcccccagtgcccggggagcgcagccctagtagcatggtcccttccatcctgattaacaaagcccaaggatcaaagcttgtcatcggcggggcaggcggtgagctcattatctctgctgtcgcgcaagctatcatgtcgaaattgtggttaggattcgatctacgggctgcgatcgctgcccccatcctgcatgtgaacagcaaaggatgtgtggaatatgagcctaatttctcccaggaagtacaaaggggactccaagatcggggccaaaaccagacacagcgacccttctttctcaatgtggtgcaagccgtttcgcaagaaggggcctgtgtgtatgcggtcagcgaccttaggaagtcaggtgaggccgccggctactag

SEQ ID NO: 118117 - DNA, 1761 bp, synthetic construct
  misc_feature 1..1761: note = Description of Artificial Sequence: Synthetic coding sequence
  source 1..1761: mol_type = other DNA
atggcgcgcggttatggagcgaccgtgagcctggtgctccttgggctgggactggctttagccgtgattgtgctggcagtggtcctaagcaggcatcaggccccatgcgggcctcaggcttttgctcacgcagccgtggcagccgattctaaggtatgctccgatataggccgggcaatattgcagcaacaaggctcccccgttgacgctacaatcgccgcattggtgtgcacttccgttgtaaacccacaaagtatgggactgggcggtggagtgatttttacaatatacaatgtgacaactggcaaagtagaggtaatcaatgcgcgcgaaaccgtgcctgcgagccatgctcctagcttactggatcagtgcgcccaggccctgcccttggggactggggcacagtggatcggggtcccaggcgagctcagaggttatgcagaggcccacagacgccatggacgtcttccatgggcccagctgtttcaacctaccatagccttgctgcggggcggacacgtggtggcacccgtgctgagccgcttcttacataatagcattcttcgaccatctctccaggctagcactctgcggcagctcttcttcaacggcacagaacccttaaggcctcaagaccccctgccttggcccgcattggccacaactctagagacggtggctaccgaaggcgtcgaggtgttttataccggcaggctggggcagatgctggtcgaagacatcgcaaaagagggatcacagttgacgctccaggaccttgcaaaatttcaacccgaggttgtggacgctttggaggtaccactcggcgattataccctgtactctcctcctcccccagctgggggagccatattaagctttattttgaacgtgctgcgcgggttcaatttctccaccgagtcaatggcccgcccagaaggaagagtgaacgtgtaccatcacctggtggaaaccctgaagtttgcgaaaggccaacggtggcgattgggggatccccgcagtcaccctaagctccagaatgcctccagagacttactgggagagaccctcgcccagttaattcgccaacaaattgatggccgcggagaccatcagctgtcacactattctcttgctgaggcttggggacatggaactggaacaagccatgtttcagtgttgggcgaggatggctcagcagtggccgccacaagcaccatcaatactccttttggtgcaatggtttacagtccccggacaggcattattttgaacaatgagctgctggacctttgcgagcgttgtcccaggggctctggtaccaccccaagccccgtttcaggtgacagggtgggaggggctccaggacgctgttggccaccggtcccaggtgagcgctcacccagctctatggtgccgtctatactaatcaacaaggcgcaggggagcaaactagtgatcggaggagcaggtggcgaactgatcattagtgccgtcgcccaggctattatgtcaaaactctggctcggtttcgaccttagagccgccattgcagcgcctatattgcacgtcaatagcaagggctgtgtggaatacgaacccaacttctcccaggaggtgcagagaggcctgcaggaccggggtcagaatcagacacagcggccatttttcttaaatgtcgtgcaggctgtgtctcaggaaggggcctgtgtgtacgccgtcagtgacttgagaaagtcgggagaagccgccggctattag

SEQ ID NO: 118118 - DNA, 1764 bp, synthetic construct
  misc_feature 1..1764: note = Description of Artificial Sequence: Synthetic coding sequence
  source 1..1764: mol_type = other DNA
atggcacggggatacggagcaacagtttcgttagtgctactgggacttggtctggccctggctgttatcgtgcttgcagttgtgctctccagacatcaagccccatgtgggcctcaggcttttgcccacgctgcggtagcagcggactccaaggtatgcagcgacataggcagggccatcctacagcagcaaggtagccctgtcgacgcaacaattgccgcactggtatgcacaagcgtggtaaatcctcagagtatgggcttgggtggcggagtcatctttacaatttacaacgttacgaccggaaaggtggaggtgatcaacgctagggagactgtgcccgcaagccacgcacctagtctgcttgaccaatgcgcccaggccctgcccctgggcaccggggctcaatggatcggggtcccgggagagctccgggggtatgctgaagcccatagaaggcacggccgcttaccatgggctcagctctttcagcccacaatagccctcctgcggggaggacacgtagtggccccagtactgagtcgatttctccacaacagcattttgcgtccatctctccaggctagtactcttagacagttgttttttaatggcactgagcctctgagaccacaagatccactgccttggcccgcgctggccaccaccctcgagaccgtggccaccgaaggagtggaggtcttttataccggacgcttgggacagatgcttgtggaggacatcgccaaggagggcagtcaactgaccttacaggatttggctaagttccagcccgaggttgtggatgcccttgaggttcccctaggcgattacacactctactctccaccacctcccgcgggaggcgccattttgtcttttattctgaatgttctacgaggatttaacttctccacagagtcaatggcaagacctgaaggaagggtgaacgtgtaccatcatttggtcgagacccttaagttcgcaaagggtcagcgatggcggctcggtgatccccgctctcatccaaagctgcaaaacgcgtctagagacttgcttggagagactttggcccaactaattaggcagcagattgatggacgcggcgaccaccagctcagtcactactctctggcggaggcttggggtcacggaacaggcacatctcacgtgagcgtgctgggcgaagacgggtcggccgtggcggccacttctacaatcaacaccccgtttggagcgatggtttactccccccgaacaggaattatccttaataacgagctcctggacctgtgtgagagatgcccaagggggagtgggaccacaccctctcccgctgtgagcggagatcgcgtcggcggcgcccccggcaggtgctggcccccggtccccggggagcgttcaccttcaagtatggtgccgtctatccttatcaataaggctcaaggttcgaaactagtcatcggcggcgcaggtggcgaattgattattagtgccgtggcacaggcaatcatgtccaaactgtggctagggtttgacctaagagctgcgatagccgctccaatcctccatgtcaatagtaagggttgcgtagaatacgagcccaattttagccaagaggtccaaaggggactgcaggaccgagggcagaaccaaacccagagacctttcttcttgaatgtggtgcaagccgtttcacaggaaggagcatgcgtttatgccgtatctgacctcaggaaatctggcgaggcggcgggctattag

SEQ ID NO: 118119 - DNA, 1533 bp, synthetic construct
  misc_feature 1..1533: note = Description of Artificial Sequence: Synthetic coding sequence
  source 1..1533: mol_type = other DNA
atggccaggggatatggcgctacagtgtcattggttctccttggcttaggtctcgcacttgctgtcattgtccttgcagtggtactgtcgagacaccaggcaccatgtggtccccaggccttcgctcatgccgccgtcgcggctgatagcaaagtatgcagcgacattggccgcggaccagttgacagaggcgcgcgcggcgctccatggctctgtcgcgggccaccccctccttggccccctgccctcggggccgctgtgcctgcccatcatcgcgcggcgccccggggagcgtgcggtggaccctgcccacagcccttcccagcccaacagcatccagcggcatttctggccggcgtgaaccctgccctgtttttcaacgggactgagcctctgcgaccgcaggatccacttccctggcccgcactagctaccaccctggagaccgtggcaacagagggagtggaagtgttctacaccgggagactgggccagatgcttgtcgaggatattgcaaaggaggggtctcagctaacgctgcaggatctcgccaagtttcagcccgaggtcgttgacgccctggaggtgccactgggcgattataccctgtactccccgccaccaccggcgggcggcgccattctaagttttattctcaatgtgttgcgcggcttcaactttagcacagagtctatggccagacccgaaggtagggtcaatgtctatcaccacctggtcgaaaccctcaagtttgccaagggccagagatggagactaggggatccgcgtagtcacccaaagttacagaacgcctcgcgcgatctgctgggcgaaaccttggcacagctcatcaggcagcaaatcgatgggagaggggaccaccagctgtcacactattcactggccgaggcttggggacacggaaccggtacaagccacgtgtcagtgctgggggaggacggctccgctgtggccgcaaccagcaccatcaacactcctttcggggcaatggtgtatagccctaggactgggataattctgaataatgagctgttagatctctgcgagcggtgccccaggggcagcgggacaacaccttcacctgccgtgtcaggagaccgtgtcggcggcgcccccggaaggtgttggccacctgtccctggcgagaggtccccatcctctatggtacccagcattttgatcaataaggcgcagggctctaaactggtcataggcggggcgggcggcgagctgatcatttcagctgtagcacaagcgatcatgtctaaactttggcttgggttcgacctgcgggctgccatcgccgcacctattcttcacgtgaactccaaaggttgtgttgagtacgaaccaaatttttcccaggaagtgcaacgaggtctccaggatagggggcagaaccaaacccagaggcccttcttcctgaatgtggtgcaggcagtgtcgcaggagggcgcttgtgtatacgcggtcagcgacctaaggaagtcgggcgaggcagccggatactag

SEQ ID NO: 118120 - DNA, 1506 bp, synthetic construct
  misc_feature 1..1506: note = Description of Artificial Sequence: Synthetic coding sequence
  source 1..1506: mol_type = other DNA
atgggcctggggggtggagtgatcttcaccatttacaatgttaccaccggtaaggtagaggttataaacgctagagagacggttcctgcatcccatgcgccctcccttctggaccagtgtgcacaggcattgcctttagggacaggcgcccagtggatcggcgttccaggagagctccgtggttacgcagaagcccaccgcagacatgggcggctgccttgggcgcagcttttccagcccacaatcgccctgctaaggggtgggcatgtggtcgctcccgttctttccagattccttcataactcgatcctaagaccctcactccaggcctcaacactgaggcagttgttttttaatggaaccgagcctttgcgtcctcaagaccccctgccctggcccgcgttggctacgactctcgagactgttgcaacagaaggcgtggaggtcttctatacaggccggctggggcagatgctggtggaggatatcgccaaggaaggaagtcaacttaccctccaggatctcgccaagttccagcctgaagtcgtggatgcgttggaggtgcccctgggagactacactctttatagtcctcctccccccgccgggggggctatcttatcttttatactgaatgtgctgaggggcttcaacttcagtaccgaaagtatggcaaggcctgaaggtagagtaaacgtgtaccaccatctggtcgagacactaaagtttgccaagggacagaggtggcgcttgggcgatcccaggtctcatcctaagctgcagaatgcctcacgggatctcctgggcgagaccctggctcaactcattagacagcagatcgatggtcgtggggaccaccagctcagccactactcactggccgaagcctgggggcacggcaccgggacgtcccatgtgagcgttctgggtgaggacgggtctgccgtagctgccacttccactataaataccccctttggcgccatggtgtactcacctagaaccggcatcattcttaacaatgagttgcttgatctctgcgagagatgtccgcgaggttcgggaacgacgccctcgcctgtgtccggcgacagagtgggtggcgcccctgggcggtgctggcctccagtgcccggggagcgaagtccctctagcatggttcccagcatcctcattaataaagcacaaggcagcaagctagttatcgggggggccggcggcgaactgattatttcagccgtcgcacaggccataatgagcaagctttggctgggctttgatctccgggctgcaatcgccgcacccatcctgcacgtgaattcaaagggctgtgtagagtatgagcctaatttttcccaggaggtccagagagggctgcaggatagaggtcagaaccagactcagcgtccatttttcctcaatgtcgtgcaggcggtctcgcaggagggggcctgtgtttacgcagtgtctgacctacggaagtccggggaagccgcaggctattag

SEQ ID NO: 118121 - DNA, 1386 bp, synthetic construct
  misc_feature 1..1386: note = Description of Artificial Sequence: Synthetic coding sequence
  source 1..1386: mol_type = other DNA
atggagagagccgaagaacccgtcgtttaccagaagttgcttccatgggagcccagcctcgaaagtgaagaagaagtggaagaagaggagacgagtgaggcgctagtcttgaatcctcgtaggcaccaggattcctcacgtaataaagcgggtggactgccagggacttgggctcgcgttgtggccgcgctgttgctgcttgccgttggatgtagtctggcggtccggcagctccagaaccaaggccggtccactgggtccctggggtctgtggcaccaccgccggggggtcacagtcacgggcccggtgtctaccaccacggtgccattatctcccccgctggagctatgttttggggtttgttccatgattcttcctccggcaactcaaccgccctcacctccggccccgcccagacgctcgctcccggcctgggcctccctgctgccttgcctactctgcatctactccatgcacgctttgggagactgccctggccacgattgttggtaggtccaaccaccctggctcaggagggtttcttagtggacacccctctggcccgtgccttggttgctcggggtacggaggggctgtgcccgctactttgtcacgctgacgggacaccgctgggcgcaggtgctagggccacaaatcctcagctagctgcagtgctgcgtagtgctgctctggccccgacatcggacctggccggcgacgcgctgctgtccctgctggctggcgatttgggcgttgaggtgccctccgccgtgcctagacccacactcgagccagctgaacagctgcctgtcccacagggaatactgtttactacccctagcccaagcgcaggaccagagctactcgccctgctggaggccgctttaagatccggcgccccgattccagacccctgtcctcctttcctgcagacagccgtctcgcctgagtcatctgctcttgccgcagtggactcttccggatccgtgctgttactcacatcctcccttaattgtagctttggcagcgctcacctaagtcccagcacaggtgtcctgttatccaacctcgtggccaaaagcacaacttctgcctgggcctgtcccctgatcttgcgagggtccttggatgatactgaagcggatgtcctgggcctggtcgcctctggtacccccgacgtcgctcgggctatgacccataccttgctgagacacctagcagctagacccccaactcaagcacagcaccaacaccagggacagcaggagcctacagagcacccgtctacttgcgggcagggaactctcttacaggtcgctgcccacactgaacatgcccacgtaagtagtgtaccccatgcctgttgtccattccagggcttctag

SEQ ID NO: 118122 - DNA, 1482 bp, synthetic construct
  misc_feature 1..1482: note = Description of Artificial Sequence: Synthetic coding sequence
  source 1..1482: mol_type = other DNA
atggaacgcgctgaggagcctgtggtttaccaaaagctattaccatgggaacccagcctggagtctgaggaagaggtcgaggaggaggaaacatctgaggcccttgtgctgaaccccagacgccaccaggacagtagccgcaataaggcaggcggacttcccggaacctgggctagagtcgtggctgccctactgctgcttgcagtcggatgtagcctggctgtacgccagctccaaaaccagggtcgttctacaggttctcttgggtccgtagctccacctcccggggggcacagccatggtcccggagtgtatcaccacggagcgattataagcccggctggccgcgagttgctggtggcaggcggcaatgtggttgatgccggtgtgggagctgccctgtgtctggccgtggtccacccacacgcaaccggcctgggcgcgatgttttgggggttgtttcacgacagctcttccggaaattctacagcactcacttcaggtcccgcacagactctggctcccggactcggcctgccagctgcactgccaacactccacctgcttcacgccagatttgggaggttgccttggcctcgcctgctggtcgggcccacaaccctcgcgcaggaaggattcctcgtggacacaccactggcccgcgccctggtcgcgcgtggaaccgaaggactgtgtcctctgctttgtcatgcagatgggactcccctgggcgctggcgcccgggccaccaaccctcagctggcagctgtgctgcgctcagccgccctggcccctaccagtgatctggccggcgatgccctgctgagcctgctcgcaggagacctgggagttgaggtgccctctgccgttcccaggccaacgctggagcctgccgagcaattacctgtccctcagggaatattgtttaccactcccagcccatcagcagggccagaactcctggcactgctggaggcagccttgaggtcaggcgcccccattcccgacccatgcccacctttcctccagacggcagtctcacctgagtcctctgccctggctgcagtggacagcagtggcagcgtgctgctgctcactagtagcctgaactgctcttttggatcagcacacctttctcccagtacgggcgtgttgctgagcaatctcgtggcgaagtcaactacctcagcctgggcttgcccccttatcctgagagggtctttagatgataccgaagcggacgttctgggccttgtggcaagcggaacccccgatgtagccagagccatgactcataccttgctgcgacatttggctgctaggccaccgacacaggcacagcaccaacaccagggtcagcaggaacccacagaacaccccagcacttgcggacagggaactcttcttcaggtggccgcccacactgaacacgcccacgtttcctctgttcctcacgcctgttgtccttttcagggtttctag

SEQ ID NO: 118123 - DNA, 1038 bp, synthetic construct
  misc_feature 1..1038: note = Description of Artificial Sequence: Synthetic coding sequence
  source 1..1038: mol_type = other DNA
atgttttggggcttgttccacgacagctcttcaggcaattccacggccttgacgagcgggccagcccagacgcttgcgcccggactggggctaccagccgcgctgcccaccctacatctgctccacgccaggtttggccgtttgccttggcctcgcctgctggtgggacccaccacactggcacaagaagggtttttggtggacacccccctggcgcgagctctagtagccaggggaacggaagggttgtgccctctgctgtgtcacgccgatggcacacccctgggagccggcgcacgtgcaacgaacccacaactggctgccgtcctgcggtctgccgcactggccccaacctccgacctcgcaggggatgcactcctgtcactcttggctggggacctaggggttgaagtgccctctgctgtcccccgacctacgcttgaacccgctgaacagctaccagtcccacagggcatccttttcacgacaccatccccgtctgcggggccagaactgctggctctactagaggcggcccttcgatccggagctcccatcccagacccctgtcctccttttttgcagaccgccgtcagccccgaaagctcagcattggctgcagtggactccagcggttctgtccttttgctgacctcctcattgaactgttcattcggtagtgcccatttatcacctagtacgggggtgcttttgagcaatcttgtcgcaaaatctactacctccgcgtgggcttgtcccctaattctcagaggcagcttggatgacactgaggcggacgtgctgggcctggttgcaagcggcacacccgatgtcgccagggctatgacacacaccctgctgaggcatctggctgcaaggccgcccacccaggctcaacatcagcaccagggccaacaagagccaacagaacacccctctacctgcgggcaaggcaccctgttgcaggtggccgctcacacagagcacgcccacgtgtcttccgtgccacacgcctgttgccctttccagggattctag

SEQ ID NO: 118124 - DNA, 1482 bp, synthetic construct
  misc_feature 1..1482: note = Description of Artificial Sequence: Synthetic coding sequence
  source 1..1482: mol_type = other DNA
atggaaagggccgaagaacccgtggtttaccagaagctgctgccatgggaaccttccctcgagtctgaagaggaggtggaggaggaagagacctcggaggcattagtcctgaatcccagaagacaccaagatagtagcaggaacaaggcaggcggactgcccgggacttgggcgagagttgtggccgcgctgctcctactggcggtggggtgcagcctggcagtgaggcagctgcagaatcaaggccggtcaacaggatcattgggaagcgtggccccacccccagggggacactctcacggacctggtgtgtaccatcacggcgctataattagcccagccggccgagagctcttggtggcaggaggaaacgtagttgatgcaggcgttggcgcggctctttgcctggccgtggtgcacccgcacgctaccggattgggggccatgttttggggcttgttccacgatagctctagcgggaattcaaccgcccttacttctgggcctgcacagacgcttgctcctggccttggactgccagcagccctacccactttgcaccttttgcatgcgaggttcggccgcttgccatggccacgcttactggtgggacccacaaccctggcacaagaaggatttttggtggacactcccctggctcgcgccctcgtcgctcgtggtactgagggcctctgcccactgctctgtcacgcagacggcacgcctctaggcgctggagcacgagccacaaatccacagttggctgcggtgctcaggagcgctgctctggctcccacctccgacctggccggggatgcacttcttagtctgcttgccggggacctaggcgtcgaagtgcctagtgctgtccctcggccaaccctagagcccgcggagcagcttcccgtgcctcagggaattttgtttactactccttctcccagcgcgggacccgagcttttggccctacttgaagccgccttgcgttccggggctccaatccccgatccctgcccgcccttcttgcaaactgcagtgagtccagagtctagcgccctggccgccgttgattcaagtggatctgtgctgctcctgacctcctccctcaattgttctttcggctctgcccatctcagcccctcgactggcgtgctgctctcaaatctggtggctaagtccactactagtgcctgggcatgtccacttatactgaggggatctctggatgacactgaagccgacgtcctcggcctggtggcctcaggcactcctgatgtcgcccgggcaatgacgcacactctcctgagacacctggctgcacgccccccgacgcaagcacagcaccagcatcagggccaacaggagccgacagagcacccctcaacgtgtggccagggtacgcttctgcaggtggctgcccatactgaacatgctcatgtgtcttctgtcccccacgcttgctgtcctttccagggcttctag

SEQ ID NO: 118125 - DNA, 678 bp, synthetic construct
  misc_feature 1..678: note = Description of Artificial Sequence: Synthetic coding sequence
  source 1..678: mol_type = other DNA
atgacaagcgagttcttttctgctcagctcagggcccagatttctgacgatactacccacccgataagttactacaaaccagaattttacatgcctgatgacggaggaacggctcacctgtcagtcgtggccgaggacggctcggctgtgagcgccacctccacaatcaatttatacttcggatctaaggttaggagccccgtgtcagggattctcttaaataacgaaatggacgattttagctctacaagtatcacaaatgaattcggagtgcctccctcccccgccaactttatacagccagggaagcagccactttcgagcatgtgtcccaccattatggtcgggcaagacggccaggtgaggatggtggtcggtgcagccggcggtacacaaatcacaatggccacagcactggccattatctataacctgtggtttgggtacgatgtgaaatgggctgtcgaggagccgcggctgcataatcagttgcttcctaacgtgaccaccgtcgaacggaacattgaccaggaggtcacagccgcattggaaacgcgccatcatcacactcagatcacatcgacgtttatcgccgtcgtacaggcgatcgttcgcatggctggggggtgggcagctgcatccgactccaggaaagggggcgagcccgccggatactag

SEQ ID NO: 118126 - DNA, 678 bp, synthetic construct
  misc_feature 1..678: note = Description of Artificial Sequence: Synthetic coding sequence
  source 1..678: mol_type = other DNA
atgacttccgaattcttctcggcacagctgagagctcagatctccgatgacacaactcacccaatctcctactacaaacccgagttttacatgcctgacgacgggggcacagctcatctatctgtggtcgctgaagatgggtccgctgtatctgctacatcaacaatcaacttatatttcggatctaaagtgcgatcacctgtgtccgggattctcctgaacaatgagatggacgatttttcaagtacgtccattactaatgaattcggcgtgccaccatcccccgctaattttattcaacccgggaaacagcctctgtccagtatgtgtccaaccataatggtggggcaggatggccaggtgcgaatggtggtcggcgccgcgggcggaacccagatcaccatggcaacagccctggctattatttataacctctggttcggctacgatgtgaagtgggctgtggaagaaccaagactccacaatcagctcctcccaaacgtgacgactgttgaacggaacatcgaccaggaagtcacagcagccctcgaaactagacaccatcacacgcagatcacgagcacttttattgccgtggtccaagctattgtgaggatggcgggcggatgggctgccgcaagcgactctagaaagggcggtgagccggccggatactag

SEQ ID NO: 118127 - DNA, 678 bp, synthetic construct
  misc_feature 1..678: note = Description of Artificial Sequence: Synthetic coding sequence
  source 1..678: mol_type = other DNA
atgacttcagagttctttagcgcccagctgagggcacaaatttcggacgacacgacacacccaatcagctactataaacccgagttctatatgccagatgatggaggcaccgcacacctgagtgtagttgcggaggacggcagtgcggtgagcgccacgtcaacgattaacctgtacttcgggtccaaggttcggtctcccgtgtcagggattctactcaacaacgagatggacgacttctctagcacatcaatcactaatgagttcggggtccccccttcgccagccaacttcatccaacctggaaaacagccactgagttctatgtgccctacgattatggtcggccaagacgggcaggtgagaatggttgtgggtgctgcgggggggactcaaattaccatggctacggcattggccattatctacaacctctggtttgggtacgatgtcaagtgggctgtggaggagcctaggctacataaccagttactccccaatgtcactacagtggagcggaatattgaccaggaggttaccgcggcgctggagacccggcaccatcacacccagattactagcaccttcatcgctgtggtgcaggccattgtgcgaatggcaggtgggtgggccgccgcttccgactcccgcaaggggggggagccagcaggttattag

SEQ ID NO: 118128 - DNA, 678 bp, synthetic construct
  misc_feature 1..678: note = Description of Artificial Sequence: Synthetic coding sequence
  source 1..678: mol_type = other DNA
atgacatctgagttctttgccgcccagctgcgggcacagataagcgacgataccactcatccaatctcctattataagccagagttttataccccagtggatggggggacagctcacctcagtgtcgtggccgaggacggctctgcggtttctgctacctccaccatcaacctttattttggctcgaaggtacgttcacccgtgagcgagatcctctttaatgacgaaatggacgactttagctctcccaacattacaaacgaatttggcgtcccgcccagtccagctaacttcattcagcccggaaaacaacctctgtcctccatgtgccccaccataatggtgggacaggatggacaagtaaggatggtggtgggcgcagccggcggtacacagattaccaccgctacagctttagccatcatatacaatctatggttcggttacgacgttaaacgtgcagtggaggagccccggctacataaccagctcctgcctaatgtaacaaccgtagagagaaatatcgatcaagcggtaaccgctgcccttgaaaccaggcatcatcacactcagatagcctcaacttttattgccgtggtgcaggcgatagtgcgcactgccgggggttgggctgctgcatcagacagccgtaaggggggtgagcctgccggatactag

SEQ ID NO: 118129 - DNA, 657 bp, synthetic construct
  misc_feature 1..657: note = Description of Artificial Sequence: Synthetic coding sequence
  source 1..657: mol_type = other DNA
atgacttctgagttcttcgccgcccagttgagagcccagattagcgatgacacgacccatccgatttcgtactacaagcccgagttctatactcccgtcgacggtggcacagctcatttatctgttgtggccgaagacggttcagcggtatccgccacgtctaccattaatctgtatttcggttccaaagtgaggtctcccgtgtctgaaattctctttaatgacgagatggatgactttagtagcccaaatattacaaacgaatttggtgttccacccagtcctgccaactttattcagccaggaaaacagcccctgagcagcatgtgcccaactataatggtgggacaggacggccagcccccttcccacgccgatcacacgcctatgccccaagcgattatttacaacctatggtttggctatgacgtgaaacgagccgtggaagagccccgacttcacaatcaattgctccccaacgtgaccacagtggagcggaacatcgatcaggctgttacagccgcgctggaaacaagacatcatcatacacagatcgcctccacatttatcgcggtggtgcaggccatcgtgcggactgccggcggctgggccgcagcatccgactctcggaagggcggggagccggcaggttattag

SEQ ID NO: 118130 - DNA, 678 bp, synthetic construct
  misc_feature 1..678: note = Description of Artificial Sequence: Synthetic coding sequence
  source 1..678: mol_type = other DNA
atgacaagcgaattcttcgcagcccagctgcgcagtcagatctccgaccacaccacgcatccaatatcctattacaaacctgagttttatacaccagacgatgggggaaccgcgcatctgtcagtagtggcggaagacggttccgcggtcagcgctacttccaccatcaatctttatttcggctcgaaggtttgttcacccgtcagcgggatcctgtttaacaacgagtggacgactagtgcactgcccgcttttactaacgagtttggcgcgccgcccagcccagcaaacttcatacaacctggtaagcagcccctgctgtcaatgtgccccactataatggtgggtcaggacgggcaggtgcgaatggtcgtgggagctgctggaggcacccagatcacaaccgacaccgctctcgcaatcatttataatctgtggttcgggtatgacgtcaaacgcgcagtggaagagccaaggttgcataacaagcttctacccaatgtgaccacggtggagaggaacatcgaccaggcggtgacggccgcgttagagacaaggcaccaccatacacagatagcgagtacattcattgcggtggtccaggccattgtcagaacggctggaggctgggccgccgcttccgactctcgcaagggcggcgagccagcaggctactag

SEQ ID NO: 118131 - DNA, 711 bp, synthetic construct
  misc_feature 1..711: note = Description of Artificial Sequence: Synthetic coding sequence
  source 1..711: mol_type = other DNA
ccagccctgggcagtcagcaggttgtaagaaatatgaccagcgagttttttgcggcccagctgcggtctcaaatatctgaccacactacacacccaatatcttactacaagccagagttctatacaccagatgacggcggtaccgctcatctgtccgtagtggccgaggatggaagcgcggttagcgccactagcaccattaatctgtacttcggtagcaaggtatgcagtccagtgagcggcatacttttcaacaatgaatggactacttcggctctgccagcgttcaccaacgagtttggggcccctccatccccggccaacttcattcagcctgggaagcagccgttgttaagcatgtgcccaaccattatggtgggtcaagacggtcaggttcgcatggtcgtgggagcagctggaggcacccagatcacaacggacactgcattggcgatcatctataacttgtggttcggatatgatgttaagcgggccgtcgaggagccccgtctgcacaataagctcctgccaaacgtaaccacagtggaaaggaatatcgaccaggccgtgacagctgcattagagaccagacaccaccatacacaaattgcctctacattcatcgcggtcgtgcaggctatcgtgcgaactgccgggggatgggctgccgcctctgattccaggaaaggcggcgagccagccggctactag

SEQ ID NO: 118132 - DNA, 675 bp, synthetic construct
  misc_feature 1..675: note = Description of Artificial Sequence: Synthetic coding sequence
  source 1..675: mol_type = other DNA
atggtggctgcggttttgctcggcttgagttggttgtgttccccactcggggcgcttgtcctggatttcaataacatccgcagtagcgcggatctgcatggcgcccggaaggggagtcagtgcctgtcagatacagactgtaataccagaaagttttgtctgcagcctagggatgaaaagcctttttgcgctacatgcaggggcctgcgacgccgttgccagcgggatgccatgtgttgtccggggaccctgtgtgtgaacgatgtgtgtaccaccatggaagacgccacacctatcctggagagacagcttgacgagcaggacgggactcacgccgaggggaccactggccaccctgtccaggagaaccaaccaaaacggaagcctagcatcaagaagagccagggtcgtaagggccaggaaggggagtcctgtttacgcacatttgattgcggtccagggctctgctgcgcccggcacttctggaccaaaatttgtaaaccggttttgctcgagggacaagtgtgtagtagacggggccacaaagacactgctcaggctcctgaaattttccagcggtgcgattgcggacctggccttttgtgccgcagccaactgactagcaatagacagcatgctcgactgcgggtatgccaaaagattgagaaactttag

SEQ ID NO: 118133 - DNA, 873 bp, synthetic construct
  misc_feature 1..873: note = Description of Artificial Sequence: Synthetic coding sequence
  source 1..873: mol_type = other DNA
atgcggctcaattccaccggtgaagtgcccgtcttgattcacggggagaacattatctgcgaagccacccagatcatcgactaccttgagcagacgtttctggacgagcgcactccccggttgatgccggacaaagaaagcatgtattacccccgtgtccaacactaccgcgaactcttagatagtctgcccatggatgcctacactcacggctgtattctgcatcccgagctcacagttgactccatgattccagcctacgccactacccggatcaggagtcagatcggaaataccgagtctgagcttaaaaagttggccgaggagaatcctgacctacaagaggcatatatcgctaaacaaaagcgccttaagagcaagctgcttgaccatgataatgtcaagtatttgaagaagatcttggacgagttggagaaggtcttggatcaggtggaaaccgaactgcagcggagaaacgaggaaacccctgaagaaggccagcaaccatggctttgtggcgagtctttcacattagccgacgtgtccctggccgtgactctgcatcgtttgaagttcctgggcttcgctaggagaaactggggcaatggcaagaggcccaacctcgaaacctattacgagagagtgttgaaacgtaaaacttttaacaaagtgttgggccatgtaaacaatatcttgatctccgcagtcttgcccaccgccttccgggttgccaaaaaaagggcaccaaaggttctgggaacaactctcgtggtcggcctgctcgcaggggttggatatttcgctttcatgctattcagaaagagactggggtcaatgattctcgccttcaggccccggccgaattatttctag

SEQ ID NO: 118134 - DNA, 1632 bp, synthetic construct
  misc_feature 1..1632: note = Description of Artificial Sequence: Synthetic coding sequence
  source 1..1632: mol_type = other DNA
atgggagactggaatctgctgggaggaatcctggaggaagtccacagccacagcacaatcgtgggaaagatctggctgacgatcctcttcatttttcgtatgctagtactgcgggtggcagcagaagacgtttgggatgatgaacagagcgccttcgcctgtaacacccgccagcccggctgtaataacatctgttacgatgacgcgtttccaatttccctaatccgtttttgggtgcttcagatcattttcgtctcttctccttcactggtgtatatgggtcatgcactgtataggctcagggccttcgagaaagaccgccagagaaagaaaagccacctgagggcccaaatggagaacccagatctggatctggaagagcagcaacgcattgaccgagaactgcgcaggttagaagaacagaaaagaatccacaaggtgcccttgaaggggtgcctcctccggacatatgtgttacacatcctcacccgctccgttcttgaagtgggctttatgattggccagtacatcctctacggatttcagatgcatcccctctacaagtgtacgcagccaccatgcccaaatgcggtggactgcttcgtctcaagacctacggaaaaaaccatttttatgctgtttatgcactctattgccgctattagcttactgctgaatatcctggagatcttccatctggggattaggaaaatcatgcgcaccctgtacaagaaatccagctctgagggaatcgaggatgaaactggaccaccatttcatctgaaaaaatacagcgtggcccagcagtgtatgatctgttccagcctgcctgagaggatctctccactccaagctaataaccagcagcaggttatccgggtgaacgtccctaagtccaagactatgtggcagattccccaaccaaggcagctggaagtggacccatccaacggtaagaaggactggtccgaaaaggatcagcactccggccaactacacgtgcacagcccttgcccgtgggctgggagcgcaggaaatcaacacctggggcagcagtctgaccactctagctttggactgcaaaatacaatgtcacaatcatggcttggtactactaccgccccccgaaactgtccctcatttgcagtgggtacctgggagcagtcacaggatccagagcctagtggcgagccactgaccgatctccactctcactgccgggactccgaggggtctatgcgcgaatccggagtgtggatcgatagatctcgtcccggctctagaaaggcctcattcttgagtcgactcctttccgaaaagcgccacttgcattctgattcaggaagttctgggtctaggaactcatcatgcttggacttcccccattgggagaatagtccctctccgttgccaagcgtcactgggcatcgtacttccatggtgaggcaggctgccctccctatcatggagttgagccaagagctgttccattctggctgcttcctctttccctttttcctacccggggtgtgcatgtatgtatgcgtggatcgagaggctgatggtggaggcgattatctctggcgcgataagatcattcattccatccattccgtcaaattcaactcctag

SEQ ID NO: 118135 - DNA, 1308 bp, synthetic construct
  misc_feature 1..1308: note = Description of Artificial Sequence: Synthetic coding sequence
  source 1..1308: mol_type = other DNA
atgggtgactggagctttctggggcgcctcttagaaaacgcccaggaacattcaactgttatcggcaaggtgtggctcactgtgctctttatcttcagaatcttagtgctgggcgccgctgccgaagatgtttggggagatgagcagagtgatttcacttgtaacacacagcaacccggatgcgagaacgtctgctatgacagagccttcccaatcagtcatatccgattctgggcactgcagatcatttttgtttcaacccctaccttgatttacttaggccacgttctccacattgtgagaatggaggagaagaaaaaggagcgcgaggaggaagaacagctcaagcgggagtcaccttcacccaaagaacctccccaggataaccccagctccagggacgacagaggccgtgttcggatggcaggcgcattgctcagaacttacgtatttaacatcatttttaagactctgttcgaagtaggattcatcgctggccagtatttcctgtatgggtttgagctcaagcccctgtaccggtgcgataggtggccttgtccaaacacagtagactgtttcatttcccgtcccactgaaaagacaattttcatcatatttatgctcgcagtggcctgtgcctccctgctgttaaacatgctggagatctaccacttaggctggaagaagttaaagcagggggtgacatcccggttaggtcctgacgcctctgaggcacctctgggaaccgcggatcccccccccctcccaccctcgagtcgccctcccgcagtcgcgattgggttccccccgtactacgcccacaccgcagctcccctggggcaggcaagagcagtgggataccccggtgcacctccacccgccgcagactttaaactgctcgccttgacagaagccagaggcaagggccaaagtgccaagctctacaacggtcatcaccacctgcttatgacagagcagaattgggccaatcaagccgctgaacgtcagccccccgcattgaaggcatacccggccgcctcaacccctgctgccccatccccagtgggatcttcgtctccaccactcgcccatgaagcggaggctggggccgcgcccctcttgttggatggcagtgggtcatcattagaaggaagcgcacttgctggtacacccgaagaggaagagcaagccgtgactactgctgcacagatgcaccagccaccgctccccttaggagatccaggtcgcgccagcaaagctagccgcgcttctagcggccgggcacgccccgaggacttagcaatatag

SEQ ID NO: 118136 - DNA, 1002 bp, synthetic construct
  misc_feature 1..1002: note = Description of Artificial Sequence: Synthetic coding sequence
  source 1..1002: mol_type = other DNA
atgggggactggggattcttggaaaagctgttggaccaggtacaagaacacagtacagtcgtcggcaagatctggctaacggtccttttcatctttcgcatccttattctcggcctggcgggcgaaagcgtgtggggcgatgagcagagcgactttgaatgtaataccgcccagcccgggtgcaccaatgtctgctacgatcaggcatttccaatctcccacatcaggtactgggtgctgcagtttctgtttgtcagcacacccacactggtgtacctgggccatgtgatctacttgtcccgcagagaggaacggctacggcagaaagagggtgagctaagagccttgccagccaaggacccgcaggttgaaagggccctggctgccgtggagcgacagatggccaaaatcagcgtagccgaggatggtcgcctgcgcattcggggagcactcatgggaacgtacgttgcctccgttctctgcaaatcagtcctggaagccggcttcctgtacggacagtggagactgtacggatggaccatggaaccagtgtttgtgtgtcaacgtgcgccttgcccatatctggtagactgttttgtgagtagaccaacggaaaagacaattttcatcatcttcatgctggtagtcgggctgatttcactggtgcttaacttgttggaactcgtgcacctattgtgccgttgcctgtcaagaggaatgagagcccggcagggccaggacgcccctccaacccagggtacgtcgtcagacccctatactgaccaagttttcttttacctgccagtggggcagggacctagctcaccgccttgcccaacctacaacgggctttcctcctcggagcagaactgggccaatttgacgacagaggagaggctcgcttcctctcggccacccttattcctggaccctcctccacagaacggccagaagcctccatctcgcccctcatctagcgcaagcaaaaagcagtatgtgtag

SEQ ID NO: 118137 - DNA, 879 bp, synthetic construct
  misc_feature 1..879: note = Description of Artificial Sequence: Synthetic coding sequence
  source 1..879: mol_type = other DNA
atgggcgactggggcttcctggagaaactcctggaccaggtacaggagcactcgaccgtggttggcaagatttggctgacagtgctgtttatctttcgcatattgatcctgggcctcgctggcgagtccgtctggggcgacgagcaaagcgattttgaatgcaatacggcacagcccggatgcaccaacgtttgttatgaccaggcgttccccatatcccatattcgatattgggtattacagtttctgttcgtcagcactcctacactggtctacctggggcacgtgatttatttgagtcggcgggaggagcgactccggcagaaggagggggagttacgtgcattgcctgccaaggatccccaagtagagagagccctggccgctgtcgagagacagatggctaagatttcagtggctgaagatgggaggcttcggattcgtggggcactaatgggcacgtacgtcgctagtgtgctctgcaagtcggtgttagaagctggctttttatacggacagtggcgactctatggctggacaatggagcctgtgtttgtgtgtcagagagctccttgtccctatcttgtggattgtttcgtctccaggcccactgagaaaactatctttattatctttatgctggttgtgggtttgattagccttgtccttaacctgctagaactcgtccaccttctgtgccgttgtctctcaaggggcatgcgggccagacagggccaggatgcccctccaactcagggcactagctctgacccctacacagaccaagtcttcttttatttacccgtcggccaagggccgagcagccccccttgtcctacctacaatgggctgtcctccagtgagcaaaattgggcttag

SEQ ID NO: 118138 - DNA, 882 bp, synthetic construct
  misc_feature 1..882: note = Description of Artificial Sequence: Synthetic coding sequence
  source 1..882: mol_type = other DNA
atgggcgactggggatttctggagaagttgctcgatcaggtccaagaacatagcactgtggtcggcaagatctggctcaccgtattgttcatctttcgaatactaatcttggggctcgccggggaaagtgtgtggggggacgagcagagcgatttcgaatgcaacacagctcagcccggttgcacaaacgtatgttatgaccaggcttttcctataagccatattaggtattgggttctgcaatttctctttgtatcgacacctaccctagtttatttgggtcacgttatttatctgtctcggagagaagaacgtcttaggcagaaggagggggaactgcgggcccttcccgctaaagacccacaggtcgagcgggccctcgcggcggtcgagcgtcaaatggccaaaatctccgtcgccgaagacggccgtctgcgaattcgcggtgccctaatgggtacatacgtggcctctgtgctttgtaaatctgtacttgaagcaggttttctgtatggtcaatggaggctttatggatggaccatggaacctgtattcgtttgccagcgtgccccttgcccttatctcgtggactgttttgtgagtcggcctactgaaaaaaccatatttatcatctttatgcttgtggtcgggctgatatccctcgtgctcaacctgctagagctggttcacctgctttgccgctgtttgtcccgcggcatgagggccagacagggccaggacgcacctccaacccaggggacaccacagacactcacccgaaccaggtcctcatccacatcaccctgggcccgtggaccacaccctcatcatgcccctccaacaatggggtcccatcccgtcagtcgcaccggacccacatag

SEQ ID NO: 118139 - DNA, 1077 bp, synthetic construct
  misc_feature 1..1077: note = Description of Artificial Sequence: Synthetic coding sequence
  source 1..1077: mol_type = other DNA
atgggcgactggtcctttctgggtaactttttagaggaggtccataagcacagtactgtcgttggcaaggtgtggctaactgtgcttttcattttccggatgctggttcttggaaccgcagcagaaagcagttggggtgacgaacaggctgattttcgatgtgatactatccaacctgggtgccagaatgtctgttatgaccaagccttccccatcagccatatacgttactgggtgctgcagattatcttcgtctcaacacctagcctagtgtacatgggacatgctatgcatacggttcggatgcaggagaagcggaagctccgcgaagcagaacgcgccaaagaggtcagaggatctggaagctatgaataccccgtagccgaaaaggccgagttgtcatgttgggaagaggggaacggtcggatcgcgcttcagggcaccttgcttaacacctatgtgtgcagcatcctgattcgcacaacaatggaggtggggttcatcgtaggacagtactttatatacggtatattcctgacgacgctccacgtgtgccgtcggagcccttgcccccaccctgtgaattgttacgtctcccgtcccactgaaaaaaacgtgtttatcgtcttcatgttagccgtcgccgcattgtccctgctgctttcgctggcggagctttaccatttgggttggaagaaaatacgccagcggttcgtaaaaccaagacaacacatggctaaatgccagctgagtggtccttccgtcggaatcgtccaatcctgcaccccacccccagactttaatcagtgtctggagaatggcccaggtggaaagttctttaatccattctctaataacatggcctcccagcagaataccgataatctcgtgacagaacaggtacgcggtcaggaacagactcctggggaaggcttcatccaggtccgctacggccaaaaacccgaggttcctaatggagtctcaccaggtcaccgattgccccacggctatcactctgataaaagacggctaagcaaggcatcctcaaaggcgaggagtgacgatctttcagtgtag

SEQ ID NO: 118140 - DNA, 1077 bp, synthetic construct
  misc_feature 1..1077: note = Description of Artificial Sequence: Synthetic coding sequence
  source 1..1077: mol_type = other DNA
atgggagattggtcgttccttggcaatttccttgaagaagtacataagcacagcacggttgtgggaaaggtctggctgactgtgttgttcatctttcgcatgcttgtgctcggtaccgccgccgaatctagttggggggacgagcaggcagacttcagatgcgacacaatccagcctgggtgccagaatgtatgttacgaccaggcttttcctataagccacatccgctactgggtacttcaaatcattttcgtttccacgccatcattggtatacatgggacacgctatgcacacggtgagaatgcaggagaagaggaaactgcgggaggctgaaagggctaaagaggtgaggggttctgggtcatacgagtacccagtagctgagaaggccgaactcagctgttgggaggaagggaatggtaggatagcacttcagggaactctcctgaacacatacgtgtgctctattctgatccggacaacaatggaagtgggctttattgtaggacagtatttcatctatggcatctttctcacgacactacacgtgtgccgccggagcccatgcccccaccccgtgaattgctatgtctcccgccccaccgagaagaacgtgtttattgtcttcatgctagcagtcgccgccctcagcctactgcttagcctcgctgagctctaccatctcggttggaaaaaaatcagacagagatttgttaaaccccggcagcacatggcaaaatgtcagttgtccggacccagcgtgggtatagttcagtcttgcaccccccctccagactttaaccagtgccttgagaacggccctgggggcaaattttttaatcctttctctaacaacatggccagtcagcagaacaccgataacctcgttacagaacaggtgcgtggccaagaacagactcctggagagggttttatccaggtgaggtatggccaaaagcctgaggtcccaaacggcgtgtctccagggcatcgactgcctcatggatatcactcagacaaacgccggctgagcaaagcttcatctaaggccagaagcgatgatctttctgtgtag

SEQ ID NO: 118141 - DNA, 759 bp, synthetic construct
  misc_feature 1..759: note = Description of Artificial Sequence: Synthetic coding sequence
  source 1..759: mol_type = other DNA
atgggcgattggagtttcctgggtaattttctggaggaagttcacaagcacagtaccgtcgtggggaaagtgtggctgacagtcctgtttatctttagaatgctcgtgcttggcactgccgccgagagttcgtggggggatgagcaggccgatttccgatgtgatactatacagcccggctgtcagaatgtgtgctacgaccaggcatttcccatctcccacatccgctactgggtcctgcagatcatctttgtgagtacgcctagcctggtgtacatgggccacgctatgcacacagtgagaatgcaagaaaaaagaaaactacgtgaagccgagcgtgccaaggaggttcgcggatcaggctcctacgaataccctgtggctgagaaggctgaattgtcatgttgggaggaggggaacggacggatcgcccttcagggcacactgctcaacacctacgtgtgctctatcttgattagaaccactatggaggtgggctttatcgttggacagtacttcatttacggcattttcctaactactctgcacgtgtgccggcgctcgccatgcccccaccccgtaaactgctatgtaagtagaccaacggaaaagaacgtgttcattgtgttcatgctcgccgtagcagccctgtcacttctgttgtcgttggcagagctataccacttggggtggaagaaaattcggcagaggttcgttaagcctcgccagcatatggcaaagtgtcaactgtcgggctag

SEQ ID NO: 118142 - DNA, 1302 bp, synthetic construct
  misc_feature 1..1302: note = Description of Artificial Sequence: Synthetic coding sequence
  source 1..1302: mol_type = other DNA
atgggcgactggagctttcttggcaatatcctggaagaagtaaatgaacatagtactgtcataggacgcgtttggcttacggtgctgttcatctttcggatactcattcttggtaccgcagcagaatttgtgtggggtgatgagcaatctgatttcgtgtgtaatacgcagcagcccgggtgcgaaaacgtctgctatgacgaggccttccccatttcccatatccgcctatgggtactccagatcatatttgtgagcaccccgagcctgatgtacgtcggccacgccgtgcattacgttcgaatggaagagaaacgtaagagtagggaagccgaagagcttggacagcaggcaggcacgaacggcggccctgaccagggctctgttaagaagtcttccggctctaaagggactaaaaagtttcgcctagagggtactctcctacggacctatatctgtcacattatattcaaaaccctgttcgaggtggggtttatcgtgggtcattatttcctctacgggtttcgcatactgcccctataccgttgtagccgctggccatgtcccaacgtggtggattgcttcgtgtctaggcctaccgagaaaacaatttttatcttgtttatgctgagcgtggcaagtgtgagcctgtttctgaacgtcatggaactgggacatcttggtcttaaaggaatccgctctgccctcaaacgccccgtggagcagccgctgggggagattccagagaagagcctgcacagcattgccgtttcctctattcaaaaggcaaaaggctatcagctgctggaagaagagaaaatcgtctcccattatttcccattaaccgaggtgggcatggtggagacctcaccactccctgccaaaccatttaaccagttcgaggagaagatatcaactgggcctcttggagatctgtcccgtggataccaggagaccctcccatcatatgcccaggtcggcgctcaggaagttgaaggggagggaccacccgctgaagagggagcagagccagaagtgggggagaagaaagaggaagccgagcgcctgaccacagaggaacaagaaaaagtggccgtccccgaaggagaaaaagtagaaacccccggtgtggacaaggaaggtgagaaggaggagccccagtccgagaaggtgagcaaacaggggctgccggccgaaaagacaccaagtctctgtccggaattgacaacagacgacgctcggcctctttctagactgagcaaggcgagttctagagcccggtccgacgatctaaccgtgtag

SEQ ID NO: 118143 - DNA, 1302 bp, synthetic construct
  misc_feature 1..1302: note = Description of Artificial Sequence: Synthetic coding sequence
  source 1..1302: mol_type = other DNA
atgggagactggtctttcttgggaaacatcttggaagaagttaacgaacactcaaccgttatcggacgggtgtggctgaccgtgctatttatattcagaatcctgatcctggggacagctgctgaatttgtatggggtgacgaacagagcgactttgtttgtaacacccaacagcctggctgcgagaatgtttgttatgacgaggcgttccctatttcccacataagactatgggtacttcagatcatctttgtgtctaccccgtcgctgatgtacgtgggccatgcggtccactacgtgagaatggaagagaagcgaaagtcacgcgaggctgaggaactgggccagcaggcaggtaccaatggtggcccagaccagggatcagttaaaaaaagctcagggagcaaaggcaccaagaagtttcgtcttgagggcaccctactgcgcacgtacatttgccatattatattcaaaaccctctttgaagtcggctttattgtgggacattattttctttatgggtttagaatattacctctgtaccgctgttcccgctggccttgccctaatgtggtggactgctttgtgagccgcccaaccgagaagacgattttcatactgttcatgctctccgtggccagcgtgagtctgttcttgaatgttatggaattagggcatctgggcctaaagggaatacgctcagccctgaagcgcccagtagaacagcctctgggtgaaatccctgaaaaaagtcttcactctattgctgtctcatcgatccagaaggccaagggttatcaattattggaagaggagaagatcgtgtcccactattttccgttgacggaggtgggaatggtcgaaaccagccccttaccggccaagccttttaatcaattcgaggagaaaatcagcaccggtcccctgggggatctgagccgaggctatcaggagaccctaccctcgtacgcccaggtgggagcacaggaagttgaaggcgaagggcctccagccgaagagggggccgagcccgaggtcggagagaagaaggaagaggcggaaaggttgacgactgaagaacaggagaaagtagccgtgccggaaggcgaaaaggtggaaacaccgggtgtcgataaagaaggggaaaaggaagagccccagtctgagaaagtctccaaacagggtcttccagctgaaaaaacgccgagcctgtgtcccgaactgactaccgacgatgctcgacccttaagccgactgtcaaaagcaagcagccgtgcacgatctgacgacctgacagtgtag

SEQ ID NO: 118144 - DNA, 1548 bp, synthetic construct
  misc_feature 1..1548: note = Description of Artificial Sequence: Synthetic coding sequence
  source 1..1548: mol_type = other DNA
atgggggattggaacctcctgggcgatacccttgaggaagtccacattcactccaccatgatcgggaaaatctggttgaccatactgttcattttcagaatgctggttctgggagttgccgccgaggacgtgtggaacgacgagcagagcggtttcatctgcaacaccgagcagcccggctgccgaaatgtttgctacgaccaggcctttcccatcagtctgattcgatactgggtgcttcaagttatcttcgtatcaagccccagtctcgtgtatatgggacacgccctctaccggttgagagtacttgaggaggagcgtcagaggatgaaggctcaattaagagtcgagctggaagaggtcgagtttgagatgccccgtgaccggcggcggctggaacaggagctgtgccagctggagaagcggaagctgaacaaagcaccgctccgcggtacactcctctgcacgtatgtgattcatatattcaccagaagcgtcgtagaggtcgggttcatgattggccaatatcttctgtacggattccaccttgaacccttgttcaagtgtcacggccatccctgtccaaacatcatcgattgctttgtgagtcgaccaaccgagaaaacaatcttcttgctctttatgcagagcatagccactataagtctgttcttgaatatcctcgagatcttccatctcgggtttaaaaagattaaaagagggttatgggggaagtacaaactgaagaaggagcataacgaattccacgcaaataaggcaaagcagaatgttgcgaagtaccagtctaccagcgctaatagtctgaaacgattgccttctgctcccgactataatcttctcgtggagaagcaaacccacaccgcagtttatccctcactcaattcatcgagtgtcttccaaccaaaccctgacaaccactccgtcaatgatgagaagtgtattcttgatgagcaggagactgtgctgtctaacgagatttctactctgtccacttcttgctcccacttccaacatatatcatctaacaacaacaaggatacgcacaaaattttcgggaaggaactcaacggcaatcagctgatggaaaagcgcgagacggaaggcaaggatagcaagagaaactactactcccgagggcaccggagcatcccaggggtggctattgacggcgagaataacatgaggcagtcccctcagacagttttcagcctgccggcaaactgtgattggaaaccaagatggttaagggcaacatggggctctagcaccgaacacgagaatagggggtctcctcctaaaggaaacttgaagggacaattcaggaagggaaccgttaggactctgcccccctcccaaggtgattcccagagtctggatattcctaatacagcagatagcctgggcggcctctcattcgagccagggctggtccgaacatgtaacaatcccgtgtgccctccaaaccatgtcgtctctctcaccaataacctcattggcagaagggtgcctaccgacctgcagatctag

SEQ ID NO: 118145 - DNA, 1548 bp, synthetic construct
  misc_feature 1..1548: note = Description of Artificial Sequence: Synthetic coding sequence
  source 1..1548: mol_type = other DNA
atgggggattggaatctgctaggcgacactctggaggaggtgcacatccattccaccatgatcggcaaaatctggctaacaattctgttcatatttcgtatgctggtcctgggagtggcggccgaggatgtttggaacgatgaacagagcggctttatttgcaataccgagcagccgggctgcaggaatgtgtgctatgatcaggcctttccaatctctctaattcggtactgggtactgcaggtgatttttgtctcaagtccttcccttgtgtatatggggcacgccctgtaccggcttcgcgtcctggaggaggagcgtcaacgcatgaaagctcagttgagggtcgagttggaagaagttgagttcgagatgccgcgggaccgaagaagactggaacaagaactttgtcagctggaaaagcgtaagttaaacaaagcccctctgcgtggtacacttctgtgcacatacgtgattcacatctttacccgttctgtagtggaagtgggcttcatgatcggccagtacctcctgtatgggtttcacttggaaccattgttcaagtgccatgggcatccttgtcccaacatcatcgactgcttcgtgtctagacctactgagaaaacaatttttctcttatttatgcagtctattgccaccataagcctgtttctaaacatccttgaaatctttcatctaggtttcaagaagataaagcgcggactgtgggggaagtataagctgaagaaggagcataacgagttccacgcgaataaggctaaacagaacgttgctaagtaccagagtacctctgccaacagcctgaagagactcccctctgcgccagactataacttgcttgtggagaagcagacccacactgccgtctacccgtcattaaattcatcctcagttttccagcccaaccccgataatcactcagtgaacgacgagaagtgcattcttgacgaacaagagactgtactcagcaacgagatcagtaccctctctacgtcatgcagtcatttccagcatatttcgagtaataataacaaggatacccacaagatatttggcaaggagctgaacggcaaccagttaatggagaagcgggagacagaaggcaaagatagtaaacgcaactattactcacgcggccaccggagcattccaggcgtggcaatagacggggagaataatatgaggcaaagtccgcaaacggtgtttagcctgcccgccaattgcgactggaaaccgaggtggctaagagccacctggggcagctcaacagaacacgaaaacagaggatcccccccaaaaggcaatctgaaaggtcaatttagaaaaggaaccgtgaggactctcccacctagtcagggagattctcagagccttgacatcccaaacacagctgactctcttggaggattatctttcgaacccggcctcgtgcggacttgcaacaaccccgtgtgtccgcccaaccacgtggtgtcccttactaataatctgatcggccggcgggttcccactgatctgcagatttag

SEQ ID NO: 118146 - DNA, 1545 bp, synthetic construct
  misc_feature 1..1545: note = Description of Artificial Sequence: Synthetic coding sequence
  source 1..1545: mol_type = other DNA
atgggagactggaatctcttgggcgacacgctcgaggaagtgcatattcattccactatgattggaaaaatctggctgaccattctgttcatttttcggatgcttgtacttggggtagccgctgaggacgtgtggaatgacgaacagtccggcttcatctgcaatacagaacagcctgggtgccggaatgtatgttacgatcaggctttccctatctccctgattaggtactgggtgctccaggttatctttgtgtcgagcccttctctggtgtacatgggacacgccctgtatcggctcagagtactcgaggaggagcgacaacggatgaaagctcagcttcgcgtcgagttggaagaggtggaattcgaaatgcctcgcgacaggaggcgcttggagcaggaactgtgccagctggagaaaaggaagctcaataaggcacctctgaggggcactctcttatgcacttacgttattcacatctttaccaggtcagtggtcgaagtggggtttatgatcgggcagtatctgctgtacggatttcatctggaacccttgtttaaatgccacggtcacccgtgcccgaacattatagactgttttgtaagcaggcctacagaaaaaaccattttcctcctattcatgcagtccattgcgacgatttccctgttcctcaatatcctggagatttttcatctgggcttcaagaagattaaaaggggcttgtggggtaaatataaactgaagaaggagcataacgaatttcacgccaacaaagccaagcagaatgtagccaaatatcagtctacatctgcaaacagtttaaagagactcccatccgctccagactataacctccttgttgaaaagcagacgcatacagcagtctacccttctttaaacagctccagtgtcttccagccgaatcccgataaccactctgttaacgacgagaaatgtatactcgatgagcaggagaccgttctctctaacgagatcagtacattgagtacgtcatgctcacatttccaacacatcagctctaataataacaaggacacacacaagatttttggcaaggagcttaacggaaaccagttaatggaaaagagagaaacagaagggaaggactcaaagcggaactattatagcagaggtcaccgatctattccaggtgtggctatcgacggcgagaataatatgcgccagtctccccagactgtcttttctttaccagctaactgtgactggaaacccagatggttgagagccacttggggtagtagtaccgaacacgagaataggggcagccctcctaaagtccctggcagtaaagccaccgcctccagtctgctgctgatattgcagaggcccaccagctcccaaccccgcttgaaggagacacccaagatcaaggctgaggccaaaatctacgactccaagcaccccccgcggctgcttcagagcactgtctccacatttagtggtcgagagccccgatctcctgcccccatggggcatcattcctttagagggccccgctag

SEQ ID NO: 118147 - DNA, 852 bp, synthetic construct
  misc_feature 1..852: note = Description of Artificial Sequence: Synthetic coding sequence
  source 1..852: mol_type = other DNA
atgaactggaccgggctgtacactttgctgagtggagtgaaccgtcattccacagcgatcggccgggtctggctctcagtgatttttatctttagaattatggtccttgtggtagctgccgagtccgtgtggggagatgaaaaatcctctttcatttgcaacaccctgcagccaggctgcaattccgtgtgttacgatcagttctttcctatttcacacgtgcgcctgtggagtctgcagctgatactggtttcaaccccagccttactggtggctatgcatgtggcacaccagcagcatatcgaaaaaaagatgctccgcctggaggggcacggagaccccctccacctggaagaggtcaaacggcacaaagtacatatctcagggaccctctggtggacctatgtgatttccgtcgtgtttcggttgctgttcgaggcagtgttcatgtatgttttctacttgctgtatcctgggtatgcaatggtgcgcctggtgaagtgcgatgtgtacccatgcccgaacacagtggactgcttcgtgagcaggccaaccgagaagacagttttcaccgtgttcatgctggctgcctctggtatttgcatcatcctcaacgtcgcagaagtcgtgtacctaattatcagagcctgtgctcgccgcgcacaacgcagatcaaatcctccgtccaggaaaggctctggattcggacacaggctgtccccggaatacaagcagaatgagattaacaagctgttgtcagagcaggacggctccttgaaagatatactcaggaggtctccgggtaccggagccggactagccgaaaagagcgatagatgcagcgcttgctag

SEQ ID NO: 118148 - DNA, 852 bp, synthetic construct
  misc_feature 1..852: note = Description of Artificial Sequence: Synthetic coding sequence
  source 1..852: mol_type = other DNA
atgaattggacaggcttatataccttgttgtccggggttaacaggcactctacagccataggcagagtctggctgtccgtcatttttattttccggatcatggtccttgtggtcgcagctgaaagcgtttggggggatgagaaaagttcgtttatctgtaataccctccagcccggttgtaacagcgtgtgttatgaccagttcttcccgatcagccatgtccggttatggagtcttcagcttatcctggtgagcacaccagccctgctagttgcaatgcacgtggctcatcaacagcacattgagaaaaagatgctgagactggaaggtcatggcgatcctcttcatttagaggaggttaagcgccacaaagttcatatttccgggacgttatggtggacctacgtgatcagcgtcgtgttccgccttttatttgaggcagtgttcatgtacgtgttctatcttctctatcccggctatgccatggtgcgattggtgaaatgtgatgtttatccctgtccgaacacagtcgattgttttgtgtcacggcctacggaaaagactgtcttcacagtgttcatgctggccgcttccgggatttgtatcatcctgaatgtggcagaggtggtgtatctgattattcgggcatgtgcacggagagcacagaggaggtccaacccccctagtaggaagggctctggctttgggcatcgtctctctcctgagtacaagcagaacgagataaataaactgctgtcagagcaggatggttccctaaaagatatcctccgccgatccccaggaacgggagccgggctggctgagaaatctgatcgctgtagcgcctgctag

SEQ ID NO: 118149 - DNA, 852 bp, synthetic construct
  misc_feature 1..852: note = Description of Artificial Sequence: Synthetic coding sequence
  source 1..852: mol_type = other DNA
atgaattggacgggcctatataccctgctgagcggcgtgaacagacattctaccgctatagggagggtttggctatcggtgattttcatcttccggatcatggtgttggtcgtcgccgcagaatctgtgtggggcgatgagaaatcatcattcatctgtaataccctacagccagggtgtaactccgtgtgttatgatcagttcttccccatctcacatgtgcgcttatggtccctccaactgattctggtctccacaccggccctcctcgttgctatgcatgtggcacatcagcagcacatcgaaaaaaaaatgttacgtcttgagggacatggcgacccactccatttggaagaggttaagagacacaaggtacatatcagcggcacactatggtggacctacgtgatttctgtggtctttagattgttgttcgaggccgtgtttatgtacgtcttctatttgctgtaccccggatacgctatggtgagactggttaagtgcgacgtctatccgtgcccgaacaccgtggattgctttgtatctcgccccactgaaaagaccgtttttaccgtgttcatgctagcggcctctgggatctgtatcatactcaatgttgctgaagtggtgtacctcatcatcagggcttgcgcaaggcgagcccaacgaaggtctaaccccccttctcggaagggctccggtttcggccatcgcctgtcacctgaatacaaacagaatgaaatcaacaagctactgtccgaacaagacgggagcttgaaggatatcctccggagaagcccaggaaccggcgccgggctggctgaaaagtccgataggtgctcggcctgttag

SEQ ID NO: 118150 - DNA, 255 bp, synthetic construct
  misc_feature 1..255: note = Description of Artificial Sequence: Synthetic coding sequence
  source 1..255: mol_type = other DNA
atgaattggactggcctgtatactctgctatctggagtgaataggcacagcaccgcaataggtagagtgtggctgtcagttatctttatattcaggataatggtgctggtcgtggcagccgagagtgtgtggggcgacgagaagtctagttttatctgcaataccctgcaacccggttgtaactcagtgtgttatgaccagtttttcccaatctcccacgtaagactgtggtctttgcagctgatcctggtgtag

SEQ ID NO: 118151 - DNA, 681 bp, synthetic construct
  misc_feature 1..681: note = Description of Artificial Sequence: Synthetic coding sequence
  source 1..681: mol_type = other DNA
atggactggggcactctgcagactatcctgggaggggtcaacaaacacagcacctccattggaaagatctggttgacagtgctgttcatatttcggatcatgatcctggtcgtcgccgccaaggaggtctggggggacgaacaggccgacttcgtctgtaacaccctccagcccggctgcaagaacgtgtgctatgaccactacttccctattagccatatccgattgtgggctctgcagttgattttcgtttctacccccgctcttctggtggccatgcacgtcgcttacagaaggcacgaaaagaagaggaaattcattaaaggagagataaaatccgagttcaaggacatcgaggagatcaagacacaaaaggtcagaattgaaggctctctatggtggacctatacatcctccatcttttttagggtgattttcgaagccgctttcatgtatgtgttttacgtaatgtacgacggtttctcgatgcaacggctcgttaaatgtaatgcctggccatgtccaaatactgtggactgctttgtgtctaggcccactgagaagaccgtgtttacagtctttatgatagctgtgagcggaatttgtatacttctgaacgtgaccgaactatgttacttgttgatcagatactgctccggaaaaagtaagaagccagtgtag

SEQ ID NO: 118152 - DNA, 681 bp, synthetic construct
  misc_feature 1..681: note = Description of Artificial Sequence: Synthetic coding sequence
  source 1..681: mol_type = other DNA
atggactgggggactttacaaacaatcctgggcggcgtgaacaaacattctacgagcattggaaagatttggctgacagtgctttttatctttagaatcatgatcttggtggtggcagctaaagaggtctggggcgacgaacaggctgactttgtgtgcaacacattacagcccggctgtaaaaacgtctgctatgaccactacttcccgatctctcatatcaggttatgggccctgcagttaatcttcgtgtcaaccccagccctgttagttgccatgcacgtggcctaccgcagacatgagaagaagcgcaaatttattaagggcgagatcaagtcagaattcaaggacatcgaagaaatcaagacccagaaggtgcgaattgaaggctcattgtggtggacttacacatcaagcattttttttagagtgatcttcgaggcagcttttatgtatgtcttttatgtgatgtacgatggcttttctatgcagcgcctggtaaagtgcaacgcatggccatgccccaataccgttgattgtttcgtgtccagacccaccgagaaaactgtgtttaccgtcttcatgatcgctgtctcagggatctgcatcttgctgaacgtcacagaattgtgttatctgttaattcgttattgtagtggcaaaagcaagaaaccagtttag

SEQ ID NO: 118153 - DNA, 813 bp, synthetic construct
  misc_feature 1..813: note = Description of Artificial Sequence: Synthetic coding sequence
  source 1..813: mol_type = other DNA
atggactggaaaactctccaggccctgttatctggagtgaacaaatattccactgcattcggcagaatttggctttccgttgtgttcgtgttccgcgtgttagtgtacgtagtggctgccgagcgggtgtggggagacgagcagaaggactttgattgcaataccaagcagcctggatgcacgaacgtttgctatgacaattactttccaataagcaacatccggctatgggcccttcaactgatttttgttacttgcccctccctactggtaatcctccatgtcgcctatagggaagagagagagaggcgccaccgtcagaagcacggggaccaatgtgctaagctgtacgacaacgccgggaaaaaacacggtggattgtggtggacctacctattttcattgatcttcaaactgattatagagtttctcttcctctacctcctccatactctttggcacggatttaacatgccccgcttagtccagtgtgcaaatgtggctccgtgtccaaacatcgtagattgctacatcgctcgccccaccgagaaaaagatctttacatattttatggtcggcgccagtgccgtttgcatcgtgctcaccatttgtgagctgtgctatctgatatgccacagggtacttcggggactgcacaaggataagccgcggggcggttgtagcccatcctctagcgcttccagagctagtacctgtcggtgtcatcacaaactggtggaggctggcgaggtagatcctgatccaggcaataataagctgcaggcatcagcacccaatttgacacccatttag

SEQ ID NO: 118154 - DNA, 813 bp, synthetic construct
  misc_feature 1..813: note = Description of Artificial Sequence: Synthetic coding sequence
  source 1..813: mol_type = other DNA
atggattggaagactctgcaggcattactaagcggcgttaataagtatagtacagccttcggtaggatctggttgagtgtggtcttcgtgttccgggtcttagtgtacgttgttgcagcagagcgggtgtggggcgacgagcagaaagacttcgattgtaacaccaagcagcccgggtgcactaatgtctgctacgacaactactttcccatctccaacattcgactgtgggcattgcagttgatttttgtgacctgtccttctctgctggtgatactccacgttgcttaccgggaagagcgtgaaaggcggcataggcagaaacacggggaccaatgtgctaagctctatgacaatgctggcaaaaaacacggtggcctgtggtggacttacctcttttccctcatctttaagctcatcatagaatttttgttcctgtacctactacataccttgtggcacggatttaacatgcctcgtttggtgcagtgtgctaatgtggccccctgccctaacatcgtcgattgttatattgccaggcccacagagaaaaaaatttttacatacttcatggtgggtgcctccgccgtgtgtattgtgctgacgatttgcgaactgtgttacctgatttgccatcgggtgttgcgaggtcttcacaaggacaagccccgcggcggatgctctccgagttcctctgctagtagggcctctacttgccgatgtcatcataagctggtggaagccggagaggtggatcccgatccagggaacaataagttgcaggctagtgcacctaaccttactccgatatag

SEQ ID NO: 118155 - DNA, 765 bp, synthetic construct
  misc_feature 1..765: note = Description of Artificial Sequence: Synthetic coding sequence
  source 1..765: mol_type = other DNA
atggattggaagaccttgcaggctctgctgtctggcgttaataagtattccaccgcgttcggaagaatatggctgagcgtggtctttgtctttcgggttctggtctatgtggtggctgccgagcgcgtgtggggcgacgagcagaaagattttgattgcaacactaaacaaccaggctgcacgaacgtatgttacgacaattactttcccatatccaacatccgactttgggccctacagttgatctttgtcacctgtccgagcttgctggtcatccttcatgttgcctacagggaggagcgcgaacgaagacaccgccagaagcacggagaccagtgcgcgaagctgtacgacaacgccgggaagaagcatggaggcctttggtggacctacctgctgcatacactgtggcatggtttcaatatgccaagactggtgcaatgcgcaaacgtggcaccctgccctaatatcgtggattgctacattgcaagacccacagaaaagaagatctttacctatttcatggttggtgccagcgccgtctgcattgttctcactatatgcgagctgtgctacctaatttgccaccgcgtcctccgaggattacacaaggacaagccccggggggggtgttcaccatcttcatctgctagcagagccagtacttgcagatgccatcataagctggttgaagctggagaagtggaccccgaccccggcaacaataagctgcaggcctctgcacccaatctgacgcctatttag

SEQ ID NO: 118156 - DNA, 801 bp, synthetic construct
  misc_feature 1..801: note = Description of Artificial Sequence: Synthetic coding sequence
  source 1..801: mol_type = other DNA
atgaactgggcattcctgcaaggcctactctcgggcgtcaacaagtatagcactgtcctttcacgtatttggctgagtgtggtgttcatcttccgcgtgttggtgtatgtagtagccgccgaagaggtctgggatgacgagcaaaaagatttcgtgtgtaacacaaagcagccgggctgcccaaatgtgtgctacgacgaattttttccagtatctcacgtacggttatgggcgcttcagctaatcctggtgacctgcccatccttgcttgtggtcatgcatgtagcctatcgggaggagcgggagcgcaaacatcacctcaaacatggtccaaatgcccccagtctgtacgacaatctgagcaagaaacggggcggactgtggtggacctacctcctgtctttaatattcaaggcggccgtcgacgcaggctttctgtatattttccaccggttatataaagactacgatatgcccagggtggtagcctgcagcgttgaaccatgccctcataccgttgactgttatatctcaagacccacagagaaaaaggttttcacttattttatggtgacgactgccgcaatttgtatcttactcaacctttcggaagtgttctaccttgttgggaaacgctgtatggaaattttcggtcccagacatcgcaggcccaggtgcagagagtgtctcccagatacttgtccaccctatgtgttaagccagggagggcacccagaagatggaaactccgtgctgatgaaggctggctccgcccctgtggatgcaggaggatacccctag

SEQ ID NO: 118157 - DNA, 822 bp, synthetic construct
  misc_feature 1..822: note = Description of Artificial Sequence: Synthetic coding sequence
  source 1..822: mol_type = other DNA
atgaactggtccatcttcgagggtctcttgtccggagtcaataagtactctaccgcattcgggaggatatggctttctctggttttcatcttccgcgtgttggtgtacctcgttaccgctgagcgggtatggtctgacgaccacaaagacttcgactgcaacactcgtcaacccggttgctccaacgtttgttttgacgagttctttcccgttagtcatgtccgtctctgggcactgcagctgatactggtgacttgcccgagcctcctggtggtaatgcacgtggcataccgcgaagttcaggagaagagacatcgtgaagcccatggagaaaactccgggagactttacttgaaccccggaaaaaagcgaggcgggctgtggtggacatacgtctgttcacttgtgttcaaggctagtgtggacatcgcctttctgtatgtgtttcactccttctatcctaaatacatactgccccccgtcgtgaaatgccatgctgacccatgtccgaatatcgtggattgtttcatctctaaaccaagtgagaaaaacatatttaccctgtttatggtggctacagccgcaatctgcattcttttaaatctagtggagctgatctacctcgtaagcaagcggtgtcacgaatgtctcgcagcccgtaaggctcaagctatgtgcaccggacaccatccgcatggtactactagttcatgtaaacaagatgatctgctgtccggagacctcatctttctcggatctgactcacatcctcctctcctcccagataggccaagggaccatgtcaagaagacaatcctgtag

SEQ ID NO: 118158 - DNA, 786 bp, synthetic construct
  misc_feature 1..786: note = Description of Artificial Sequence: Synthetic coding sequence
  source 1..786: mol_type = other DNA
atggattggggtacactccatacttttattggtggagtcaacaagcatagtacgtctatcgggaaagtttggatcaccgtgatttttatcttcagagtgatgattctggtggttgctgctcaggaggtgtggggtgatgagcaagaggatttcgtctgcaataccttacagccaggatgtaaaaacgtgtgctacgatcatttcttccccgtgagccatatccgcctttgggcactgcagctcattttcgtgagtacacctgctttgctcgttgccatgcacgtcgcctactataggcacgagacgacacggaaattcagaagaggtgagaagagaaatgactttaaggacattgaggatatcaagaagcagaaagttcgcattgagggaagcctgtggtggacttatacgtcgagtattttcttccggattatattcgaagctgctttcatgtacgtattctactttttatacaatggataccatctgccgtgggtgttaaaatgcggtattgacccatgcccgaacctagtggactgcttcatttctcgaccaaccgagaagaccgtgtttactattttcatgattagcgccagcgtcatctgtatgctgttgaatgtggcagaactgtgttatctgctcttgaaagtttgcttccgaagatccaagagagcccagacccagaaaaaccatccaaaccacgctttgaaggagtcaaaacagaacgagatgaatgaactcatcagtgatagcgggcagaatgctattacaggcttcccctcctag

SEQ ID NO: 118159 - DNA, 786 bp, synthetic construct
  misc_feature 1..786: note = Description of Artificial Sequence: Synthetic coding sequence
  source 1..786: mol_type = other DNA
atggactggggaacactacatacctttatcggtggcgtgaacaaacactctacaagcattggaaaagtatggataacggtgatctttatatttcgcgttatgatcctggtggtcgctgcccaggaagtctggggtgatgagcaggaagatttcgtgtgtaatacgctgcagccagggtgtaagaatgtttgctacgaccatttctttccagtttcccatattcggctgtgggcactgcagctgatattcgtatccacgccagcactgctcgtggctatgcatgtcgcgtactaccgacatgaaactaccaggaaatttaggcggggggagaagagaaatgacttcaaagatatcgaagacatcaaaaagcaaaaggtccgtatcgagggaagcctgtggtggacctacactagcagcatattttttcggatcatctttgaggccgcctttatgtacgtgttttacttcctgtataacggctaccatctaccttgggtgctcaaatgcggtatcgacccttgcccaaatctggtcgactgcttcattagccggccaaccgaaaagactgtcttcactattttcatgatctcagctagcgtaatctgcatgctgttgaacgtggcggagttatgctacctgctgctcaaagtctgtttccgtcgctccaaaagagcacaaacccagaagaatcatccgaaccatgctctgaaggaaagcaagcaaaatgaaatgaatgagctcatctccgactctggccaaaacgccattaccggcttcccatcatag

SEQ ID NO: 118160 - DNA, 786 bp, synthetic construct
  misc_feature 1..786: note = Description of Artificial Sequence: Synthetic coding sequence
  source 1..786: mol_type = other DNA
atggattggggaacactacacacattcattggcggagtgaataaacattcaactagcatagggaaggtgtggattacagttattttcatatttcgggttatgatcttagtggtcgcagctcaggaagtgtggggtgatgagcaggaggactttgtgtgcaatactcttcagcctgggtgcaagaatgtgtgctacgaccacttctttcccgtctcacatatccggctctgggccctgcagttgatattcgtttccacgcctgcattactggtggctatgcatgtagcctactatagacatgaaaccacccggaagttcaggcgaggggagaaacgcaacgactttaaggacatcgaagatatcaagaaacagaaggtgaggatcgaaggttcgctttggtggacttatacaagctctattttcttccgcatcatttttgaagcggcctttatgtacgtcttctattttctctacaatggctatcatctcccatgggtgctaaagtgcggcattgacccctgcccaaatttggtcgactgcttcatttcaagaccaactgagaagacagtcttcactatcttcatgattagcgcatcagttatctgtatgctactgaacgtcgccgaactctgctatctcctgttgaaagtttgctttagacgctctaagagagcccagacgcagaagaaccaccccaaccacgcccttaaagagtctaagcagaatgagatgaatgagttgataagtgacagcggccagaacgctatcacagggttcccaagttag

SEQ ID NO: 118161 - DNA, 786 bp, synthetic construct
  misc_feature 1..786: note = Description of Artificial Sequence: Synthetic coding sequence
  source 1..786: mol_type = other DNA
atggactggggcaccctgcacacgttcatagggggcgttaacaagcatagcacttctattggaaaagtatggatcacggtaatttttattttcagggtgatgatactggtggtggccgcacaggaagtctggggggatgagcaggaagactttgtctgtaatacccttcagcccgggtgtaagaatgtgtgctatgaccactttttccctgtgtcccacatccggttatgggcactccaattgatttttgttagtaccccagcattattggttgccatgcacgtggcatactatcgtcatgagacaactagaaagtttcgccggggagagaagaggaatgactttaaagatatcgaggatataaagaagcagaaggtacgaatcgaagggagcctgtggtggacctatacaagctctatattcttcaggatcatatttgaggctgcctttatgtacgttttttacttcttatacaatggctatcacttaccttgggttttaaaatgtggcatcgatccttgcccaaacctggtcgattgttttatatcccggcccaccgaaaagaccgtgttcaccatatttatgatttcggcatcagtgatttgcatgttgctaaacgtggccgaactgtgctacctgctgctgaaagtgtgttttcgtcggagtaaacgggcacagacacaaaagaatcaccccaaccacgccttgaaggagtccaagcagaacgagatgaacgagttgatcagtgattctggccaaaacgctatcactggctttccttcttag

SEQ ID NO: 118162 - DNA, 672 bp, synthetic construct
  misc_feature 1..672: note = Description of Artificial Sequence: Synthetic coding sequence
  source 1..672: mol_type = other DNA
atgtcctggatgttcctgagggacttgttatctggagtaaacaaatatagcacgggcaccggctggatctggctcgccgttgtctttgtgtttcgtctcctggtgtatatggtggcggctgagcatgtgtggaaggacgaacagaaagagtttgagtgcaatagtaggcagcccggctgtaaaaatgtctgtttcgacgattttttcccgatttctcaggttagactctgggctctgcagcttattatggtgtctacgcctagccttctcgtggtgctgcacgtggcatatcatgagggccgggagaagcggcaccggaaaaaactttacgtttcccccggcactatggacggcggcctgtggtacgcataccttattagtctgattgtcaaaaccggattcgaaattggattcttagttctattctacaagctctatgatgggttcagcgtaccttatttgataaagtgtgacctgaaaccctgtcctaacactgtggactgtttcatatctaaacctactgagaagacaatcttcatactatttttggttatcacttcatgtctgtgcattgtgctgaacttcattgaactgtcgttcctggtattgaaatgtttcataaaatgctgcctacagaagtacctgaagaagccccaagtgctttctgtttag

SEQ ID NO: 118163 - DNA, 492 bp, synthetic construct
  misc_feature 1..492: note = Description of Artificial Sequence: Synthetic coding sequence
  source 1..492: mol_type = other DNA
atgagctggatgttcttgcgggatttgctctcgggagtgaacaaatacagcacagggacaggctggatttggttagctgtggtctttgtatttcgcctgctagtttacatggtcgctgcagaacatgtctggaaggatgaacaaaaggagttcgaatgtaactcccgacagcctggctgcaagaacgtctgttttgatgactttttccccatcagtcaggttaggctttgggccctacagctgataatggtgagcaccccaagtctgctggtggtgcttcacgtggcctaccacgaaggacgcgagaagcgtcaccggaagaaattgtatgtaagcccagggacaatggatggcggactttggtatgcttacctgatttccctcatcgtgaagactggtttcgagattggctttttggtattgttttataaattatatgacggattcagcgtgccatacctgatcaagtgcgacctgaaaccatgtccctag

SEQ ID NO: 118164 - DNA, 672 bp, synthetic construct
  misc_feature 1..672: note = Description of Artificial Sequence: Synthetic coding sequence
  source 1..672: mol_type = other DNA
atgagctggatgtttctgagagatctgttaagtggcgtgaataagtattcaactggaacgggctggatctggctagccgtggtgttcgttttccgactgctcgtgtatatggtagccgccgaacacgtttggaaagacgagcagaaggagtttgagtgcaactcacgccagcctggctgcaagaatgtgtgctttgacgacttttttcctatttctcaggtgcggctgtgggcactgcaactaattatggtatccacaccatccttgcttgtggtgttacacgttgcatatcatgaggggagggaaaagcggcaccgcaagaagctgtacgtttccccgggtactatggatggcggattgtggtacgcatacctcatctctctgattgtgaaaacaggcttcgagattgggttcctggtgttattctacaagttgtatgacggtttctctgtcccctatctgattaaatgtgacctgaaaccatgtccgaatacggtggactgtttcatctccaaaccaaccgagaaaacgatcttcatcctcttcctggtcattacttcatgtctgtgtattgttctgaattttattgagctgtcatttctggtgcttaagtgcttcatcaagtgctgcctgcagaagtacctgaaaaagcctcaagtgctgtccgtctag

SEQ ID NO: 118165 - DNA, 966 bp, synthetic construct
  misc_feature 1..966: note = Description of Artificial Sequence: Synthetic coding sequence
  source 1..966: mol_type = other DNA
atgggcgagtggacaatcctggagcgactgctcgaggccgccgttcagcagcacagcactatgattggtaggatacttttaacggtggtggtgatcttcagaattttaattgtggccatcgtgggagagactgtgtacgatgatgaacagaccatgtttgtgtgcaatactctccagccaggctgtaaccaggcctgttacgaccgagcatttcccattagtcatatccggtactgggtgttccaaattatcatggtttgtacaccttccctctgcttcattacctatagtgtccaccaatctgccaagcagcgtgaaagacggtactcaaccgtgttcttggccctcgacagggacccacctgagagcattggtggtcccggggggaccgggggaggagggtctggcggcggaaaacgggaggataagaaattgcagaacgcaatcgtgaacggggttctgcagaacactgaaaacacttcaaaggagacggagcctgattgtctggaagtcaaggagctgacccctcacccatctggcttgaggaccgcttctaagtccaagctcagaagacaggaaggaatatccagattttacatcatccaggttgtgttcaggaatgctctggaaattggtttccttgtcggacagtacttcttgtatggcttctccgtgccaggcctgtacgagtgcaaccggtatccatgcattaaagaagtagagtgctacgtgtctcgaccaactgagaagacagtgtttcttgttttcatgttcgcagtctcagggatttgtgtcgtgctgaatctcgcagagctgaatcacctaggctggagaaaaataaaacttgcagtgcggggggctcaagctaaaaggaaatctatatacgaaattcgtaataaggacctgccgagagttagcgtccctaactttgggcgcacgcaatcctcagatagtgcgtacgtttag

SEQ ID NO: 118166 - DNA, 891 bp, synthetic construct
  misc_feature 1..891: note = Description of Artificial Sequence: Synthetic coding sequence
  source 1..891: mol_type = other DNA
atgggcgagtgggcttttttaggctcgcttttagacgccgtacagctgcaatcgccactggtcggaaggctgtggctggttgtcatgctcatcttcagaattctcgtcctggccactgtcggaggtgcagtattcgaggatgaacaggaagagtttgtttgcaacactctgcagcccggttgccgtcagacctgctatgaccgtgcgtttccggtgtcccattaccgcttctggctgtttcatatcctgttgctgagtgccccgccagtgctgtttgtcgtttatagcatgcatcgcgctgggaaagaggctggaggcgcggaagctgcggcacaatgtgcccccggcctgccagaagctcagtgcgcaccttgcgccctgcgggcccggcgtgctcgaagatgctatttgctgtccgtcgcccttaggctgctggctgaactcacttttctcggagggcaggccctcctgtacggatttcgcgttgctccacacttcgcctgtgcgggaccaccctgtccacataccgttgactgttttgtttcgaggcctacagagaagaccgtattcgttctgttctactttgctgtggggctgctgtccgccctcctcagcgtcgcagagttgggccacttgctttggaagggcaggcctcgcgcaggcgaaagggataaccggtgtaacagagctcacgaggaggcacagaagctgctgccacctccaccacctcccccaccaatcgtcgtaacatgggaggagaataggcacttgcagggggaaggttctccagggtcccctcacccaaagactgaattggacgctcctcggttccgacgcgagtcaactagcccggctgggtggcactgtagcctgccctttcatggcacatag

SEQ ID NO: 118167 - DNA, 1113 bp, synthetic construct
  misc_feature 1..1113: note = Description of Artificial Sequence: Synthetic coding sequence
  source 1..1113: mol_type = other DNA
atggagggtgttgatctgcttggattcctaattattacgctcaactgcaatgtaactatggttggtaaactttggtttgtgctaacaatgttgttgagaatgcttgttattgtgctagccggtcggcctgtctaccaggacgaacaggagcgcttcgtttgcaatactctccagcccggttgtgccaatgtgtgctatgatgtattcagtcccgtgtctcaccttcgcttttggctgattcagggcgtgtgcgtccttctgccatctgcagtgttctccgtgtacgtcctgcatcggggagctaccctggccgccctcggaccacggcgatgccccgatcccagggagcctgcttctggtcaaagacgctgcccaaggccctttggagagcggggggggcttcaggtcccagatttttccgctgggtatattatccatcttctcctgagaacccttttagaagctgccttcggggccctgcactactttctttttgggtttttggccccaaaaaagttcccgtgcactcgccccccatgcactggcgtggtggactgctacgtgtcacgtcccacggagaagagcctcctcatgctgtttctgtgggcggtgtctgcgctctcctttttactgggactggcggacctggtctgttccctgcgaaggcgcatgcgtagacgcccaggccctcctactagcccatctatccgaaaacagagtggcgcatctgggcacgccgaggggcgcagaaccgatgaagaaggcgggagagaggaggaaggtgctccggcccctcccggagcacgggcagggggcgaaggagctggatcccctagacgaacttcacgtgtgtccggccacaccaagatccctgatgaagacgaatctgaggtcactagttcagcctcagaaaaattgggtcgccagccacgcgggagaccgcatagggaagccgcgcaggacccgagggggagtggttccgaggaacagccttcagctgcacccagtcgattagctgctccgcccagctgttcctctttacaaccccctgacccccctgctagtagcagtggcgccccgcatctacgcgccaggaagtccgaatgggtgtag

SEQ ID NO: 118168 - DNA, 1191 bp, synthetic construct
  misc_feature 1..1191: note = Description of Artificial Sequence: Synthetic coding sequence
  source 1..1191: mol_type = other DNA
atgagttggagctttcttacaaggttgctggaagaaatccataaccactctacgtttgttggaaaaatctggctcacagttttgatcgtctttaggatcgttctgactgctgtggggggagagtctatttactatgacgagcaaagcaagttcgtctgcaacaccgagcagcctggatgtgagaatgtctgttacgacgcctttgcacctctgtcgcatgtccgattctgggtatttcagattatccttgtggctacgcccagcgttatgtacttgggttacgccatccacaaaatcgccaagatggaacacggcgaggccgataagaaggccgcccggagtaagccttatgctatgcgatggaagcaacacagggctctggaggaaacagaggaagacaatgaggaggacccgatgatgtacccagagatggaactggagtccgataaagagaataaggaacagagccagcctaagccaaaacacgatggacgcaggcgtattagggaggacggccttatgaagatctacgtgctccagcttcttgcacgcactgttttcgaggtaggttttttaattggacagtactttctgtacgggttccaggtgcatcccttctacgtctgctcaaggctgccttgtcctcacaagatcgactgtttcatctccagaccgaccgagaaaaccatatttctcctgatcatgtacggagttaccggcctttgtttattactgaacatctgggaaatgctgcatctggggttcgggactatccgcgactctctgaatagcaaacgtcgggagctggaggatcctggcgcgtacaattaccccttcacctggaatacaccttcagccccaccaggctacaatattgccgttaaacctgaccaaattcagtacacagaactgagtaatgctaagatcgcttacaagcagaataaggccaatacagcccaagagcaacaatacgggagtcatgaggagaacctcccagcggatctggaggcgctgcagcgagagattagaatggcccaggagcgcctggacctagctgtccaggcctatagccaccagaacaaccctcacgggccaagggagaagaaggcaaaggtggggagtaaggccggttccaacaagagcacagcctcctctaaatcgggcgacggaaaaacatccgtgtggatctag

SEQ ID NO: 118169 - DNA, 1191 bp, synthetic construct
  misc_feature 1..1191: note = Description of Artificial Sequence: Synthetic coding sequence
  source 1..1191: mol_type = other DNA
atgtcatggtcctttctcacccgcctgctggaagagatacataaccattccacgttcgtcggaaagatttggctgaccgtgctcatcgtgttcagaatcgtcctgaccgccgtaggaggggaatctatctactacgatgagcagagcaaattcgtgtgcaatacagaacagcctggttgcgaaaacgtgtgctacgatgcatttgctcctctgtcccacgttagattttgggtgtttcaaatcattctcgtggcaaccccctcagtcatgtatttgggatacgccattcacaagatcgcgaagatggagcatggagaggcagacaaaaaagccgcccgatcaaagccttatgctatgcggtggaagcagcaccgtgcgcttgaagaaactgaggaggacaacgaggaggaccccatgatgtatcctgaaatggagctcgagtcggacaaggagaataaagagcagagccaaccgaaacccaaacacgacggtagaagacggattcgggaagacggtctgatgaagatatacgtgctgcagctcctggcccgaacagtattcgaggtgggatttctgatcggccaatacttcctatatggatttcaggtacatcctttctatgtatgtagtcggttgccatgtccacacaaaattgactgttttattagtaggccaactgagaaaacaatcttcctgctgattatgtacggagtaacaggcctctgcctgcttctgaacatttgggagatgctgcatttgggcttcggcaccatacgagattccctaaacagtaagaggcgggagctggaggacccgggagcttacaactatccattcacttggaataccccatctgcccctccggggtacaatattgccgtgaagcctgaccagatccaatacaccgagttgagcaatgccaaaatcgcctataagcagaacaaggccaacaccgcccaggaacaacagtatggctcacacgaagagaacctgccggccgaccttgaagctctccaacgggagattagaatggcccaagaaagactggatctggccgtccaggcttattctcatcaaaacaatccacacgggcctcgtgagaagaaggctaaggtcggctctaaggctggatccaacaagtctacagctagctccaaatctggcgacggcaaaactagcgtgtggatttag

SEQ ID NO: 118170 - DNA, 1320 bp, synthetic construct
  misc_feature 1..1320: note = Description of Artificial Sequence: Synthetic coding sequence
  source 1..1320: mol_type = other DNA
atgaccaacatgagctggagcttccttaccagactgttagaagagatacacaaccactctacctttgtcggtaaggtgtggctaacagtgctggttgtgttccggattgtactgactgccgtcggcggcgaggctatctactccgacgagcaggccaagttcacttgtaacacacgccagcctgggtgcgataacgtatgctacgacgcctttgccccactttcacacgtacgtttttgggttttccaaatcgtggtgatttctacaccatctgtaatgtacctgggctacgccgttcacagactagctagagcgagcgagcaggaaaggcgaagagccttgcggagacgccctggtccccggagagctccgcgggcccatctgcctccccctcacgccgggtggccggagccagccgaccttggagaggaggagccgatgcttgggctcggcgaagaagaggaagaggaggagaccggtgcagccgaaggagcaggcgaggaagccgaggaggccggagcagaagaagcttgtacaaaggctgtgggggcagatggcaaagctgcggggacgcccgggccgactggccagcatgatgggagacgtaggattcagagagagggactcatgcgtgtttacgtagctcaactggtcgcaagagcagcatttgaagtcgcattcctggtaggccagtatttgctctatggattcgaagttcgcccttttttcccatgttcacggcagccctgtccacatgttgtagactgcttcgtatcgcgcccaacagagaaaacagtatttttactggtgatgtacgtggtgtcttgcttgtgtctccttctgaacctgtgtgagatggctcatctgggactcggatctgcgcaagacgcagtacgcgggcgaaggggcccccccgcttcggcccccgctcctgcacccaggccaccaccttgcgcatttcccgccgccgccgctggactggcctgcccacctgactactccctcgtggtcagggccgcggagcgggcccgggcgcatgatcagaatctggcaaaccttgcgctccaggctttaagagatggagcagctgcaggggacagagaccgtgactccagtccctgcgtggggctccccgcggcgagtcgcgggccccctcgcgctggggctcctgcttccagaaccggaagcgccacctcagctggaactgttggcgagcagggtcgccctgggactcacgagagaccgggagctaaaccgcgggccggaagcgagaaggggtcagcctcaagtcgagatgggaagacaaccgtgtggatatag

SEQ ID NO: 118171 - DNA, 840 bp, synthetic construct
  misc_feature 1..840: note = Description of Artificial Sequence: Synthetic coding sequence
  source 1..840: mol_type = other DNA
atgtgcgggaggttccttcggagactgctggctgaggaatccagaagatcgacccccgtgggtagactgctgctgcctgtgctgctcggcttccgtcttgtactgctggctgctagcgggccgggtgtttatggcgatgagcagtcggaatttgtctgtcacacccagcaacctggttgcaaagcagcttgtttcgacgcttttcaccccctgagcccattgcgcttttgggtgtttcaagtgatcctggttgcagttccatctgccctctatatgggcttcaccctctaccacgtcatatggcattgggagctcagtggcaagggcaaagaggaggaaactttaattcaaggaagagagggtaacacggatgtgcctggggcagggagtctgcggttattgtgggcctatgtagcccagctcggtgctagacttgtgctggagggtgccgccctcggacttcagtaccatttgtacgggtttcagatgccctccagcttcgcatgtagacgggagccatgtctgggaagcattacctgtaatctgtctcggcccagcgaaaagacaatctttctgaaaactatgttcggtgtatctgggttctgcctcctgttcacatttctggagcttgtgctgcttggactcggacgctggtggcgaacctggaagcataaatcctccagctctaaatacttcttaaccagcgaatctacccggcgacataagaaagctaccgactctttgccagtagtggagacaaaagaacagtttcaggaggccgtgcctgggaggagtctggcacaagaaaaacagcgaccggttggccccagagacgcttag

SEQ ID NO: 118172 - DNA, 1338 bp, synthetic construct
  misc_feature 1..1338: note = Description of Artificial Sequence: Synthetic coding sequence
  source 1..1338: mol_type = other DNA
atgacaatgttcgaaaacgtgactagagccttggcccgacagctgaacccgcgtggagacctgactccccttgattcactgattgatttcaaacggttccaccctttttgtctggtgttgagaaaacggaagtctacccttttttggggagctaggtatgttagaacagactacactctcctcgacgtgctggagcctgggagctcccctagtgacccgacagataccggcaacttcgggttcaagaacatgttggacactcgcgtggaaggcgacgtcgatgtccccaagacggtgaaggtcaaaggcactgccgggctgagccagaacagtaccttggaggtccaaaccctgtccgtcgcaccgaaggcgttggagaccgtgcaggaacgcaagcttgctgccgaccacccatttctcaaagaaatgcaggatcagggagagaacttgtacgttgtgatggaggtggttgagaccgtccaagaggtgacgctggagcgggccggcaaggcagaagcatgcttttctttgccattttttgctcccttaggcctgcagggtagcatcaaccacaaggaagcagtgacaatacctaaaggatgcgtgctggctttccgtgtgcgccagctgatggtaaaggggaaagatgaatgggacatccctcatatctgcaacgacaacatgcagacttttccacctggcgaaaagagcggagaagagaaagtgatcctgatccaggcatctgacgttggcgacgtgcacgagggctttcggacactaaaggaggaggtgcagagagagacgcagcaggtcgaaaaactgagccgtgttggccaatcctctctccttagtagtctctcaaagctactgggtaagaagaaggaactgcaggacctggagctggccctcgagggagctctcgacaaaggtcacgaggttacattggaggctctcccaaaagatgtgctgctgagcaaagaggctgtaggcgccattctgtacttcgtaggcgccctgactgagctgtccgaagctcaacagaagctcctggtgaagtctatggaaaagaaaatactgcccgtgcagttgaagctggtggaatcaactatggagcagaactttttacttgacaaagagggggtgttcccattgcagccagaattgctcagcagtttgggtgacgaggaactcaccctgactgaagcactggtggggctgagcggccttgaggtccagcgatcaggaccacaatacatgtgggacccagataccttgcccagattatgcgcgctatacgccggactgagtctcctgcagcaattaactaaagcttcttag

SEQ ID NO: 118173 - DNA, 1212 bp, synthetic construct
  misc_feature 1..1212: note = Description of Artificial Sequence: Synthetic coding sequence
  source 1..1212: mol_type = other DNA
atgttttcagtgtttgaagagattacacgaattgtcgtcaaggagatggatgcaggcggcgatatgatcgccgtgcgctccctggttgatgctgatcgtttcaggtgttttcacctggtaggtgagaagaggaccttcttcggctgccggcattatactacagggctgacgctaatggatatcttggatacagacggcgacaagtggctggatgaacttgattccggcttgcagggacagaaagccgaattccagatcttggataacgtcgacagtactggcgaactgatagtgaggctgcccaaagaaatcactataagcggcagcttccagggctttcatcaccagaagatcaagatctctgaaaaccgaattagccagcaatatctagcaacactcgagaacagaaaactcaagcgcgaactcccattcagctttcgaagcatcaacacaagagaaaatctctatttagtaacagaaacattagaaactgtgaaggaagagaccctcaagtccgaccgccaatacaagttctggagtcagatttcccaaggacacctgtcgtataagcacaaggggcagcgtgaagtaacaatccctcccaaccgtgtcctctcttacagggtaaaacagctcgtgttccccaataaagagacaatgaaaaaggatggagcttcgtcgtgcttgggaaaatcactcggctctgaggacagcagaaacatgaaagaaaaattggaagacatggaatcagtcctcaaagatctgactgaggagaaaaggaaggatgtgctgaacagtctcgccaaatgcctcggaaaggaggacatacgccaagaccttgagcaaagagttagcgaggtactgatcagtggcgagctacatatggaggacccagataaacctctgctcagctcactgttcaacgccgcaggggtgctggtggaggcccgagctaaggcgatcttggactttctggatgcccttctcgaactgagcgaggaacaacaattcgtcgcagaagccctcgaaaagggcacactgccgcttttgaaagatcaagtgaaatctgtgatggagcagaactgggacgaacttgcttcctccccacctgatatggattacgaccccgaagccagaattctgtgcgctctgtatgtggtcgtttctatacttttggagctggctgaggggccaacctccgtcagcagttag

SEQ ID NO: 118174 - DNA, 1236 bp, synthetic construct
  misc_feature 1..1236: note = Description of Artificial Sequence: Synthetic coding sequence
  source 1..1236: mol_type = other DNA
atgttcagcgtgtttgaagagatcacaaggatcgtcgtgaaggagatggacgcaggcggcgacatgattgccgtccgcagcctggtcgatgctgacagattccgttgtttccaccttgtgggcgagaaacgaaccttcttcggctgccggcattacactactggcttaacgttgatggacatcctagacactgacggagataaatggcttgatgagctggatagtggccttcaagggcagaaggctgaattccaaattttagataatgttgatagtaccggtgaactgattgtgcgcctccctaaggaaattacgattagcggatcctttcagggatttcatcaccaaaaaatcaagattagcgaaaaccggatttcacaacagtacttagccacactggaaaataggaagttgaaacgggaattgccattctccttcaggagcatcaatacccgcgaaaatctgtaccttgtgaccgaaaccctggaaacagtcaaggaagagaccctgaaaagcgaccggcagtacaaattctggtctcagatttcccaggggcacctatcatacaagcacaaaggtcagagggaggtgaccattccacccaacagagtgctttcttatagagtaaaacaactcgtgtttccaaataaagagaccatgagcgcaggcctggacatacatttcaggggaaagacgaagtcattccccgaaggaaaatctctgggcagtgaggactctaggaatatgaaagagaaactggaagatatggaatctgtactcaaggatctaacagaggaaaagcgaaaggatgtcctgaactcccttgccaaatgcctgggcaaggaggatataaggcaagatctggaacagcgagtgagtgaagttctgatttcaggtgagctgcacatggaggaccccgacaaaccccttctgagtagcctgttcaatgccgccggagtcctggtagaggctcgcgccaaggctatcctggacttcctggatgcattgcttgaactgtctgaagaacagcaatttgtagccgaagcattagagaagggaacccttcccctgctaaaggatcaggttaagagcgtgatggagcaaaattgggacgaacttgcctccagtcctcctgacatggactacgacccagaggctaggatactgtgcgcactgtatgtggtggtctcaatcttgctggagctggctgaaggtccgacaagtgtgagcagctag

SEQ ID NO: 118175 - DNA, 1185 bp, synthetic construct
  misc_feature 1..1185: note = Description of Artificial Sequence: Synthetic coding sequence
  source 1..1185: mol_type = other DNA
atgttttccgtgttcgaggaaataactaggatcgtggtaaaagaaatggatgcgggaggtgacatgatcgccgtgagatccctagtcgacgcggatcggttcagatgctttcatctggtgggagaaaaaagaacgttcttcgggtgccgacactacactactggcctaactctgatggacattcttgataccgacggcgataagtggctagatgagctcgatagcggcttacaaggccagaaagccgagtttcagatcctggacaatgttgattccactggcgagctgatagtccggttgccaaaggaaataaccatcagcgggtcctttcagggttttcaccaccagaagattaaaattagtgagaaccgaatctcacagcagtacctcgcgaccctcgaaaatcgtaagctgaagagggagctgccattcagctttagatcaattaataccagagagaatctgtacctcgttacagaaaccctcgagaccgtgaaggaggaaactcttaaaagcgaccggcagtacaagttctggtctcagatttcacaaggacatctctcgtacaagcacaagggacaacgggaggtaactatccctcccaatcgcgttctgagttacagggtcaagcagctggtgttccctaacaaagagacaatgagaaagtcattaggaagtgaggattccagaaacatgaaagaaaagctcgaggacatggagagcgtgttaaaggatctaacagaagaaaaacgcaaggacgtgctgaatagcctggctaaatgcctcggcaaggaggatatacggcaggatttggagcagcgcgtttcagaggtgctcatcagtggggagctgcatatggaggacccggacaagccattgcttagctccctgtttaacgccgccggcgtgctcgtggaggccagggccaaagcaatcctggacttcctcgatgccctcctggagttatcagaggaacagcagtttgtggccgaagccctggaaaagggcacattaccgttgcttaaagatcaggttaaatccgtcatggaacaaaactgggacgaactcgcaagtagccccccagatatggattacgaccctgaggcgaggatactgtgcgcactgtacgtcgtggtctccatcctgttggagctggctgagggccccacatcagtctcatcgtag

SEQ ID NO: 118176 - DNA, 1236 bp, synthetic construct
  misc_feature 1..1236: note = Description of Artificial Sequence: Synthetic coding sequence
  source 1..1236: mol_type = other DNA
atgttctccgtcttcgaggaaatcacaagaatcgtggtcaaggaaatggatgccggaggagatatgattgctgtaaggagcctggtggacgctgataggtttcgatgtttccatctcgtcggtgagaagcggacgttttttggctgccgccattatacaacagggttaactctgatggatatcttggacaccgatggagataaatggctggacgagctcgatagcgggcttcagggccagaaggccgagttccagattcttgataacgtggattcgaccggcgaactaatcgtgcgtctcccgaaggagattaccattagtggttccttccagggcttccatcaccagaagatcaagataagcgaaaacaggattagccagcaatacctcgccactctggagaaccgcaaactgaagcgggaactgcctttctctttccggagtatcaacaccagggagaacctatacctcgtgactgagacactggagacggtaaaagaagagactctcaaaagcgatagacagtacaagttctggagtcagatctctcagggtcatttgtcgtataaacataaaggacagagagaggtaacaatcccgcctaacagggtcctgtcatacagagtgaaacagctggtgtttcctaacaaagagacaatgtcggctggacttgacatacattttagaggaaagacaaagtcatttcccgagggaaaaagcctagggagcgaggattcaagaaacatgaaagaaaagcttgaggatatggaatctgtcctgaaggacctcactgaggagaagagaaaggacgtcctgaatagtcttgctaagtgcctgggaaaggaagacatcagacaagatctggaacagagggtgagcgaggtgctcatcagtggcgagctacacatggaggacccagataaacctctgctgtcttctctgtttaacgccgctggggtgctcgtggaagctcgtgctaaagcgatcttggacttcttggacgcactgctcgaattatcagaggagcaacaattcgtggccgaggcactggaaaagggcacgctgccccttctgaaggaccaggtgaaaagtgtgatggagcagaactgggatgaacttgcgtcttctcctcccgatatggattacgacccggaggccaggattctctgcgctctatacgtcgtggtgagcatcctacttgagctggctgaagggcctacttcggtcagctcatag

SEQ ID NO: 118177 - DNA, 1251 bp, synthetic construct
  misc_feature 1..1251: note = Description of Artificial Sequence: Synthetic coding sequence
  source 1..1251: mol_type = other DNA
atgttttccgtctttgaggagataacacgtatcgtggttaaggagatggacgccggaggggacatgattgcggttaggtcacttgtcgatgccgatcggtttcggtgctttcacctggtcggagagaagcgcacgttctttgggtgtcggcactacacgactgggctgactctaatggacattctggatacggacggggacaagtggctggacgagctggacagcggacttcaggggcagaaagctgaatttcagattctggacaatgttgattcaactggcgagctgatcgtaagactgccgaaggagatcactatcagcggatctttccaggggttccatcaccagaaaattaaaatctctgagaatcgtatctcccagcagtaccttgctacactagagaatcggaagctgaagcgcgaattgccttttagtttccgttccatcaacacccgtgaaaatctctacctggtcacggagaccctcgaaaccgtcaaggaggagaccttaaagagtgatcggcagtataaattctggtcacagatctcccaagggcacctaagctacaaacataaggggcaaagagaggtgaccatacctccaaacagagtgttgtcctacagggtaaagcagctcgttttccctaacaaggaaactatgaacattcatttccgggggaagaccaagtcattccctgaggagaaggatggagcctcatcctgccttgggaagtccttaggtagcgaggatagcaggaatatgaaagaaaagctggaggatatggagtcagtcttaaaagacctgactgaggagaaacgaaaggatgtgctgaacagtctagccaaatgtcttggcaaagaagacatccggcaagacttagaacagagagtaagtgaggtgctgataagcggcgaactgcatatggaagaccccgataagccgcttctgtccagcttgttcaatgctgcaggggtcctggtggaagcacgggcgaaggccattctggattttttggacgccctgctcgagctatcggaggagcagcagttcgtggcagaggccctcgaaaagggcaccctgccactcctgaaagaccaggtcaaatccgttatggagcagaattgggacgagctggcgtcgtcgccacccgacatggactacgatccagaagcccggatcctgtgcgccctatatgttgtagtctcaattttgttggagctcgcagagggaccaacatcggtctctagctag

SEQ ID NO: 118178 - DNA, 1047 bp, synthetic construct
  misc_feature 1..1047: note = Description of Artificial Sequence: Synthetic coding sequence
  source 1..1047: mol_type = other DNA
tagctggatgagctggacagcggattacaggggcagaaagccgagtttcagatcctggataacgttgactccacaggggaactcatagtgcgattgccaaaggagatcacgattagcggctctttccagggctttcatcatcagaagataaagatttctgaaaatcggatctcacaacaatatttggcaacactggagaacagaaaattgaaaagagagttacccttttccttcagatccattaatacacgggagaatctgtacctggttaccgagaccctggagaccgtcaaggaagagaccctgaagtcagacaggcagtataagttttggagccagatttcgcagggccacctcagttacaaacacaaggggcaaagagaggtcacgatcccacctaatcgcgtactgtcctaccgcgtgaagcagctggtcttccccaacaaggagactatgaatattcactttaggggaaagaccaaaagttttcctgaagaaaaggacggagcctccagctgcctcggaaagtctctgggatccgaagacagcagaaatatgaaagagaagttggaagacatggagtccgtcctcaaagacctaactgaggagaagagaaaagacgtcctgaattccctggctaaatgcctgggaaaagaggacatcagacaggatctggaacagagggtgagcgaggttctgattagtggggagctgcacatggaagacccagacaagcccctgttatccagtctctttaatgcagccggggtgctggttgaggcaagggcaaaggcaattctggacttcctcgacgcgctcttggagctgtcagaggagcagcagttcgttgctgaagctttagaaaaaggaaccttgcctctcctcaaagatcaggtgaagtcagtcatggagcagaactgggatgagctggcttcttcccctccagatatggactatgatccggaggccagaattctttgtgctttgtatgtcgtggtgtccatcctactggagctggccgaaggaccaacttctgtgtcgtcctag

SEQ ID NO: 118179 - DNA, 1224 bp, synthetic construct
  misc_feature 1..1224: note = Description of Artificial Sequence: Synthetic coding sequence
  source 1..1224: mol_type = other DNA
atgtttagcgtctttgaggagataacgcgcattgtggtgaaggagatggacgccggcggcgacatgatcgcagtccggtcattggtcgatgctgaccggtttcgatgtttccatttggtaggtgagaagcggacatttttcgggtgccggcactatacaaccggactaaccctcatggatattctagatactgatggcgacaaatggctagatgagctggactcgggactgcaggggcagaaagctgagttccagattctggataatgtcgatagtaccggcgaactgatcgtgcgtctgcccaaggagattactatttctggatcttttcagggctttcaccaccaaaaaattaagatctctgagaatcgcatctctcaacagtatttagcaacattggaaaaccggaagctgaagcgcgagctgcctttctcctttcgctcgatcaacacgagggaaaatctgtatctggtgaccgaaaccctggagactgtgaaggaggagactctcaagtctgaccgccagtataagttttggtcgcagattagtcaaggtcatctctcctataaacacaagggccagcgtgaagtcactatccctcccaatagggtcctgtcatatagagtgaagcagctggtcttccccaataaagagaccatgaatatacactttcgcggtaaaacaaaaagcttccccgagggaaagtccctgggttctgaagatagcagaaacatgaaggaaaagctagaggatatggaaagtgtccttaaggatctgactgaagagaagcggaaagatgtgctgaacagtctggctaaatgcctgggtaaggaggatattagacaggacctggagcaacgagtctccgaggttctgataagcggcgagctgcacatggaagatccagataagcctctactatcttccctattcaacgccgccggcgtgctggtggaggccagggccaaggcaatacttgacttcttagatgccctgctcgaactgtccgaagagcagcagttcgtcgctgaggcccttgaaaagggcaccctgcccctgcttaaggaccaggtaaaaagcgtgatggaacagaactgggatgagctggcatcctcaccccccgacatggactacgaccccgaggctagaatcctatgtgccctctacgtcgtagtcagtatacttctcgagctggccgagggccccacttctgtgtcaagctag

SEQ ID NO: 118180 - DNA, 1527 bp, synthetic construct
  misc_feature 1..1527: note = Description of Artificial Sequence: Synthetic coding sequence
  source 1..1527: mol_type = other DNA
atgccctctatgctggaacgcatctccaagaacttagtcaaagagatcgggtctaaggatttgacccccgtgaagtacctgcttagtgccactaagctccgtcagttcgtgatcctgaggaagaagaaggacagtcgatccagtttctgggagcagtctgattacgtgccggttgagtttagcttgaacgacattctggaaccctcgtcaagcgtgctggaaacggtggtgacaggccctttccacttcagcgatataatgattcagaagcacaaggccgacatgggggttaacgtgggaattgaggtgtccgtgagcggcgaggccagtgtggatcatggctgttccctcgaattccagatagtgaccattccttccccgaatctagaagacttccagaagaggaaactgctggatcccgagccctccttcctgaaggaatgtcgacgcaggggcgacaatctgtacgtcgtcacagaagcagtcgagctgatcaataacacagtgctctatgactcttcctccgtcaatatcctggggaagatcgcgctctggatcacctacgggaagggccagggccagggtgagtctctacgggtcaagaagaaggctttgactctccagaagggaatggtgatggcgtataaaagaaaacagctggtgattaaagagaaggcgatacttatcagtgatgacgatgagcaacgaacatttcaggatgagtacgagatcagtgaaatggttggctactgcgcagctagaagcgaaggcctcctgccttccttccacacaatcagtccaaccctcttcaatgcttccagcaacgatatgaagctgaagccggaactctttttgactcagcaatttttgagtggccacctcccgaagtacgagcaggtgcatatactgcctgtgggcaggattgaagagcctttttggcaaaacttcaaacacttgcaagaggaggtatttcagaaaatcaagaccctggcccagctgagcaaagatgtccaagacgtaatgttctatagtattttagccatgctccgggacagaggcgcccttcaggacttaatgaacatgctggagctggattctagcggccacctggacggccctggtggcgccatccttaaaaaattacagcaagactccaatcacgcctggtttaatcctaaggatcctattctgtacctgctggaggccatcatggtcctgtctgacttccaacacgatctgttagcatgctctatggagaagaggattttgctgcaacagcaggagctggtgcgtagcatcctggaacccaacttcaggtatccttggagtatccctttcacccttaagcccgaactgctcgcacctctccagtctgaagggttggcaattacatacgggctgcttgaagaatgcgggctcaggatggagctggacaatccccggtcaacatgggacgtggaagctaagatgcccctgagcgctctctatggcacgttaagcttattacaacagctagccgaagcttag

SEQ ID NO: 118181 - DNA, 462 bp, synthetic construct
  misc_feature 1..462: note = Description of Artificial Sequence: Synthetic coding sequence
  source 1..462: mol_type = other DNA
atggtggccacaaagaccttcgcactcctcctgctgtccctgttcctggccgtgggactgggcgaaaaaaaggaggggcacttctcggctctgccttcactccccgtagggtcccatgctaaagtgagttcaccacagcctcgaggcccccggtatgccgagggcacgttcatctcagactactcgatcgccatggacaagattcatcagcaggactttgtcaattggctgttagcccagaaaggaaaaaagaacgattggaaacacaacatcacccagcgagaagctcgggcgctggaactggctagtcaggcaaacagaaaggaggaggaagcggtggagccccagagtagccccgcaaaaaacccgtctgacgaagaccttctaagagacctgttgattcaggagttgttggcatgtctcctagaccagaccaacctctgccgactaaggtccagatag

SEQ ID NO: 118182 - DNA, 1401 bp, synthetic construct
  misc_feature 1..1401: note = Description of Artificial Sequence: Synthetic coding sequence
  source 1..1401: mol_type = other DNA
atgactacgagccccattctgcagttactgctcagacttagtctgtgtggcctgctgcttcagcgggccgagaccggaagcaaaggtcaaaccgccggggagctgtatcagagatgggagaggtatcggcgagagtgtcaggagacccttgccgctgcagagcccccttctggtctggcgtgtaacggttcatttgatatgtatgtatgctgggattacgcagcgcctaacgcaacagcccgcgcctcctgtccttggtacctgccatggcaccaccacgtggctgctgggttcgtgctccgtcaatgcgggtccgatggtcagtggggcctgtggagagatcacacacagtgtgaaaaccctgaaaaaaacgaagccttcctggatcagcgactcattcttgaacgcctgcaggtgatgtataccgttggatattccctgtccctggctacgctgctgctggctttgctaatcctgagccttttccgccgcttacactgcactcggaactacatccacatcaacttattcacctcctttatgctccgtgctgctgcaatcctatcccgcgacaggttgttaccaaggcccggcccttatctgggagaccaagcattggccctctggaaccaggcgctggctgcttgtcggactgcccaaatagtcactcaatactgtgtgggtgccaattacacttggcttctagtcgaaggggtttacctgcactcccttcttgtgcttgtgggggggagtgaggagggccattttcgctattatctgcttttgggttggggtgcccccgccctttttgtgatcccatgggttatagtgagatatctgtatgagaacacccaatgttgggagcggaatgaagtgaaggccatatggtggatcatcagaacacccattttgatgaccatcctgatcaatttccttatttttatccgaattctgggcattctgctttccaagcttcgtactcggcagatgcggtgccgagattaccggcttcggctcgctcggagcacactcacactggtgcccctactaggagttcacgaagttgtcttcgctcctgtgaccgaggagcaggctcggggggccctgcgcttcgcgaagctgggatttgaaatattcttgagcagctttcagggctttctggtgagcgtcctctattgcttcataaataaggaggtgcagtctgagattagacgaggatggcaccactgcaggctcaggcgctccctgggcgaggaacagaggcagctgcctgaacgcgccttcagggcgcttcccagtggaagcggacctggcgaagtgcccacctctaggggcctttcttctgggactctgcccggccctggcaatgaggcatctcgtgaactggagtcttattgttag

SEQ ID NO: 118183 - DNA, 1293 bp, synthetic construct
  misc_feature 1..1293: note = Description of Artificial Sequence: Synthetic coding sequence
  source 1..1293: mol_type = other DNA
atgactacgagccccatcctgcagctgctgctgcgcctgtccctctgcggcttattacttcaacgagctgagaccggcagtaagggacagactgctggcgagttatatcagaggtgggaacggtatagacgagaatgtcaagaaactttggccgctgctgagccgccttctgtagctgccggattcgtgctgcgtcagtgcggctcagacggacagtgggggctctggcgggaccatacgcagtgcgagaacccagaaaagaatgaagcattcttagaccagcgcctgattctggagagacttcaggtgatgtacacggtcggttactccctcagcctcgcgaccctgctgctggctctgctcatactgtccctgttccggcgcctgcattgcacaagaaattatattcatataaacctgtttaccagcttcatgcttagggccgccgctattctgagtcgcgacaggctccttccacggccgggtccatacctcggcgaccaagcccttgccctgtggaaccaggctctggccgcctgtaggacagctcaaatcgtgacacagtattgcgtgggcgccaattacacctggcttctggtggaaggtgtctatcttcactccctactggtgctggttgggggaagcgaggaggggcactttcgctactatttactattggggtggggggcccccgctctatttgtcattccctgggtgatcgtgagatatctctacgagaatacccaatgttgggaacgcaacgaggtgaaagctatctggtggatcatcagaactccgattttgatgacaatccttattaatttcctaatatttattcggattctgggtatcttattgtctaaactgcggactagacagatgaggtgtcgtgattatagattaaggctggcacgtagtaccctcacactagtcccactgctaggtgtgcacgaggtggtcttcgcaccggtcactgaggaacaagcgcgaggggccctgagatttgcgaagttgggcttcgagatttttctgagtagttttcaggggtttctcgtgtccgttctgtattgctttatcaataaggaggtgcagtctgaaatcaggcggggctggcaccattgtaggctcagaaggagcctgggagaagagcagcgccagctgcctgagagagcattccgcgcgcttccctccgggtctggtcctggggaagtgccaacgtcaaggggcctgtcctcaggcaccctgccagggcccggaaacgaagctagccgggagctggagtcatactgttag

SEQ ID NO: 118184 - DNA, 1401 bp, synthetic construct
  misc_feature 1..1401: note = Description of Artificial Sequence: Synthetic coding sequence
  source 1..1401: mol_type = other DNA
atgacaaccagtcccattctgcagctgctgctgagattatccctgtgcgggctgcttctgcagagagcggaaacaggttctaagggccagacggctggggaactttaccagcgctgggagagatatcgtcgagagtgccaggaaacgctggctgccgcggagccaccaagcggtctggcatgcaatgggagctttgacatgtacgtgtgttgggattatgccgcacctaacgccaccgcccgggcctcctgtccttggtatctcccttggcatcatcacgttgcagcaggcttcgtccttagacagtgcggatctgatggccagtggggcctttggcgggaccatacgcaatgtgaaaacccggaaaagaacgaagcttttctggaccaaagactcattttggagagattgcaggttatgtacacagtgggctattctctgtcactcgcaacactattgctggcactgctgatcctgagtctgtttcgccgtctgcactgcacaagaaactacatacatatcaatctgtttacttccttcatgctgcgagccgccgccatcttatccagggataggctgctgcccaggccaggcccgtatctaggcgaccaagctctcgccctctggaaccaggcactggctgcttgccgcacagcacagattgtgacccagtactgcgtgggcgcgaactatacttggctcctcgttgaaggcgtctatttgcatagcttgcttgtgctggtcggggggtccgaggaagggcacttccgctattatctgctgctcgggtggggggcccctgccttattcgtcattccttgggtgattgtgagatatctgtacgagaatacacagtgctgggagcgcaacgaagtgaaggcgatctggtggatcattaggaccccgattctcatgacaatcttaattaatttcctcatttttatcaggatattggggatccttctctcaaagttacgaacccgacagatgcgatgccgggactaccggttgcggctggccaggtccacactgacccttgttccgctcctgggagtgcacgaggtggtgttcgctccagtcactgaagaacaggcacgtggcgccctcagattcgctaagttagggtttgaaatttttctttctagctttcagggattcctggtgtccgttctgtactgctttatcaataaggaggtgcagtctgagatacggcgcggttggcaccattgtagactccggaggagccttggcgaggaacagagacagttgccagaaagggcattccgggcgcttccatccgggagcgggccaggcgaagttccaacatcaagaggtctgtcttccgggaccttgcccggtccaggtaatgaggcaagcagagaactcgagtcttactgctag

SEQ ID NO: 118185 - DNA, 1254 bp, synthetic construct
  misc_feature 1..1254: note = Description of Artificial Sequence: Synthetic coding sequence
  source 1..1254: mol_type = other DNA
atggcctggtttgctttgtatctgctctctctgctctgggccacagctggaacctctacccagactcagtcgtcttgcagtgtaccaagcgcccaagaacccctcgtcaacggtattcaggtcttgatggaaaattctgtaacttctagcgcatatcccaatcctagcattctcattgccatgaatctcgccggcgcgtataatttgaaggctcaaaagctgctgacctatcagcttatgtccagtgataacaacgatctcactatcggtcaactgggattgacgatcatggcactcacatcatcatgccgcgatcccggcgacaaggtgagtatccttcagaggcagatggagaattgggctccatcgtctcccaacgccgaagcgagtgctttctatgggcccagtctggctatcctggctctgtgccagaagaactccgaggcaacgctccctatagccgtgcggtttgccaaaacactgttggccaactcctctccctttaacgtggacacgggcgctatggctaccctcgcactcacctgtatgtacaataagattccggtgggaagcgaggagggatacagatccctgttcgggcaggtgcttaaggacatcgtagagaagatttcaatgaaaattaaggacaacggaataatcggggacatttatagtactggcctggccatgcaggccttgagcgtcacgcctgagccctcaaagaaagagtggaactgcaaaaaaaccaccgatatgatcctgaacgaaataaagcaggggaaatttcacaaccctatgagcattgcacagattttgccctcattaaaagggaagacttatctggacgttcctcaggtgacttgctcaccagatcatgaagtgcagcccacactccctagcaacccgggtcccgggcccactagcgcgtcaaacatcaccgttatctatacgattaataaccagctgcggggtgtggagcttttattcaacgagacgattaatgtatccgtgaagagtggatccgtcctgctggttgtgctggaagaggcccagagaaaaaacccaatgttcaagttcgagaccacaatgacatcatggggcctcgtggtgagctctatcaataatatagccgagaatgttaaccacaaaacatactggcaatttctttccggggtgacgccgctgaacgagggagtggctgattacattccattcaatcatgagcacatcactgcgaattttacacagtactag

SEQ ID NO: 118186 - DNA, 1179 bp, synthetic construct
  misc_feature 1..1179: note = Description of Artificial Sequence: Synthetic coding sequence
  source 1..1179: mol_type = other DNA
atggccgtgccttcagcccaggaaccactggtgaatggaatccaggtgcttatggagaactctgtcacttcttccgcctatccaaatcccagcatactcatcgcgatgaacctggctggcgcctacaatttgaaggcccagaaactgctcacatatcagctgatgtccagtgacaacaatgatctgaccattgggcagctcggtctcacaatcatggctctcacctcctcctgtcgggacccaggggacaaagtgtcaattctacaaagacaaatggagaactgggccccaagtagtcccaatgcagaggcttcagctttctacggaccaagtttggccatcctcgcactctgtcaaaaaaactccgaggctactctacctatcgccgttcgtttcgctaagaccctgctggctaattcgagcccttttaacgttgatactggagccatggccactctggctctaacctgcatgtacaacaagatacccgtcggatcggaggaaggctaccgaagtctgtttgggcaggtgcttaaggacatcgtggaaaaaatctccatgaaaatcaaggacaatggcatcattggggatatctactcgacaggcctggcaatgcaggcgctctccgtgacccccgagccttctaagaaggagtggaattgcaaaaagaccaccgatatgattttgaatgagataaagcagggcaaatttcacaaccccatgtccatagctcagatccttccttctcttaaaggcaaaacctatctcgacgtgcctcaggtgacctgtagtcccgatcacgaggtgcagccaacacttccgtccaacccaggcccaggccccacttctgcttctaacatcaccgtcatctatacgatcaataaccaacttagaggcgttgagttgctgttcaatgaaacaatcaacgtgtcagtaaaatctgggtcagtgctcctagtcgtgcttgaggaagcgcagcgaaagaatcccatgtttaaatttgagacaacaatgactagttggggtctggttgtgtcatccatcaacaacatcgccgaaaatgtgaaccataagacctactggcagttcttgtcgggggtgacgcccttaaacgagggtgtggctgattatatccctttcaaccatgagcacattacagcgaacttcacccagtactag

SEQ ID NO: 118187 - DNA, 306 bp, synthetic construct
  misc_feature 1..306: note = Description of Artificial Sequence: Synthetic coding sequence
  source 1..306: mol_type = other DNA
atgcagcgcctttgtgtttacgttcttatttttgcacttgcattagccgccttcagtgaggcctcctggaaaccaaggagtcagcagcccgatgcccctctaggaacaggtgcaaatagggacctcgaacttccctggttggagcagcagggtcccgcatctcaccacaggcgtcagttaggtccgcaagggccgcctcacctggtagccgacccgagcaaaaaacagggcccatggctggaggaggaggaagaggcctacggctggatggacttcgggcggcgaagcgccgaagatgaaaactag

SEQ ID NO: 118188 - DNA, 447 bp, synthetic construct
  misc_feature 1..447: note = Description of Artificial Sequence: Synthetic coding sequence
  source 1..447: mol_type = other DNA
atgagaggtagggagcttcctctggtccttctggcactcgtgctgtgtttggcgccaagggggcgggccgttcccctgccagccggcggagggaccgtcctcactaagatgtatccccgcgggaatcattgggcggttgggcacttaatggggaagaagtctactggcgagagtagctcggtgagtgaaaggggctccctgaaacagcagttacgcgagtacatccgctgggaagaagcggcacgcaatctgctagggttaattgaggctaaggaaaacagaaaccaccaacccccacagcccaaagctctaggcaaccagcagccttcctgggacagcgaagatagttctaactttaaggatgtgggcagcaaaggaaaggtaggccgcctcagcgctcctggaagtcagcgcgagggacgcaacccccagctgaaccaacagtag

SEQ ID NO: 118189 - DNA, 426 bp, synthetic construct
  misc_feature 1..426: note = Description of Artificial Sequence: Synthetic coding sequence
  source 1..426: mol_type = other DNA
atgcggggccgggaattgcccctggtactacttgccctagtcctgtgcctggctccgcgcgggagggccgtgcccctcccagctggcggaggaacagtgctgacgaagatgtacccaagaggtaaccactgggccgtcggccatctgatgggcaaaaaatcaaccggggaatcctcctcggtcagtgaacgcggtagccttaagcagcagttgagagagtatatacgctgggaagaagccgcacggaatcttctggggctcattgaagcaaaggaaaacagaaatcatcagccaccacagcctaaggctctaggaaatcagcagccttcttgggactccgaggactcttctaattttaaagatgtgggctcaaaaggtaagggtagccagcgcgaaggacgaaatccccagctgaaccagcaatag

SEQ ID NO: 118190 - DNA, 417 bp, synthetic construct
  misc_feature 1..417: note = Description of Artificial Sequence: Synthetic coding sequence
  source 1..417: mol_type = other DNA
atgaggggaagagagctgccactggtgctacttgcccttgtgctgtgtctcgcacctcgtggacgggccgtgcccctccctgccggaggaggcacagtacttaccaagatgtatccaagaggaaatcattgggccgtgggacatctgatgggaaagaagtccacaggtgaaagttcctccgtctcagagcgaggatccttgaaacaacagcttagggagtacatcagatgggaggaagcggctcgcaacctgttgggacttatcgaggcaaaggaaaaccgcaatcatcagcctccacaacctaaagccctgggaaaccagcaaccaagctgggactctgaggactcgagcaactttaaggacctggtggatagtctgttacaggtgctgaacgtcaaggaaggcactccctcatag

SEQ ID NO: 118191 - DNA, 1155 bp, synthetic construct
  misc_feature 1..1155: note = Description of Artificial Sequence: Synthetic coding sequence
  source 1..1155: mol_type = other DNA
atggccctcaacgactgttttcttctgaatctggaagttgaccattttatgcattgtaatattagtagccatagtgctgatctccccgtcaacgatgactggtctcatcccggaatcttatacgtcattccagcagtgtacggtgtgatcattctcatcggactgatcggcaatataaccctgatcaaaatattctgcaccgtcaagtccatgcggaatgtcccaaatttgttcatctcatccctggctctcggggacttactcctcctgattacatgtgcccctgtggacgcctctcggtatctggctgataggtggcttttcggccgtatcggctgtaagctgatcccattcatccaactgactagcgtcggtgtcagtgtgttcacgttgactgcactctcagccgacaggtataaggctatcgtaagacctatggacatacaggcttctcatgctcttatgaagatatgcctgaaagcggccttcatttggatcatctctatgttactggcaatcccagaggcggtgttctctgatctgcacccgtttcatgaggagtccaccaaccagacttttatatcctgcgctccctatccacacagtaacgaactgcatccaaagatccacagcatggcaagttttctagtcttttatgtgattccgctctctattatctccgtctactactattttatcgcgaaaaacttaatccagtctgcctacaacctgcctgtcgaggggaacattcatgtgaaaaagcaaatcgaatctcgcaaacgcttggccaagaccgtgcttgtcttcgtcgggctattcgccttctgttggcttccgaatcatgtcatttatctttaccgtagttatcattattccgaggttgacacaagcatgcttcatttcgttacctctatctgtgcaaggctgcttgcctttacgaactcctgcgtaaaccccttcgcactctatctcctgagcaaatcctttagaaaacagtttaatacacagctcctgtgctgtcagccagggctgattatacgatcgcatagtactgggagatctaccacatgtatgacctcccttaaatccacaaaccccagtgtcgccacatttagcctgataaatggcaatatttgccacgagcgttatgtgtag

SEQ ID NO: 118192 - DNA, 480 bp, synthetic construct
  misc_feature 1..480: note = Description of Artificial Sequence: Synthetic coding sequence
  source 1..480: mol_type = other DNA
atggcctcattccttgtgttttatgtcattccactatctattatttcagtgtattactattttattgcaaaaaatctgatccaatcggcgtataacctgcctgtggagggaaatattcacgtaaagaaacagattgagagccgcaaacggctggcaaaaacagtcctagtgtttgtgggcctgttcgccttttgctggctccctaatcatgtaatatacctatatagatcgtatcactactccgaggtggacacctcaatgctgcacttcgtaacttctatttgcgcgcggctgctagctttcaccaattcctgcgtgaatccttttgccctctatctgttgagtgagtttcaggaaaccgtgcaacacagcgctgctctccttcctgcatggcccgatcaccctgtgtcacaacattggaaagaatataacctccacgatctcccccaagaataccagcctctgagaggacacctttag

SEQ ID NO: 118193 - DNA, 600 bp, synthetic construct
  misc_feature 1..600: note = Description of Artificial Sequence: Synthetic coding sequence
  source 1..600: mol_type = other DNA
atgttggcatattcctcagttcactgctttagggaggacaagatgaagtttactatcgtctttgcgggcctgctcggcgtgttcctcgctccggcactggctaactacaacatcaacgtcaatgacgataacaacaacgctggatctggtcaacaatctgtatcagtcaacaatgagcataatgttgcaaacgtggacaacaacaatggctgggattcgtggaattccatctgggactatgggaatggctttgcagctacccgcttgtttcagaaaaagacctgtatcgtccacaagatgaacaaagaagtcatgccatctatccagtccttagacgcgctcgttaaagagaagaaacttcaggggaagggccccggcggaccccccccaaagggtctcatgtactccgtcaatccaaacaaggtggatgatctatcgaaatttggaaaaaatatcgcaaacatgtgcagggggatacccacatatatggctgaggaaatgcaggaagcctcactttttttttactctggaacatgctataccacttctgtcctgtggatcgttgacatctctttctgtggcgatactgtggaaaactag

SEQ ID NO: 118194 - DNA, 1092 bp, synthetic construct
  misc_feature 1..1092: note = Description of Artificial Sequence: Synthetic coding sequence
  source 1..1092: mol_type = other DNA
atgcagagggctggaggtggaagcgcccctgggggtaacggcggcgggggcggaggaggaccggggaccgccttttccatcgactccctgattggtccaccccctcccagatccggccaccttctctataccgggtaccctatgttcatgccgtacagaccgttggttctcccccaggccctagctccggccccgctgcccgccggactccccccattagcgcctctggcttctttcgctggtcgcctaacgaacacattctgtgcaggcctgggccaggctgtgccttctatggtggccctgacaaccgccctcccgtctttcgcggagccgcctgacgccttctatggcccacaagagttagccgccgctgccgctgccgccgccgcaacagccgcacgcaataatccagaacctgggggtcggagaccagagggcgggttggaggctgatgaactattaccagcccgggagaaggtagcagaacctccacccccccctccaccccacttttccgaaactttccccagcctgcccgccgaagggaaggtatactcctccgacgaggagaagttagaggccagtgccggagatcccgccggttctgagcaggaggaagaaggttccggcggggacagtgaggatgacgggttcttggactctagcgccgggggccccggggccttgcttggacccaaacctaagttaaaagggtcactcggcactggggccgaagagggagctcccgttacagctggagtaactgcaccaggcgggaaatccagacggaggaggacagcttttacctccgagcagctgctcgaactagaaaaggaatttcactgtaaaaaatacctctcactgaccgagagaagccaaatcgcacatgctctgaagctgagtgaggtacaggtgaagatctggttccagaatagaagagcaaaatggaaacgtatcaaggccggcaacgtgtcgagccgctccggtgagcctgttcgcaatccaaagatagtggtgcccattcctgtacacgtgaatcgatttgccgttagatcacaacaccagcagatggagcagggtgctcgcccctag

SEQ ID NO: 118195 - DNA, 1047 bp, synthetic construct
  misc_feature 1..1047: note = Description of Artificial Sequence: Synthetic coding sequence
  source 1..1047: mol_type = other DNA
atgtccgcagctttccctccctccctgatgatgatgcagcgtccgctcggcagttctacagccttttctatcgatagtcttattgggagccccccacagccgtcccctggtcatttcgtttataccggctatccaatgtttatgccataccgccctgtggttctgcctccaccaccacctccaccaccagctctgccccaggccgctctgcagccagccttgccgcccgcccacccccaccatcaaattccatcacttcctaccggattttgctcctcactggctcaaggaatggcattaaccagcaccttgatggctacactgccaggcggtttctctgcgtctccacaacatcaggaggctgcagctgctaggaaatttgccccgcagcctctgccgggaggaggaaattttgacaaagccgaagcactccaggctgacgctgaagatggaaagggcttcttggcaaaggaaggcagtcttcttgccttctctgctgctgagaccgttcaggcttcactcgtcggggctgtgagaggtcagggcaaagatgaaagcaaagtggaagatgatcctaaagggaaggaagagtccttctccttagagagcgatgttgattacagcagcgatgataacctaacgggtcaggccgctcataaggaagaagaccccggccatgccctggaagaaaccccccccagtagcggcgcagctgggtctacaacctcgaccggaaagaatagaagacggagaacagcattcacgtctgagcagctgctggaactggaaaaggagttccattgtaaaaaatatctctcattgactgaacggagccagattgcccatgccctcaagttgagtgaagttcaggtcaagatatggttccagaatcggagagccaagtggaaaagagtgaaggccggtaatgctaacagtaagacaggcgaaccatctcggaatcccaagattgtggtccctatccccgtgcacgtgtccagatttgccatccgcagtcagcaccagcagttggagcaggctcgaccctag

SEQ ID NO: 118196 - DNA, 1443 bp, synthetic construct
  misc_feature 1..1443: note = Description of Artificial Sequence: Synthetic coding sequence
  source 1..1443: mol_type = other DNA
atggaggtcgcacccgagcagcctagatggatggcccaccctgcagtgctgaatgcacaacacccggactctcatcatccaggcctggcgcataattatatggagccagcacaactcctgccacctgacgaggtcgatgtcttctttaatcacttggattctcagggaaacccttactacgctaaccctgcacatgctagagcccgagttagctatagtcctgctcacgcgcggctgaccggagggcagatgtgccggcctcacctgttacattcacctggtttgccgtggctggacggcggtaaggctgctttatccgcagccgccgcccaccaccacaatccctggacagtcagccccttctccaagacccccttacatccctcggctgcgggcggccccggaggtcctctttcagtgtacccaggggcaggaggtggttccggaggggggagcggttcgagtgtagcatcactgacccccactgccgcgcactcggggagtcatctgttcgggtttccgcccacacctccaaaggaggtgtctcctgatcctagcacaactggagccgctagtcccgcctcaagttcagccggcggctccgctgcccgtggagaagacaaggatggcgtcaagtatcaggtgagcctcaccgaaagcatgaagatggagagcggcagcccattgcggcccggcctggcaactatgggcacccaacccgcaacacaccaccccatcccaacttacccatcctacgttcctgccgcggcacacgactattcttccggtctgtttcaccccgggggatttctcgggggccctgctagttctttcactccaaaacagaggtctaaagcccgctcttgcagtgaagggcgcgagtgtgttaattgtggcgctactgcaacacccctgtggcgacgggatgggaccggtcactacctatgtaacgcctgtggattgtatcacaaaatgaatgggcaaaaccgacctttgattaagcccaagagacgactgagcgcagcccgccgcgcagggacatgctgcgcaaattgccaaacaacgactacaactctctggagaagaaacgcgaacggcgaccctgtatgcaatgcttgcggattatactataagttacacaatgtgaacaggcctctcacaatgaagaaagagggtattcaaactcggaatagaaagatgtccaacaagtctaaaaagtctaaaaaaggcgctgagtgctttgaagaactctcaaagtgcatgcaagagaagagctccccattcagtgcagcggcgttggctggacatatggcgcccgtcggccaccttccaccattcagtcatagtggccatatcctgcctactcctactccaatccacccaagcagtagtttaagttttggccacccccacccaagtagtatggtcaccgcaatgggatag

SEQ ID NO: 118197 - DNA, 1401 bp, synthetic construct
  misc_feature 1..1401: note = Description of Artificial Sequence: Synthetic coding sequence
  source 1..1401: mol_type = other DNA
atggaggtggcccccgaacagccacgctggatggctcatcccgctgttcttaacgcccaacaccctgatagccaccatcccggtctagcccacaactatatggaacctgcacagctgctgccaccagacgaagttgatgtcttcttcaaccaccttgactcccagggaaatccgtactacgcaaaccccgcacacgctcgcgcgcgggtgagttactcgccagcccacgctagactgacaggaggacagatgtgtagacctcacctgctgcacagccccggactgccatggctggacggaggtaaagctgcactgtcggcggccgcggcgcaccatcacaatccgtggactgtgagtccattttccaaaactccattgcaccccagtgcggcaggcggccctggcggacccctgtccgtctatccaggcgccggcggggggtcaggcgggggcagcggctcttcggtggccagccttacaccaacagccgcacacagtgggtcacacttattcggctttccccccacaccccccaaggaggtatctcctgacccttctactaccggcgcagcttctccggcctcaagcagcgcaggcggatcggctgcccgcggcgaggacaaggacggtgtgaagtaccaggtgagccttacggaaagcatgaagatggagtccggttctccactgaggcctgggctggctacaatgggcacccagcctgctacccaccacccaatccccacctatcctagctacgttccagcagccgctcatgactattcatctggattgttccacccaggtgggtttctgggcggacccgcaagctcatttacccctaaacagagatccaaggctcggtcatgttccgagggacgtgagtgcgtaaattgcggcgccaccgccacccccttgtggaggcgcgatggcaccggccattatctgtgtaatgcttgcggactgtaccataagatgaacggccagaacagaccactaattaagcccaagagacgcttgaccacaactacaaccctgtggcgtcggaatgcaaatggggatcctgtgtgtaacgcctgcgggctgtattataagctacataacgttaaccggcctctgactatgaaaaaggagggaatccaaacacgaaatcgcaaaatgagcaacaaatcaaagaagagtaaaaagggcgcagaatgttttgaggaactgtcaaaatgcatgcaagaaaagagttcccccttctcagcagccgccctggctggccacatggctccagtagggcatctccctcctttttctcattccggccacatcttaccaacacctacccctatccacccatctagctccctgagctttggccacccacaccccagttcgatggtgactgctatgggctag

SEQ ID NO: 118198 - DNA, 1443 bp, synthetic construct
  misc_feature 1..1443: note = Description of Artificial Sequence: Synthetic coding sequence
  source 1..1443: mol_type = other DNA
atggaagtcgcccccgaacagccccgctggatggcccacccagccgtcctcaatgctcagcatcccgattcacaccatcctgggctagcacataattacatggagcctgcccagctcttgcccccggatgaggtggatgtcttcttcaatcatctagactcccaaggcaacccttactacgcaaatcctgctcacgctagagctcgcgtctcctactccccggcccacgccagactcacagggggtcagatgtgtaggccccacctacttcactcgccaggcctcccctggctcgacggcggcaaagctgctcttagcgccgccgccgcgcaccatcacaatccttggacagtctcccccttctcaaagacccccctgcaccctagcgctgcgggcggacccgggggaccattaagcgtttaccccggagccgggggagggtccggcggaggatccggatcttccgtcgcatcactgactcctactgccgctcatagcggaagccatctcttcggctttccacccactccacccaaagaggtgtcacctgaccctagtaccaccggggctgcgtcacccgcctcgtcctccgccggcggatccgccgcacggggagaggataaggacggagtcaaataccaggttagtctgaccgagtccatgaaaatggagagcggctcacccctgagaccaggtctggcgaccatgggaactcagccagcgacccatcaccccatcccaacctatcccagctacgtcccagccgctgcacatgattattcttccggacttttccatccagggggctttctcggaggccctgcctccagtttcaccccaaagcaaagatccaaggctcgctcatgttctgaaggcagagaatgcgttaactgcggtgctacagcaacccccttgtggcgtcgcgacgggaccggccattacctgtgtaatgcctgtggactctaccacaaaatgaacggccagaacaggccccttatcaaaccaaagagaaggctgtctgcggcccgtagagccggcacttgttgtgctaactgccagaccacgactactaccctgtggaggagaaatgccaatggagacccagtctgcaatgcatgcggcctttactataagctgcacaatgtcaaccgccctcttactatgaagaaggaaggcatacagacacgtaaccgcaaaatgtcaaacaaaagcaaaaaaagcaagaaaggagctgagtgtttcgaggagcttagcaagtgcatgcaagagaaatcttctcctttcagtgccgcagctttggcaggccacatggcacctgtcggacacctgccacccttttctcattcagggcacatcctacctaccccaacccccatccacccaagctcgagcttgtcgttcgggcacccccatccctcgagcatggtgactgccatgggctag

SEQ ID NO: 118199 - DNA, 453 bp, synthetic construct
  misc_feature 1..453: note = Description of Artificial Sequence: Synthetic coding sequence
  source 1..453: mol_type = other DNA
atggaggttgcccctgaacagccacgctggatggcccacccggccgtacttaatgcacagcaccctgactcacaccatccaggcctggcacacaattatatggagcccgcacagctcctccccccggacgaggtagatgtcttctttaaccacctggatagccaaggcaacccttattacgcaaatcccgcgcacgccagagcccgggtgtcatatagccccgcccacgccaggctcacaggcggacagatgtgtcggccacacctgttacactctccaggcttgccatggttggacggcggcaaagctgctttaagcgccgccgctgcccaccaccacaacccctggactgtatcgcctttttctaagactcctctgcacccaagcgccgccgggggtcccggaggccccctgagtgtgtacccaggggctggcggggggtccggaggctag

SEQ ID NO: 118200 - DNA, 27 bp, synthetic construct
  misc_feature 1..27: note = Description of Artificial Sequence: Synthetic coding sequence
  source 1..27: mol_type = other DNA
atggaagtagctccggagcaaccttag

SEQ ID NO: 118201 - DNA, 1326 bp, synthetic construct
  misc_feature 1..1326: note = Description of Artificial Sequence: Synthetic coding sequence
  source 1..1326: mol_type = other DNA
atgtaccagagtctgccatggcctcccactactggtcgacctcctgtgcccactcggcgagccgcccccgcgccttcctgcactgcccgggctccccgaccccgtcagtctacctgcccacacagaggtgcattgctgagggccgggcctgtcttaccccccggccgaaggaggggtttgtgcgttcgtcgggcaagtggtgggtcctccggcggcgccgcctcaggagcggggcccggaacacagcagggcagtccagggtggtcccaggccggagccgatggtgcggcatatacccctcctcctgtaagcccaagatttagctttcctggcacaaccggcagtctcgccgccgctgcagccgccgctgccgctagagaggctgccgcctattctagtggcggcggggcagctggggctgggctggccggccgcgagcaatacggacgcgcagggttcgccgggtcttatagcagcccctatcccgcctatatggccgacgtgggcgcctcatgggccgctgcagcggccgcatccgctggtcctttcgatagtccagtactccactcccttcctggacgcgcaaacccagccgcacgccaccctaatttggatatgtttgatgactttagtgagggaagagagtgcgtgaactgcggagccatgtcgacaccactgtggcgaagagacggcaccggtcattacctttgcaacgcctgcggattatatcataagatgaacggaataaatcgtccactcatcaaaccacagcgccgtctatctgcctctcggagggtcggattatcttgcgccaattgtcagacgactacaactaccttgtggcgcagaaatgctgagggtgaacccgtgtgcaacgcatgtggactttatatgaagctccacggagttccgcggccactcgccatgagaaaggagggtatccaaaccaggaagcgtaagcctaaaaacctcaacaagtccaagacccccgctgccccatccggcagcgaatcactgccacctgcctctggcgcttcaagcaatagctcaaatgccacaacctcctcttcagaggaaatgagaccaatcaagacagagcctggcctgagcagccactatgggcactcctcaagtgtttcgcagaccttctctgtgagcgcaatgagcggccacggaccttcaattcacccggtgttatccgcccttaagcttagcccacagggctacgcgtctcctgtcagtcaatcgccccagacctcatcgaaacaagactcttggaattcgctcgtcctggctgactcgcatggagacataatcaccgcttag

SEQ ID NO: 118202 - DNA, 1329 bp, synthetic construct
  misc_feature 1..1329: note = Description of Artificial Sequence: Synthetic coding sequence
  source 1..1329: mol_type = other DNA
atgtaccagtctctggccatggcagcaaaccatggtcctcccccaggcgcatacgaagctggagggcccggagccttcatgcacggcgcaggagctgccagctctcccgtatacgtgcccacacctcgggttccaagctccgtcttagggttgtcatacttgcaggggggcggggccgggtccgcaagtggtggtgcatccggtggatcttccggcggagccgcgtctggagccggacctgggacacagcaaggatctcccggatggtcccaggcaggcgccgacggcgcggcttacaccccccctcctgtgtctccacgcttcagctttccgggaacaacaggcagtctggccgccgccgcagcagccgccgctgctagagaagcagcggcctattccagtggcggaggcgctgcgggcgcaggacttgccggccgtgagcaatacggaagagctggcttcgctggctcctattcttctccataccccgcctatatggccgatgttggcgcaagttgggccgcggccgccgccgctagtgccggtccatttgacagccccgtattgcactctcttccaggaagggcgaatcctgcagccagacaccctaacctagacatgtttgacgacttttccgagggccgtgaatgcgtgaactgtggggctatgagcactccactgtggcgacgcgatggaaccggccactatctctgtaacgcctgtggactctaccataaaatgaatggcattaacagacctttaattaagccccagaggcgcctgtcagcaagtcgacgtgtggggctgtcctgcgctaactgccagaccaccacaaccactctgtggcggcgcaatgccgagggcgaacctgtgtgtaacgcttgtggtctgtacatgaagctgcacggcgtgcctcggcctttagctatgcggaaggaagggatacagaccagaaagcggaaacccaaaaaccttaataaatctaagacccctgcggcgccgagtggctctgagagcctcccccctgcctcgggtgcttcgtcaaattctagcaacgccactaccagttcaagcgaagagatgcggcccatcaagaccgagcctggattatccagccattacggtcactcttctagcgtgtcccagacatttagcgtgagtgcaatgagtggccatgggcccagcatccatccagtattgtcggcactgaaattgtcccctcagggatacgcctctccagtgagccagagcccacaaacatcatcaaaacaggacagctggaattccctggtgcttgccgactcccacggcgacatcatcactgcatag

SEQ ID NO: 118203 - DNA, 528 bp, synthetic construct
  misc_feature 1..528: note = Description of Artificial Sequence: Synthetic coding sequence
  source 1..528: mol_type = other DNA
atgtttgacgatttctctgaagggcgcgagtgcgttaattgcggagctatgtcaacccccttgtggagacgcgacggaaccggccactatctgtgtaatgcatgtggactctatcataaaatgaacggcatcaaccgccctctaattaagccacaacgaagactgagtgccagtaggcgtgtgggattatcctgcgccaattgtcagacaaccaccacaaccctctggagaagaaatgctgaaggagaacctgtgtgcaatgcctgcggcctttatatgaaactgcatggggtgccacgtccacttgccatgaggaaagagggcatacagacgagaaaacgcaagccaaaaaacctcaacaagtcaaagacaccagctgctcccagcggatcagagagcctgccccccgcttcaggagcctcctccaatagttccaacgcgacaacttccagctcagaggaaatgagacccatcaagactgagccggggttgtcaagccactacggtcatagttctagtgtgtcgtag

SEQ ID NO: 118204 - DNA, 354 bp, synthetic construct
  misc_feature 1..354: note = Description of Artificial Sequence: Synthetic coding sequence
  source 1..354: mol_type = other DNA
atgtaccaatcccttgcgatggctgcgaatcacggccctcctcccggcgcatacgaggcaggtggcccaggggccttcatgcacggcgccggagcagccagtagtccagtttatgtccccaccccacgggttccttctagtgtgctgggactctcgtatctgcagggaggaggagccggatcagcttccggaggcgcttctggtggatccagcggcggagccgccagcggcgcagggcccggcacgcagcaaggctccccaggatggtcacaggccggggccgacggagcagcctataccccacctcctgttagtccaaggttctcattcccaggcactacgggctccctgtag

SEQ ID NO: 118205 - DNA, 711 bp, synthetic construct
  misc_feature 1..711: note = Description of Artificial Sequence: Synthetic coding sequence
  source 1..711: mol_type = other DNA
atgtttgacgactttagcgaggggagggagtgcgttaactgtggtgctatgtctactcctctgtggagacgagacggtacaggtcactacctgtgtaacgcctgtggcttatatcataaaatgaatggcatcaatcgccccttgatcaaaccacaacgccgcctcagtgcttccagaagagtgggcctgtcatgtgcgaactgccagaccaccactactactttgtggagaagaaacgctgaaggagaacccgtgtgcaatgcatgcgggctttatatgaaacttcatggagtacccagacctctggcaatgcggaaggaaggcatacaaacacggaaacgtaaacctaaaaatctgaataaatcaaagactccagcagccccaagtgggtccgagtccctgccaccagcctccggtgcctcctccaattcctctaacgccacaacgagctcctccgaggagatgaggcccatcaaaacagaacctgggctgtcctcacactatgggcatagctcctccgtttcccaaactttcagcgtgagtgctatgtccgggcacgggccatccatccacccagtcctctccgcgctcaaactgagcccgcagggatacgctagccccgttagccagtctccacagaccagctcaaagcaggacagttggaatagtctcgtcctggctgattctcatggggacatcattaccgcatag

SEQ ID NO: 118206 - DNA, 1332 bp, synthetic construct
  misc_feature 1..1332: note = Description of Artificial Sequence: Synthetic coding sequence
  source 1..1332: mol_type = other DNA
atgtatcaatccttagctatggccgctaaccacggtccaccacctggtgcttacgaggcaggtggacctggtgctttcatgcacggggcaggagcggctagttcccccgtgtacgtgccgactccccgggtgccgtcatccgtgcttggactgagttacctgcaagggggtggggccggatccgccagcgggggtgcgtctggcggtagctcagggggggcggcctcaggggcgggacccggcactcagcagggtagtccaggctggtcccaggcaggagcagacggagccgcttacactcccccccccgtgtctccgagattcagtttcccagggaccacaggcagcctggccgccgccgcagctgcagcagctgcacgagaagccgccgcctatagttccggaggcggtgcagcaggtgcagggttggcagggagagagcaatacggccgggctgggttcgccgggagttattccagtccgtatccggcttacatggcagatgttggcgccagctgggctgccgctgccgccgctagcgccggacccttcgacagtcctgtcctacatagcctccccgggcgcgcaaatcctgccgccaggcatcccaacttggtggacatgttcgacgattttagcgaagggagagaatgtgttaactgtggagccatgtctacccctttatggagaagagatggaactggccactacctatgcaacgcatgcggcctatatcacaaaatgaacggaatcaatagaccgctgattaagcctcaaagaagactcagcgctagccgcagggttggactgtcttgtgccaactgtcaaacgaccacaactacattgtggcgccggaacgccgagggggaaccggtctgcaatgcctgtggactttacatgaagctacacggcgtacctcgtcccctggctatgcgaaaggaggggatccagactaggaagcgcaagcctaaaaatctgaataaaagcaaaacacccgccgctccgagcggctccgagagcctccccccagcttcaggtgcctcttccaactcttcaaatgcgaccacgagcagctcagaagaaatgaggcctattaagactgaacctggcctgagctcccactacggccactctagcagcgttagtcagactttttctgtctctgctatgtcaggccatgggccctccatacatccagttctatccgccctaaaactgagccctcaaggatacgccagccccgtgagccagtcccctcagacctctagtaagcaggatagctggaattccctggtactggctgattcccacggggacatcatcactgcatag

SEQ ID NO: 118207 - DNA, 1194 bp, synthetic construct
  misc_feature 1..1194: note = Description of Artificial Sequence: Synthetic coding sequence
  source 1..1194: mol_type = other DNA
atgtaccagtctctagccctcgccgcctcacctcgccaggctgcgtacgccgactctggaagcttcctgcacgcaccaggagccggctcacctatgtttgtccctccggcccgcgtcccatccatgctgagctatctgtccggatgcgagcctagtcctcagcccccggagctcgccgcccgccccggctgggcccagacagcaaccgcagacagctctgcatttggtcccggttcccctcaccctcctgcagcccaccctcccggagccactgcttttccttttgctcacagtccttctgggcctggatccgggggttccgcgggcggtcgtgacggaagcgcgtatcagggtgcattactgcctcgggagcagtttgccgctccgctcgggcgtcccgtgggcacgtcctactccgccacctaccccgcctatgtgtctcccgatgtagcccagtcgtggaccgccggcccttttgatggaagcgtgttacatggactgccggggcgcagacccacattcgtctcagactttttagaggagttccctggagagggtagggagtgtgtgaattgcggagccctgagtacgcccctttggcggagggacggcacaggtcactacctgtgtaacgcttgcggattatatcacaaaatgaatggcgtcaataggcccctcgtgcgcccccaaaagcggttatcctcaagtaggagggcaggactctgctgtaccaattgccacaccacgaatacaacactgtggagacggaatagtgaaggggaaccagtttgtaatgcttgcgggctgtacatgaagctgcatggcgtgccccgtcctctcgccatgaagaaagaaagcattcaaaccagaaagcggaaacccaaaacaatcgctaaggcccgcgggtctagcgggagcactcgcaacgcttcggcgtctccttcggcagtggcatctaccgactctagcgccgccaccagcaaagccaagccaagcttagctagtcctgtttgtccaggtccgtccatggccccacaggcctccggccaagaggatgattcgctggcccctggccacctggaattcaagttcgaacccgaagatttcgcttttccttcaactgctccctcaccccaggctgggctgagaggggccctgcgccaggaagcttggtgtgctctggccttggcttag

SEQ ID NO: 118208 - DNA, 1194 bp, synthetic construct
  misc_feature 1..1194: note = Description of Artificial Sequence: Synthetic coding sequence
  source 1..1194: mol_type = other DNA
atgtatcaatctctagctctggccgcaagcccgcgccaggcagcctatgccgactcaggaagtttcttgcacgcaccgggggctggaagtccgatgttcgttcccccagccagggtgccctcaatgttgtcatacctctctgggtgcgagccttccccgcagccgcccgagctcgcggcacgtcccgggtgggcccaaacagctacagcagattccagtgcctttggcccagggtcaccccatcccccagcggctcatcccccgggcgccactgcctttcccttcgcgcattcccctagtggacccgggtctggaggcagtgcaggagggcgagacgggtctgcctatcagggtgcgttgctgccaagagagcagtttgctgcacccctgggaaggcccgtgggcacgtcctacagtgctacctatccagcatatgtgtctcccgacgtggcccagagttggaccgcgggaccctttgacgggagtgtcctccacggcctcccagggcgtcggcctaccttcgtctctgatttcctcgaggaattccccggtgagggcagagagtgtgtgaactgcggcgctttgagtaccccgctgtggcggagggacgggacaggccactacttgtgcaatgcctgcggactgtatcataaaatgaacggtgttaatagacccctcgtcaggccacagaagcggctgtccagcagcagaagggctggcctctgctgcaccaactgtcacactacaaatactactttatggagaagaaacagcgaaggggagccggtctgtaacgcatgcggtctttacatgaagctgcatggagtcccacggcccctcgcaatgaagaaggaatccattcaaaccaggaaacgaaaacctaaaaccatcgctaaggcacgaggctctagcggctctactcgaaacgcctcagcctccccttcagcggtggcttccacagactcctccgcggcgacgtcaaaggctaagccaagcctggcaagccctgtctgccctggaccctccatggccccccaagccagtggtcaagaagacgattcactggcacccgggcatctcgagttcaagttcgagccggaggatttcgctttcccttccactgctccaagcccgcaggctggcctgcggggcgccctccgacaggaagcttggtgcgcactggcactggcatag

SEQ ID NO: 118209 - DNA, 1254 bp, synthetic construct
  misc_feature 1..1254: note = Description of Artificial Sequence: Synthetic coding sequence
  source 1..1254: mol_type = other DNA
acagcgacagcagtgccttgtagacccccctgccctctcgtaaagaccactcccgggagaatgtaccaaagccttgccttagccgcgtcacccagacaggcggcctacgctgactcgggctcttttctgcatgcccctggcgccgggtcccccatgtttgtccctcctgctagggtcccttctatgctttcctacctttcgggctgtgagccgtcccctcagcctccagaactggccgcgagacccgggtgggctcagactgcaaccgcggattcatctgcatttgggccggggtctccacaccctcccgctgcacaccctccaggtgcaaccgcattcccctttgcgcattctccatcaggccccggcagtggcggtagcgcaggcggtcgagacggcagcgcgtatcaaggggcgctgctcccaagggaacaattcgcagccccgttggggcgccctgtaggcacaagctacagtgctacctacccggcttacgtctccccagatgtagctcagtcctggacagcgggacctttcgacggctctgttctccacggactgcctggaagacgccccacctttgtctcagacttcctcgaagagttccccggcgagggacgggagtgcgtaaattgcggcgccttgtcgacgcctctatggagacgagatggcaccggacattacttgtgtaacgcgtgcggcttgtatcacaaaatgaatggggtcaaccgcccccttgttaggcctcagaagcgcttatcttcatcacgccgggccggactctgttgtactaactgccacaccactaacactaccttgtggcgccgcaattcggagggcgagccagtatgcaacgcttgtgggctttatatgaaattacacggcgtgcctcggccactggctatgaagaaagaaagcatccagacccgcaagcggaagccgaagaccatagccaaggcacggggcagttccggctccactcgcaacgcttcagctagtccttccgcggtggcatccactgattcttccgcagccacgagcaaggccaaacccagcctggcctcacctgtctgcccaggcccctctatggccccccaagcaagtggtcaggaagacgatagtctggcgccaggacacctggagtttaagttcgagccagaggactttgcatttccatcaactgctccaagccctcaggctggcctgcgaggagccctcaggcaggaagcgtggtgtgccttagctttggcttag

SEQ ID NO: 118210 - DNA, 1788 bp, synthetic construct
  misc_feature 1..1788: note = Description of Artificial Sequence: Synthetic coding sequence
  source 1..1788: mol_type = other DNA
atggctttgactgatggaggttggtgcctgcctaaaagatttggagctgcaggggccgatgctagtgattcacgcgcgtttccagcgagggaaccgtccactcccccatccccaatttcaagcagcagctcttcttgttcgcgtggaggtgagcgtggcccaggtggcgcatcaaactgcggcacaccacagctcgacacggaagctgctgccggcccccctgccagatccctgctcttgagttcctacgcgagccatcctttcggggctccacacggcccatctgcacccggagtcgccggccctggcggtaacctgagtagctgggaagaccttcttcttttcacagatcttgaccaggccgccactgcgtcaaagctgctatggtcgtcgcggggcgccaaattgtctccattcgctcccgaacagcccgaggaaatgtaccagacactcgctgcactttcctcccaaggacctgccgcttatgacggggcacctgggggcttcgtccactccgccgctgctgctgccgctgccgccgccgctgcgagtagccccgtgtacgtcccaactacaagggtggggagcatgttacctggcctcccctaccacctgcaggggtcgggaagcggccctgctaatcatgccggcggggctggagctcatccaggctggccacaggcctctgctgatagtccaccctacgggtcggggggaggggcagccggtggcggagctgctggcccagggggggcaggctcagctgccgcacacgtgtcagcaagattcccttacagcccttccccccccatggccaacggcgcagccagagagcccggagggtatgcagccgctggctccggtggcgctggcggggtatcaggaggtggcagcagtctcgcagccatgggcggcagagagccacagtattcctcgttaagcgctgcgcggccactcaacggaacatatcaccatcaccaccatcatcaccatcatcatccatccccctactccccatacgtgggcgctccactcacccccgcctggccagctggccccttcgagactcctgtcttgcattcactgcagagtagagctggagcaccgctgccagtcccccggggccctagtgctgacctcctggaagacttgtccgagtcacgggagtgtgtgaactgcggatcgattcagacgccgctgtggcggcgagatgggactggccactacctctgcaacgcatgcgggttgtactcaaagatgaacggcctgtcccgacccctgattaagcctcaaaaacgcgtcccctccagtagacgcctgggtctgtcttgcgcaaattgccacaccacaaccacaactctttggcggcgcaacgccgagggtgaacctgtgtgtaacgcttgcggattgtacatgaaattgcacggagtgccccggcctctggctatgaagaaggagggcatacagacacggaaacgcaagcccaagaacattaataaaagtaagacatgtagcggcaatagtaacaactcaattcctatgactcctacctctaccagcagcaacagtgatgattgctcgaagaataccagtcccactacccagccgaccgcctccggggcaggagccccagttatgactggcgccggggaatccaccaaccctgaaaacagcgagctgaagtattccggtcaggacggcctgtacatcggagtgtccttggcctctccagccgaagtaacgagtagtgtcagacccgatagctggtgtgctctggccctggcgtag

SEQ ID NO: 118211 - DNA, 8016 bp, synthetic construct
  misc_feature 1..8016: note = Description of Artificial Sequence: Synthetic coding sequence
  source 1..8016: mol_type = other DNA
atggcagccgacactcaggtgtctgagacactcaaacggttcgctggaaaagtcaccacagcctcggtgaaggagcggcgcgagatacttagcgagctgggcaaatgtgtcgcgggcaaggacttacccgagggggcagttaaagggctgtgtaagctcttttgtctcactttgcatagatacagagatgcagcatcgcggagggccctgcaggccgcaattcaacagctggcggaggcccagcccgaggcgaccgccaaaaacttactgcacagtctccagtcctccgggattggatccaaagccggggttcctagtaaatccagcggaagtgcggcactactggctctgacatggacctgcctgcttgtgcgtatagtctttcccagtagagcgaaacgccagggtgacatttggaacaaactcgtggaagttcaatgtctccttctgctcgaggttttaggaggctcccacaagcacgctgtggacggggccgttaaaaagttgaccaaactatggaaggaaaaccctggcctggtggagcagtatctgagcgccatactttcactggagcctaaccagaactacgccgggatgctggggctcttggtccagttctgcacatcccacaaggagatggacgtcgtgtctcagcacaagagcgcactcctggatttctacatgaaaaacattctaatgtctaaggtgaagccacctaagtatctgttggacagttgcgcgcccctactgcggtacctgagccactccgaattcaaagatcttatcttgcctacaatccagaaaagtctactgcgaagtcccgaaaatgtgatcgagacaattagctcactcctggcaagcgttacccttgacctcagccaatacgccatggatatcgttaaagggctggctggccacctgaaaagcaacagcccgcgacttatggatgaagccgtgctggcgctgcggaatctggcgcgccagtgcagcgattcctcagcgatggaaagtttgacaaaacatctgttcgccatactcggcggctccgaggggaagctgaccgtggtggcccagaagatgtcagttctctccggtattgggagtgttagccaccacgtggttagtggcccctcctcccaggtgttgaacgggatcgtggcggaactcttcattccctttttacagcaggaagtgcatgaagggactctcgtgcacgccgtgtctgtactcgccctgtggtgcaaccggttcactatggaagtgcccaaaaaactgaccgaatggttcaaaaaggcattctcccttaaaaccagtactagcgctgtcaggcacgcttatttgcaatgtatgctggcaagctacaggggagatactctccttcaggccctggacctgttaccactgctcatacagaccgtggagaaagccgccagccaaagtacccaggtgccaaccataaccgagggcgtcgctgctgccctcctgctgttgaagctaagcgtggcagattcacaagctgaggccaagctgtccagcttttggcagctcattgtggacgagaaaaagcaggtcttcacatccgagaagtttcttgtgatggcctcagaggacgcgttgtgtaccgtgttgcacctcaccgagagactattcctcgatcaccctcaccgcctcacaggcaacaaagttcagcaatatcaccgtgcgctagttgcagttctgttgagtagaacctggcacgtgcgccgacaggcccagcagacagtccggaagttgttgtcctccctcggggggttcaagctggcccacggcctcctagaggagcttaaaaccgtgctgagcagtcacaaggtcctacccctggaagccctagttacggatgccggtgaggttaccgaagccgggaaggcttatgtgccccctcgtgttcttcaggaggcgctgtgcgttatttcaggagtgcctgggcttaagggagatgtaacagacactgaacagctcgcccaggagatgcttatcatctctcatcatcccagtcttgtagctgtacaatccggcttatggcccgccctccttgcaaggatgaaaatcgatcccgaggcctttatcacccgccatctggaccagattattcccagaatgactacgcaaagtcccttgaatcagagctccatgaacgctatggggagcctgtctgtcctgagccctgacagggtccttccacaactcattagcacaatcactgcgagcgtgcagaatcccgccctgaggttagtgactcgggaagagttcgctatcatgcagactcctgctggagagctgtacgacaagtccatcatccagagcgcacaacaggacagcatcaagaaagctaatatgaagcgtgaaaataaagcctactccttcaaggagcagatcattgaactagagctgaaagaagagatcaaaaagaagaagggcattaaagaggaagtccagcttacatcaaaacaaaaggaaatgcttcaagcccagcttgaccgggaggcccaggtaagacggaggctccaggaactggacggggaactagaggccgctctgggcctgctcgacattatcttagctaagaatccatctggcctgacgcagtatatccccgtgttggtggacagtttcctccctctgctcaagtctcccctcgctgctcctcgcataaagaatcccttcttaagcctagcggcttgcgtgatgcctagcaggctgaaggcactcggtaccctggttagccatgtaacattaaggctccttaagccagagtgtgtgctcgataagtcttggtgtcaggaagaattaagcgtggcagtgaaacgggccgtaatgctgttgcacacgcataccattacctcccgggtcgggaagggtgagcccggagcggcgcccttgagcgctccggcattctctctggtgttccctttcctgaaaatggtgttaactgagatgccccaccattccgaggaagaagaggagtggatggcgcagatcctgcagatactgactgtgcaggcccagcttcgtgcaagtcctaacacacccccgggacgcgtcgacgaaaatggaccagagctgctgccgagggtagctatgctgcggctcctaacttgggttattggcaccggctctccacgactgcaggttctggccagcgataccctgaccactttgtgtgcctctagcagtggggacgatggttgcgcattcgccgaacaggaggaagtggatgtcttactgtgtgctctgcagagcccatgtgcctctgttagggaaactgtgttgcgcgggctgatggagctgcatatggttcttcccgcacccgatactgatgaaaagaacgggctgaacctgcttcggagactgtgggtggttaaattcgataaggaggaagagatcaggaaacttgcagaacggctatggagcatgatgggcctggatctgcaaccagatctgtgctccttgttgattgacgacgtgatctaccatgaggccgccgtgaggcaggccggagcagaggccctgagccaggccgtcgcgcgataccaaaggcaggctgctgaggttatgggccgactaatggagatataccaggagaagctatataggcctcctccggtgctcgatgcactcggacgcgtgatttcagagagccctccagaccaatgggaggctagatgcggcctagcactcgccctaaacaaactcagccagtatctcgactcttctcaggtcaagccacttttccagttttttgtgcctgacgcgttgaatgataggcaccccgacgtcaggaaatgtatgctggacgcagctctggcaacgttgaatacacatggaaaggagaatgtgaatagtctcctgcctgtattcgaggagtttttgaaaaacgctccaaatgacgcatcttatgatgctgttcggcaaagtgttgtggtgctcatgggatcactggcaaaacacttagacaaaagtgacccgaaagtaaagcccatcgtggccaaattaatcgccgcactgtcaaccccgtcgcagcaggtgcaggagtcggttgcctcatgtctgccacctttggtgccggctataaaggaggacgctggaggcatgatccaaagattgatgcagcagttgctggagtctgacaagtacgcagagcgcaagggtgcggcttatggactggccggcctggtcaaagggctcggtattctgtcactcaagcagcaggagatgatggcagctctgacagacgcaatccaggacaaaaaaaactttaggagacgtgaaggggctctttttgcattcgagatgctctgcaccatgctcggcaaactatttgaaccatatgtggtccacgtgttgcctcatctgctcttatgttttggggacggtaaccagtatgtgagggaagccgccgatgattgcgcaaaagcagttatgtctaacctgagcgctcacggcgttaaattggtcttgccaagtctgttagccgcgcttgaagaagaatcatggaggacaaaagccgggtcagtggaactactgggcgcgatggcctactgtgctcctaagcaactgagctcttgcttaccaaatatcgtcccaaaactgaccgaggtgcttacagactcccatgtgaaagtgcaaaaggccgggcagcaggccctccgtcagatcggaagtgtgattcgcaacccggaaattttagccattgcccccgtgttactagacgcactgacggatccttctcggaagacgcagaaatgtctgcaaactttgctggatacaaagttcgtgcatttcatcgatgctcccagcctggcactgatcatgcctatcgttcagagggcttttcaggatcggtcaaccgatacgagaaagatggcggcacagattatcggaaatatgtattccctaaccgaccagaaggatttggccccctatctgccaagcgttaccccggggcttaaggctagcctgctggaccctgttcccgaagtgcggactgtcagcgccaaagcactcggtgctatggttaaaggcatgggagaaagctgcttcgaggatctcctcccttggctgatggagactcttacctatgagcagagttcagtggaccgcagtggcgccgcccaggggctggcagaggtcatggcggggcttggggtcgagaaacttgagaagcttatgcccgagatcgtggctactgccagcaaggtggacatcgctccacacgttagagacgggtacattatgatgtttaactatctccctatcaccttcggtgacaagttcaccccatacgtgggacctataatcccctgcatcctcaaggcgttggcagacgaaaacgagtttgttagagacaccgcactgcgggctgggcaaagagtaatcagcatgtacgccgagacagcaatcgccctgctgctcccacagttggagcagggactttttgacgatctgtggcggatcagattttcgtccgtccagctgctgggagaccttttgttccacatctccggtgtgaccggaaagatgaccactgagacggctagtgaagatgacaactttggcaccgcccagagcaacaaagctatcataacagccttaggtgtagagcggcgcaacagggtgcttgctggcctatatatgggccgaagtgatacacagctcgtggtgagacaggccagcttacatgtatggaaaatagttgtgagtaacaccccacgtacactcagagagatcctccctaccctgtttggcctcctgcttggcttccttgcctctacctgtgcggataagaggactatagccgctaggaccctgggcgatctggtcaggaagttgggggaaaagatactgcctgaaatcatcccgattctggaagagggtctgcgctctcaaaagtccgatgagcggcagggagtatgcatcggtcttagcgagatcatgaagtccacctcccgggatgccgtgctgtacttcagcgaatctctcgtgcctactgccagaaaggccctctgtgaccctctggaggaggtgagagaggccgccgctaaaacatttgaacagcttcatagcacaattggccaccaagcccttgaggatattctgccgttcctcttgaaacagcttgatgatgaggaggtttccgaatttgctctcgacggtttgaaacaagtgatggctatcaaaagccgagtggtcctgccctacctggttccaaaactgactaccccacctgtgaataccagagtcctggccttcctgagtagtgttgctggcgacgcacttacccgccatctgggcgtcatcctgcctgcagtcatgctggctctgaaggagaaactgggcacccccgatgagcagctcgaaatggctaactgccaggcagtgatcctcagcgtggaagatgacaccggccaccgtattatcatagagtatctgctcgaggccacacgctctcccgaagtgggcatgcgccaggccgccgccattatcctgaatatctattgtagcaggtccaaggccgattatacatcacacttgagatctctggtgtcaggactgattcgcctatttaatgacagctcccccgttgttctggaagagtcttgggacgctcttaacgccataactaagaaactcgacgctgggaaccaactcgccctgattgaggaactgcataaagagatcaggctgattggtaacgagtccaagggcgaacacgtgcctgggttctgcttaccaaaaaagggagtgacttcaatcctgcccgtgctgcgcgagggagtccttactggttctcccgaacagaaagaagaggccgcgaaggccttgggccttgtcatcagacttaccagcgccgacgcactcagaccctccgtagtatccattaccgggccgctgattcgtatcctgggagacaggttttcctggaacgtaaaggctgccttactggagaccctgtcattactgcttgccaaagttgggattgccctcaagcccttcctgcctcaactgcagacgacctttactaaggccttgcaggactcaaaccgtggcgtacgcctgaaggccgcggatgcactcgggaaacttattagcattcacattaaggtagatcctctgttcactgaactactgaacggtatacgggccatggaggaccctggagtgcgggacaccatgttgcaggccctgcgatttgtgatccagggcgctggcgccaaagtggatgcagttataagaaagaatatagtcagtcttctcttgtcaatgctggggcacgacgaagacaacactagaattagcagtgcgggctgtctcggcgaactttgcgctttcctgacggaagaggaactcagcgcagtcctccaacagtgcctgcttgccgacgtttctggtatagactggatggtacgccacgggagaagccttgccctcagcgtggctgtcaacgttgctccaggacggctctgcgcaggccggtactcttccgatgtgcaggagatgatactgtctagcgccacagctgataggattccaatcgcggtttctggggtgcgcgggatgggctttctgatgcgtcatcatatcgagactggtggagggcagctgccagcaaaattgtcaagcttgtttgttaaatgtctgcagaatcccagcagtgatatcaggttggttgccgaaaagatgatttggtgggcaaataaggatccactgccccctctggatcctcaggcaattaagcccatcctaaaggcactgttggacaacaccaaggataagaataccgtggtcagagcttactccgaccaagctatagtgaatctcctcaaaatgcggcagggtgaagaagtgttccaatctttaagcaagattctagatgtggcctctcttgaggtacttaacgaggtgaataggcgaagcctgaaaaagttggcctcacaggctgactctaccgagcaagtggatgacacgatcctgacgtag

SEQ ID NO: 118212 - DNA, 1443 bp, synthetic construct
  misc_feature 1..1443: note = Description of Artificial Sequence: Synthetic coding sequence
  source 1..1443: mol_type = other DNA
atggcacaacacgatttcgcccctgcgtggctgaacttccccaccccaccgtcaagtaccaaagtcttaacgtccagtctcaagtcttccctcaattttgaaaaacattctgagaatttcgcctggacagagaacagatacgacgtaaacaggcgacgtcataacagttccgacgggtttgacagcgccataggtcgacctaacggcggtaattttggcaggaaagagaagaatgggtggagaactcatggacgaaacggtactgagaacattaaccaccgaggcggataccacggcggctcgtctcggtcgcggtcctctatctttcatgctggtaaaagccaggggctgcacgagaacaacatcccagataatgaaaccggacgaaaagaagataagcgagagcgcaagcagtttgaagcagaggatttcccctcgctcaatcctgagtacgagcgagaacccaaccataacaagagtctagctgcaggagtctgggagtaccccccaaaccctaaatctcgcgcccccagaatgctcgtgatcaagaaggggaacaccaaagacttgcaactgtctggattcccggtggtggggaatctaccctcacaacccgtcaagaacggcaccggcccaagcgtctacaaaggtctggttcccaagcctgctgcaccaccaaccaagcctactcagtggaagtcgcagacgaaggaaaataaggtcggcacaagcttccctcatgagtccacgttcggagtgggcaactttaacgcctttaagtccactgcaaaaaacttttccccctccactaactcagtgaaagagtgtaataggagtaattcaagttctccagttgataagcttaaccagcagcctaggctcactaagctgactcgcatgaggaccgacaagaagagcgagttcctgaaagcattgaaaagagacagagtggaagaggagcatgaggatgaatctcgagccggcagtgagaaggatgacgactccttcaatctgcacaattccaattctactcaccaggagcgagatataaacagaaacttcgacgagaatgagattccccaagaaaatggtaatgcttccgtgatctcccagcagatcatccgatcctcaactttcccgcagaccgacgtgctgtcttccagcctcgaggctgaacacagactgttaaaggaaatgggatggcaggaggatagtgagaacgatgaaacctgtgcacctctcacggaagatgaaatgcgcgagtttcaggtaatttcagaacagctgcaaaaaaatggcctgagaaagaacgggattctcaaaaatgggctgatctgtgactttaagtttgggccttggaaaaattcaaccttcaagcctaccacggagaacgacgacactgagacctcttcatctgatacatccgatgatgacgatgtgtag

SEQ ID NO: 118213 - DNA, 1482 bp, synthetic construct
  misc_feature 1..1482: note = Description of Artificial Sequence: Synthetic coding sequence
  source 1..1482: mol_type = other DNA
atggcccagcatgactttgctcctgcatggctgaactttcccacccctccctcttctactaagtcttcactgaactttgagaaacacagcgaaaactttgcgtggactgaaaatcgctacgacgttaaccggcgcagacacaattcgagtgatgggtttgactccgctataggcagacctaacgggggcaacttcggtagaaaggaaaaaaatggctggaggacccacggtcgcaatggcaccgagaacattaaccataggggtggctaccacgggggctcttctcggtcgcggtcatccatcttccatgcggggaaatcccagggcctgcatgaaaacaacatccccgacaacgagacgggccgtaaggaagacaagagggagcgtaagcaatttgaggctgaagattttccgagcctgaatcccgagtacgaacgggagccgaaccataacaagagtctggccgccggggtgtggggactccatgcccagactcatacatacccaaccaagaagatctctcaagcccctttgctggagtatccacccaatccaaagagcagggcgcctcgcatgctggtaatcaaaaaggggaacactaaggacttgcagctgtctggcttcccggtcgtcggtaatctcccgagccagcctgtgaagaatggaaccggaccctcagtttacaagggacttgtacccaaaccagcagcacccccaacgaagcctacacagtggaaaagtcaaaccaaggagaacaaggtcgggactagtttcccacatgagtccacctttggtgtggggaacttcaatgcctttaagtcaaccgccaaaaatttcagcccatcgacaaactccgtcaaagaatgtaatcgatccaacagcagctctcctgtggacaagctaaaccagcaaccgcggctcaccaagctgactagaatgcggaccgacaaaaaaagcgaattcctgaaggcactgaaaagagaccgggtcgaggaagagcacgaagacgaaagtagagcaggctccgaaaaggacgatgactcttttaatctccacaacagcaacagtactcaccaagaacgcgacataaatagaaatttcgacgaaaacgagataccgcaagagaacggtaatgcgtccgtgatttcacagcagatcatccgcagcagcacattcccccagactgatgtgctgtctagctcactcgaagcggaacatcgacttctgaaagaaatgggatggcaagaagattctgagaatgacgagacctgcgccccactgactgaagacgagatgcgcgaattccaggtcatctccgaacaactccagaagaatggtctaaggaagaacggaatcctcaaaaacgggcttatttgcgacttcaaattcgggccttggaagaattcgacgttcaaacccaccacagagaacgatgacactgaaacctccagcagtgatacctccgacgacgatgacgtctag

SEQ ID NO: 118214 - DNA, 1482 bp, synthetic construct
  misc_feature 1..1482: note = Description of Artificial Sequence: Synthetic coding sequence
  source 1..1482: mol_type = other DNA
atggcacagcatgacttcgcccccgcctggctcaattttcccacccccccctcaagcaccaagtcgtcattaaacttcgaaaaacattctgagaatttcgcctggacggaaaatcgctacgatgtgaaccggcgtcggcacaattcttcagacgggtttgatagcgctatcggacgcccaaacggagggaattttggccgaaaggaaaaaaacgggtggaggactcatgggcgcaacggcactgagaacataaaccacagaggcgggtaccacggtggctctagccggtcacggagtagtatattccacgcaggcaaatcccaaggtttacacgagaataacatcccggataatgaaacaggccggaaggaggacaaacgtgaacggaagcagttcgaagctgaggactttccgtctctgaatcccgaatatgagcgcgagcctaatcacaataagtccctggccgccggggtgtggggtcttcacgcccagacccacacataccccacaaagaagatttctcaggccccactcttagaatacccgcctaaccctaagtcaagagcccccagaatgctggtcatcaagaaaggtaacacgaaggacctccaactcagtggttttccggtggttggtaacctcccgagtcagccggtgaagaacggcacagggcctagtgtctataaaggacttgtgcctaagcctgccgccccccccaccaagcctactcagtggaagagtcagaccaaagaaaacaaggtcgggacctcttttccccatgagagtacctttggcgtggggaactttaatgcattcaagtcaacagccaaaaatttctcccctagtaccaacagtgtgaaggagtgtaatcgcagcaacagctccagccctgtggacaagctcaaccagcaacctcggttaactaaattaacgcgcatgagaacagacaaaaagtccgagtttttgaaagcgttgaagagggacagggtggaggaagagcacgaggacgagagccgtgcgggttcagagaaggacgacgattctttcaatctgcacaactccaactccactcaccaagagcgggatattaacaggaattttgatgaaaatgagatccctcaggagaacggcaacgcttctgtgattagccagcaaattatccggtctagcacttttccccaaacagatgttcttagctcttccctggaggccgagcatcgattgctgaaagaaatgggttggcaagaagatagcgaaaacgatgagacatgtgctccactgactgaggacgagatgcgggagtttcaagttataagtgagcaacttcagaagaacgggctgcgcaagaacggcattttaaagaacgggctgatttgcgactttaaatttgggccatggaaaaatagtacatttaaacccactactgagaatgacgatacagaaacctcctcatccgacacaagcgacgacgacgatgtttag

SEQ ID NO: 118215 - DNA, 1422 bp, synthetic construct
  misc_feature 1..1422: note = Description of Artificial Sequence: Synthetic coding sequence
  source 1..1422: mol_type = other DNA
atggcacagcacgactttgcgcctgcctggctgaattttccaactcccccttctagcacaaaatcatcactgaatttcgaaaaacacagtgaaaactttgcctggactgaaaacaggtacgacgtgaacaggaggaggcataatagttccgatgggttcgattcagccatcggcagaccaaatgggggcaacttcggccgtaaagagaaaaatggatggaggacacacggtcgcaatggcaccgaaaatatcaaccacagaggaggttaccacggaggaagttcaaggtctcgtagctccattttccacgccgggaagtcccagggcctccatgagaacaacattcctgataacgagacaggtcgaaaggaggataagagggagaggaagcagtttgaggctgaggacttcccaagcctgaatcccgaatacgagcgtgagcctaaccacaataagagcctggcagctggagtgtgggagtaccctcccaatcctaaatcacgggcaccgcgcatgctggtgatcaagaaaggcaataccaaggacctgcagcttagcggatttccagtggtgggcaatctgcccagccagcctgtcaagaatggcactggtccctccgtgtataagggactggttccaaagcccgcagcaccccctactaagcctacacagtggaagtctcagacaaaggaaaataaggtgggtacttccttcccacacgaatcaacctttggggttggcaatttcaatgctttcaaatccacagccaaaaactttagtcctagcactaactcagttaaagagtgtaataggtctaactcttcatctcctgtggataaactgaatcaacaacccagactgacaaagctgacacgaatgcgtaccgacaaaaaaagcgaatttttgaaagctctaaagcgggatcgagttgaggaggaacacgaggacgaatctcgtgcaggctctgagaaggacgatgactcttttaacttgcataatagtaactcaacccaccaggagagggacatcaataggaactttgatgaaaacgagataccccaggagaatggcaatgcgtcggtgatctcccaacagattattcgttcctccaccttcccgcagaccgatgtcctctcctcaagtctcgaggccgaacatcggctgctaaaagaaatgggctggcaggaagacagcgaaaacgacgaaacgtgtgcccctctgacagaggatgagatgagggaatttcaggtcattagcgaacagctacagaaaaacgggctaagaaagaatggcatcttaaagaacggtctgatctgcgattttaaattcggaccttggaagaacagcacgttcaaacccactacagaaaacgacgatactgagacgagttcctccgatacttctgacgatgatgacgtctag

SEQ ID NO: 118216 - DNA, 1398 bp, synthetic construct
  misc_feature 1..1398: note = Description of Artificial Sequence: Synthetic coding sequence
  source 1..1398: mol_type = other DNA
atggcacagcatgatttcgccccggcatggctcaactttcctacccccccttcttcaacaaaagtgctcacctccagtctgaagtcgtccctaaacttcgaaaagcatagcgaaaacttcgcctggacagagaataggtatgatgtgaatagacgcagacacaatagttctgatgggttcgattcagctatcggacgtcctaatggaggaaattttggccgtaaggagaaaaatgggtggagaacacatggccggaatggcacggagaatatcaaccatcgggggggttaccatggaggatctagcaggtctagatcaagcatcttccatgccggcaagtcccagggcctgcacgagaataatataccagacaatgagactggacgcaaagaagacaagagggagaggaagcaattcgaggccgaagatttcccgtctctgaatcctgaatatgagagggaaccaaatcacaataagtcgctggctgctggtgtttgggagtacccaccaaaccccaagagccgcgccccccgaatgctagtcattaaaaaggggaacacaaaggatctgcagctgtccggtttcccagtcgttggaaatcttccatcccagcctgtgaaaaacgggaccggcccaagcgtttataagggccttgtgccaaagcctgccgctccacctacaaaacccactcagtggaaaagccagactaaagagaataaggttggaacaagctttccacacgagtcgacttttggcgtgggcaacttcaacgcttttaagtcgacggccaagaattttagtccatccacaaattctgtgaaagagcagccacggctgactaaacttactcgcatgcgaacggacaaaaagtctgaattcctgaaggccctcaagcgcgaccgagttgaggaggagcacgaggacgagagccgtgccggtagcgagaaagatgatgactctttcaatctgcacaattcaaactcaacgcaccaggagagggacataaaccggaattttgacgagaatgagatacctcaagaaaacggtaatgcaagtgttatttcgcagcagatcattcggtcctctaccttcccccagaccgatgtgctatctagcagcttagaagcggagcatcgtctcctgaaagagatggggtggcaagaagacagcgagaatgacgagacctgtgcaccactcacagaagatgagatgcgcgagtttcaggtcatctccgaacagctgcagaaaaatgggctcagaaagaacgggattctgaaaaatggcctgatctgcgattttaagttcggcccctggaaaaactccacattcaagcctactaccgaaaacgatgacaccgagactagctcaagtgatacctcagacgatgacgatgtctag

SEQ ID NO: 118217 - DNA, 909 bp, synthetic construct
  misc_feature 1..909: note = Description of Artificial Sequence: Synthetic coding sequence
  source 1..909: mol_type = other DNA
atgttggttatcaaaaaggggaatacgaaagaccttcagctaagtgggttccccgtggtgggcaatctgccctcacagccagtcaagaatggaactggtccaagcgtctacaagggcctcgttcccaaacccgctgcccctccgaccaagcctacacagtggaaaagccagaccaaggagaataaagtgggcacgagcttcccccacgaatccacctttggggttggcaactttaacgcctttaaaagcaccgctaagaacttctccccttctacgaattccgtgaaggagtgtaaccgaagcaatagttctagccccgtcgacaagctcaaccagcaaccaagactcacaaaactgactaggatgcggaccgataagaaaagcgaattcctgaaagccctgaaaagggatagagttgaggaagaacacgaggatgagtcaagagccggcagcgagaaggatgatgactccttcaatttgcataactccaattccactcaccaggagcgtgacatcaaccgcaattttgatgaaaacgagattccgcaagagaacggaaatgccagcgtgatttctcaacaaatcatccgctcctctacgttccctcagactgacgttctttccagcagcctggaggccgagcataggttgctgaaggaaatggggtggcaggaagactctgagaatgacgaaacttgcgcccccctcacagaggatgagatgcgcgaatttcaggtgattagcgagcagctgcagaagaacgggctccgaaagaacgggatattaaaaaatggacttatatgtgacttcaagtttggtccctggaagaactccacgtttaagcctaccacagagaatgatgatactgaaacctccagttccgacacgagcgatgacgatgatgtgtag

SEQ ID NO: 118218 - DNA, 1443 bp, synthetic construct
  misc_feature 1..1443: note = Description of Artificial Sequence: Synthetic coding sequence
  source 1..1443: mol_type = other DNA
atggctcagcacgacttcgctccagcgtggctcaactttcctactccccctagctcaaccaaagttctgagtaacaccttgaagtcttctctgaactttgaaaaacattcagagaactttgcttggaccgaaaaccgatacgacgttaatcgcagaagacacaactcatctgacggcttcgacagcgccattgggcgcccaaatggcggaaattttggccggaaagaaaaaaatggatggcggacacacggccggaatggaaccgaaaacatcaaccacagggggggataccacggaggctcctcgcgctctcgatcaagtatttttcatgccggcaaaagccaggggttacacgagaacaatatcccagataatgagaccgggcgcaaagaagataaacgtgaacggaagcaatttgaggccgaggatttccccagcctgaaccccgaatatgaacgcgagccaaatcacaataagagcctggccgccggcgtgtgggagtatcccccaaaccctaaatcccgcgcgcccagaatgctcgtcatcaaaaaagggaataccaaggaccttcagctgtcagggtttcccgtggtcggaaatttgccgagccagccggtaaagaatgggaccggtccgagcgtgtataaggggctagttccaaagcccgccgcgccccctacaaagcccacccagtggaagtcccagaccaaggagaataaggtgggcacatctttccctcatgaatccacatttggcgtaggcaacttcaacgcctttaagtctaccgccaaaaacttcagtccatcaactaactcagtcaaagaatgcaacaggtcaaatagttcgagtccggtggataaacttaaccagcagcctcggttgaccaagctgacgcggatgcgaacagacaagaaaagcgagttcttaaaagccctcaagagggatcgagtagaagaggagcacgaggatgagtcaagggccggctctgaaaaggatgatgactcttttaatcttcacaattccaatagcacacaccaagagagagacattaaccgcaacttcgatgagaatgagattccccaggagaacgggaatgcctccgtgatttctcaacagattatccgctcaagcacatttccccaaactgatgtactgagttcctctctcgaagcagagcatagactgctgaaggaaatgggctggcaagaagacagtgaaaacgacgagacatgtgcccccctgaccgaggatgagatgcgggaattccaggtgatatccgagcagctgcagaagaatggcctccggaagaatgggattctgaagaatggcttgatctgcgattttaaattcggtccatggaaaaacagtacgtttaagccaaccaccgagaatgacgataccgaaacctcctcatctgacaccagtgacgacgatgatgtctag

SEQ ID NO: 118219 - DNA, 1383 bp, synthetic construct
  misc_feature 1..1383: note = Description of Artificial Sequence: Synthetic coding sequence
  source 1..1383: mol_type = other DNA
atgtttctcgcgaccttgtatttcgctctgcctctgctcgacttgcttctgtccgccgaggtgtctgggggcgaccggctcgactgcgtgaaagcaagtgaccagtgcctgaaggagcagagctgctccactaaatatcggacactgagacagtgtgtggccggaaaagagaccaatttctctcttgccagtggccttgaagctaaggacgagtgtcggtccgcaatggaggcgctgaaacagaagtcactgtacaattgcagatgcaaacggggcatgaagaaagagaagaactgcctgcgaatctactggagcatgtatcagagtttacagggtaatgaccttctggaggacagtccatacgagcctgtaaattctagattgtccgatattttccgggtggtgccctttatctcggtggaacatatacctaaaggcaacaattgcctggacgctgctaaagcgtgcaatttggatgacatatgcaaaaagtacagaagtgcatacatcacgccgtgcacgacctccgtttctaacgatgtgtgtaatcggagaaaatgccataaagccctgcgccaattttttgataaggtgccagccaagcactcatacggaatgttgttctgctcttgcagggacatcgcctgcactgagagaaggaggcaaacaatcgtccccgtgtgtagttacgaggaacgggaaaaacccaattgtcttaatctgcaggacagttgcaaaaccaactatatctgccgctcccgccttgccgatttttttactaattgccagccggaaagtcggagtgtgtcctcatgcctgaaggaaaattacgcagactgtctgctggcctactccggattaatcggcacagtgatgacgccaaattatatcgattcttcatcattgtccgtcgccccatggtgtgactgctctaactcaggtaacgatttagaggagtgccttaagtttttaaacttcttcaaggacaatacttgccttaaaaatgccatccaggcattcggtaacggatcagacgtgacggtctggcagcccgcttttccagtgcaaacaaccactgctacgacgaccaccgcactgcgggtaaagaacaaaccattgggccccgctggcagcgagaatgagatccctacccatgtgctgcccccctgtgccaatctgcaggcacagaagctgaagtccaatgtctccggcaatacccatttatgcatcagtaacggcaattacgaaaaggagggcctcggcgccagcagccacatcactacaaaatccatggctgcccctcccagctgcgggttgtcccctcttctggttctggtggtcaccgcactttcaactctcttatcgctgaccgaaacttcatag

SEQ ID NO: 118220 - DNA, 1383 bp, synthetic construct
  misc_feature 1..1383: note = Description of Artificial Sequence: Synthetic coding sequence
  source 1..1383: mol_type = other DNA
atgtttctggccacactttacttcgctctcccgctgctagatctgctgttgtcagcggaagtgtccggcggcgacagattggattgcgtaaaggcatctgaccagtgcctgaaagagcaatcttgcagtacgaagtacagaacactgcgccagtgcgtggctgggaaggagaccaacttctcactcgccagtgggctagaggccaaggatgaatgtaggagcgccatggaggctttgaagcagaagagcctttacaattgtagatgcaaacgcggcatgaaaaaagagaagaactgtttgcgcatctactggagcatgtatcagtcactccagggtaacgacctgctcgaggactctccatatgaaccggtcaactcaaggctgtcagacattttccgtgtggtacccttcatttccgtggagcatattccaaagggcaacaactgcctggacgctgccaaggcatgcaacttggatgacatctgcaaaaaatatcgttcggcatacattacaccctgcaccacgtctgtgagcaacgatgtatgcaataggagaaaatgccataaggcacttcgccagtttttcgacaaagtgcctgctaagcattcctacggaatgttattctgcagctgccgggacattgcctgtaccgaacgaagacggcagaccattgtcccagtgtgcagctacgaagaacgggagaaaccgaactgccttaacctacaggactcatgcaagactaattatatctgtcggtcacggctagctgatttcttcacaaactgccaacctgagtccaggagcgtgtcctcgtgccttaaagagaactatgccgattgccttcttgcttatagcggcctcataggtaccgtgatgactccgaactatatagactcctcttccctgagtgtcgccccatggtgcgattgctctaacagcggcaatgacctggaagaatgcctcaaattcctgaacttcttcaaggataacacatgtttgaagaatgcgatccaggcatttggcaacgggtccgatgttacagtttggcaacctgcttttccagtgcagaccaccaccgctaccaccacaaccgcgctgagagtgaaaaacaaacccctcggacccgcaggctctgaaaatgaaatccccacgcacgttctccccccgtgtgctaatctccaagcacagaagctcaagtcgaatgtgagcggaaacacccacctgtgcatttccaatggcaattacgaaaaagaaggcttaggggcatcctcgcacattaccacaaagtccatggccgccccaccaagttgtggtctcagccccctgcttgtcctggtggttacagccctgagcacattattgtcgctcaccgaaactagctag

SEQ ID NO: 118221 - DNA, 1383 bp, synthetic construct
  misc_feature 1..1383: note = Description of Artificial Sequence: Synthetic coding sequence
  source 1..1383: mol_type = other DNA
atgtttttagcaaccctgtacttcgccctgcctcttctggatcttctcctttccgctgaagtgtctggaggagatagactggattgcgtgaaggcctccgaccagtgtctcaaggagcagagttgctccacaaaatacagaaccctgaggcagtgtgtcgccgggaaggagaccaacttttctttggcctcaggcctggaggctaaggacgagtgccgcagcgcaatggaggcgttaaagcagaaaagtctgtataattgccgctgcaagcgcggcatgaaaaaagagaaaaattgtttgaggatttactggtccatgtaccagagtctgcagggcaatgatctgttggaggactctccttatgaacccgtcaacagtaggttgagtgacatattccgggtggtgccattcatcagcgtagagcacattcccaagggtaacaattgtctggatgctgccaaagcttgcaacctagacgacatctgcaagaaataccgatctgcatatatcacaccatgtactactagcgtctccaacgacgtatgcaatagaagaaaatgccacaaagctctgagacagttctttgataaggtacctgcaaagcattcatatggcatgctgttttgtagctgccgcgacatcgcttgtacagaaaggaggcgccagacgattgttccggtgtgctcatacgaagagagagaaaaacccaattgcctgaacctccaggactcctgtaaaacaaactatatctgtcgctccaggctggctgattttttcaccaactgtcagcccgagagccgtagtgtgtccagctgcctgaaggagaactatgctgactgcctcctcgcctacagcggactcatcggtactgtgatgacccctaattacattgacagtagcagtctgtccgtggctccctggtgtgattgctctaactctggcaacgatcttgaggaatgcctgaaattcctgaactttttcaaggacaacacatgcctcaagaacgcaatacaggctttcgggaatggctccgatgtcaccgtctggcagccagcttttccagtccagactacaaccgctaccacgaccactgctcttcgtgtcaaaaacaaacctcttggcccagcaggatccgagaacgagatccccacacatgtgctgcccccttgcgccaacctgcaggcacagaaactgaaatccaatgtgagcgggaatacccacctctgcatatctaacggaaattatgaaaaagaaggcttaggggccagtagccacattactaccaagagtatggcagctccgccatcctgtggcttgtcccccctgttggtcctcgtcgtcaccgcactgagtaccctgctcagtctcaccgagacctcctag

SEQ ID NO: 118222 - DNA, 1398 bp, synthetic construct
  misc_feature 1..1398: note = Description of Artificial Sequence: Synthetic coding sequence
  source 1..1398: mol_type = other DNA
atgtttctggcaacactgtactttgccctacctctcttggacctgctcctctccgctgaagtgagtggcggagataggctcgactgtgtaaaggcctccgatcaatgcttaaaggagcagagttgttcgactaagtatcggaccctgagacaatgcgtggccggcaaggaaacaaacttttccctggcctctggactggaagctaaggacgaatgtaggtctgccatggaagcactcaagcagaaatctctctacaactgcaggtgcaagcgtggcatgaagaaggaaaagaattgcttacgcatctattggagcatgtaccagagtctgcagggcaacgacctacttgaggatagtccctacgagcccgtgaacagcagactctccgacatctttcgagtggtgccatttatttcggacgtcttccagcaggtggaacatattccaaagggaaacaattgtcttgatgccgcgaaagcatgcaacttggacgacatatgtaaaaagtatagatcagcttatattacaccatgtaccactagcgtgtctaatgacgtgtgcaaccgccgtaaatgtcataaagccctgcggcagtttttcgacaaagttcctgcaaagcactcttatgggatgctgttttgtagttgtcgggatatagcatgcaccgagcgtcggagacagaccatcgtgcccgtgtgctcatatgaagagagggagaagcccaattgcctgaacttgcaggattcctgcaaaaccaactatatatgtcgtagtagactcgctgattttttcacaaactgtcagccagaatcgcggagtgtcagctcgtgtttgaaggagaactacgccgactgcttactggcttattccggattgatcggaacggtcatgacacctaactatatcgactccagctctctgagcgtcgcaccgtggtgtgactgcagcaactcaggaaacgatctggaggaatgtctgaagtttctgaattttttcaaggataacacctgcctcaagaatgctatccaggccttcgggaatggcagcgacgtgacagtttggcagcccgcatttcctgtgcagactaccacggccacaaccactaccgctctgcgcgtaaagaataagcccctggggccggcgggtagcgaaaacgagatcccgacccacgtgttgccaccgtgtgcaaatctgcaggctcagaaactgaagagtaacgtctcaggtaatacacatctctgcatcagtaacggaaactatgaaaaggagggactgggtgcttcctcacacattactacaaaatcaatggcagcccctcctagttgcgggctgtcccctttgctcgtcctggtggtcaccgcacttagtactctgcttagcttgaccgaaacatcatag

SEQ ID NO: 118223 - DNA, 1035 bp, synthetic construct
  misc_feature 1..1035: note = Description of Artificial Sequence: Synthetic coding sequence
  source 1..1035: mol_type = other DNA
atgcaagagggtaaattctggaagggcatggccgagacaggcatgtggggatgtggcgaatggattcccgtggagcatatccccaagggcaataattgtctagatgccgccaaggcctgcaacctggatgacatctgcaagaaatataggagcgcttacattaccccttgcaccactagcgtgtctaacgacgtttgcaaccgaaggaaatgccataaggcgctacggcagtttttcgataaggttccggcaaagcatagctatggaatgctgttttgcagttgtcgggacattgcctgcactgaacgccggagacagacaatagttcctgtgtgtagctatgaagagagagaaaagccaaactgcctgaacctgcaggacagttgcaagacgaattatatttgcaggagcaggctagctgatttcttcacaaactgtcaacccgagagcaggtcagtctcctcatgtcttaaggaaaactatgcagattgtctgctcgcatattcgggccttattggcaccgtgatgacaccgaactacatcgacagcagcagcttgagcgttgcaccgtggtgcgactgcagcaattccgggaatgatctagaggagtgtctgaagttcctcaacttttttaaagacaacacatgtctgaagaacgctatccaggctttcggaaacggcagtgatgtcactgtgtggcagccagctttccctgtgcagacaacaacagctacgaccaccactgccctgagagtgaaaaataagccgctggggcccgcgggcagcgagaatgaaatcccaacacatgtgttgcctccatgcgccaatttacaggcacaaaaactgaagagcaacgtgtctggcaatacacacctgtgtatttcaaatggaaattacgaaaaggaaggccttggggccagcagccatataactacaaagtccatggcggcacccccatcttgtgggctgtcaccccttctcgtcctggtggttactgctctctccactctgctgagcctgactgagactagttag

SEQ ID NO: 118224 - DNA, 1080 bp, synthetic construct
  misc_feature 1..1080: note = Description of Artificial Sequence: Synthetic coding sequence
  source 1..1080: mol_type = other DNA
atgatcttggctaacgtattctgtttgtttttttttcttggagaggagttctatgaagcttccccttatgaacctgtcacttcacgactctctgatatcttccgcctagccagtatctttagtggtacaggagctgatcctgtggtctcggccaagagcaaccattgtttggacgccgctaaggcgtgtaacttaaatgataactgtaaaaaactgaggtctagctacatctcaatctgcaacagagagattagtcctaccgaaagatgcaatcgcagaaagtgtcacaaagcattgagacagttttttgacagagttccgtcagaatacacctacaggatgctattctgctcttgccaagatcaggcgtgcgctgaaaggcgcagacagactatcctcccttcgtgctcatacgaggataaagaaaaacccaattgcctcgatctgcgcggggtgtgcagaacagaccatctttgtcgttctcgactggccgattttcacgccaactgccgggcttcataccagacagtgacgagttgtcctgccgacaactaccaggcctgcctcggcagctacgcgggtatgattggtttcgatatgacccctaactatgtggatagttcacctaccgggattgttgtgtcaccgtggtgctcatgcagaggtagcgggaacatggaagaggagtgtgagaaattcctgcgcgactttaccgaaaacccttgtctccggaacgccattcaggcctttggtaacggaaccgacgtgaacgtttctcctaagggaccctcctttcaggcaacacaggcaccccgcgttgagaaaactccctctctacccgatgatctttccgactctacatccttgggcacaagcgttataactacctgcacgagcgtccaggagcaggggcttaaagcaaacaattctaaagaactgtctatgtgctttacagaactgaccacgaacataatcccaggatccaacaaggttattaagcccaatagtggacccagccgggctcggccaagtgctgccctcactgtgcttagcgtgttgatgttgaaactcgcgctgtag

SEQ ID NO: 118225 - DNA, 1395 bp, synthetic construct
  misc_feature 1..1395: note = Description of Artificial Sequence: Synthetic coding sequence
  source 1..1395: mol_type = other DNA
atgattctcgcgaacgtgttctgcctgttctttttcttggatgagacccttcgctccctggcatccccgtcttctcttcagggccctgagctccacggatggcgcccaccggtggattgtgtacgcgctaatgagctctgtgctgcagaatccaactgttcatcgcgatatcggactttgcggcagtgcttggcgggaagggacagaaataccatgctcgccaataaggagtgccaggccgccttggaggtactccaggagtcaccactttacgactgtcgctgtaaacgggggatgaaaaaagagcttcaatgcctgcaaatttactggagcattcacctgggtcttacagaaggggaggaattttacgaggcttctccatatgaacctgtaaccagccggttaagcgacatcttccgtctagcctccatcttcagcgggacgggggcagacccagtcgtgtcagcaaagtctaaccattgtttagacgccgccaaagcctgcaatttaaacgataattgtaagaagctgagaagcagctacattagcatttgtaaccgcgagatatctcctacagagagatgcaatcggcgcaaatgtcacaaggcactgaggcagttttttgaccgagtgccatcggaatatacataccgaatgctcttttgctcgtgccaggaccaggcctgcgccgagcggaggcgtcagactatcctgccaagttgtagttatgaagacaaggagaagcctaattgtctggacctccgaggtgtgtgtagaacggaccatctgtgccgctctcgcctggctgatttccatgcgaactgcagagccagctatcagactgtcacatcttgtcccgctgacaattaccaagcctgtttgggttcctatgcagggatgatcggctttgacatgacaccgaactacgttgatagtagcccaactgggattgtcgtaagcccctggtgttcctgccggggatccgggaatatggaggaagaatgtgagaaattcctcagggattttaccgaaaacccttgtctccgcaatgctattcaggctttcggcaacggcactgatgtcaatgtgtcccccaaaggaccatcttttcaggccacacaggcaccacgagtcgaaaagactccgtctttacccgatgatctgtccgattcaacctccttagggacctcagtcatcaccacctgcaccagcgtccaggagcagggtctgaaagcaaataacagcaaggaactgagcatgtgcttcaccgagctgacaacgaatattatacctggtagcaacaaagtgattaaaccaaatagcgggcccagccgggctagacctagtgccgcccttacagtcctgagcgtccttatgctgaagctggctctctag

SEQ ID NO: 118226 - DNA, 996 bp, synthetic construct
  misc_feature 1..996: note = Description of Artificial Sequence: Synthetic coding sequence
  source 1..996: mol_type = other DNA
atgatacttgccaacgtgttctgcctcttcttttttcttgggacaggggcggatccagttgttagcgccaagtccaaccattgtctcgatgcggccaaggcttgtaacctcaatgacaattgcaagaagttgagatcatcatatatttctatctgtaatagagaaatctcacctacagaacgatgtaacaggagaaagtgccataaagctctgcgtcaattctttgatcgggtcccgtctgaatatacttatagaatgctcttctgcagctgccaggaccaggcttgcgctgagagacgtagacagaccatcctcccatcttgtagctacgaggataaagagaaacccaattgtctggacttaaggggtgtgtgccggaccgaccatctctgtcgctcgcgcttagctgattttcacgctaactgtcgcgcgtcttatcaaacagtgacgtcttgccccgcggataattaccaggcctgcctgggatcctacgcaggaatgatcggctttgatatgaccccgaattatgtggatagtagccccaccggaatagtagtgtccccttggtgctcgtgccggggctccgggaatatggaggaggaatgtgaaaaatttcttagagatttcacagaaaatccttgccttagaaatgctatccaagcttttgggaatgggacagacgtcaacgtatcccccaagggcccctccttccaagcaactcaggctccccgcgtggaaaaaacgccgagcctcccagacgacttatcagacagcacgtccctgggaacaagcgtgatcaccacgtgtacaagtgtgcaggagcagggtctgaaggctaacaactcaaaagaactttcaatgtgtttcactgaattaacaacaaatatcattccaggttctaataaggtgattaagcccaatagtgggccatctagggctaggccgtccgccgctcttaccgtgctgtctgtgctgatgttgaagctcgcactctag

SEQ ID NO: 118227 - DNA, 798 bp, synthetic construct
  misc_feature 1..798: note = Description of Artificial Sequence: Synthetic coding sequence
  source 1..798: mol_type = other DNA
atgattctagcaaatgttttttgtctgttcttcttcttggacgagactcttaggtctctcgccagccccagcagcctgcaggggccagaactgcatggatggaggccacccgtggactgtgtcagggccaatgagctgtgtgccgccgaatccaactgtagcagccggtataggactctcaggcaatgcctggctggcagggatagaaataccatgttagccaacaaagaatgtcaagcagcccttgaagtacttcaagaaagcccgctgtacgattgtagatgtaagcggggcatgaagaaggagttgcagtgcttacagatttattggtctatccacctgggactaacagagggtgaggagttctatgaagcctctccatacgagccggtcacatcccgtctaagcgatatatttagactggcctcaatattcagcggaaccggggccgatcccgtcgtgtcagcaaaatctaaccactgccttgacgccgccaaagcttgcaatctcaacgacaattgcaagaagctaagaagctcatatatatccatttgcaatagagaaatttcaccaacggagagatgcaacagacggaagtgtcacaaagccctgcgacagttctttgatcgggttccgtctgaatacacctatcgaatgctgttctgtagctgccaggaccaggcgtgtgcagagcggcggagacagaccattcttcccagttgcagctacgaggacaaggaaaaacctaactgtctggatctccggggggtatgcagaacagatcatctgtgtcgatag

SEQ ID NO: 118228 - DNA, 1395 bp, synthetic construct
  misc_feature 1..1395: note = Description of Artificial Sequence: Synthetic coding sequence
  source 1..1395: mol_type = other DNA
atgattctagcgaacgtgttttgtctcttttttttcctggatgagacactccggagcctggctagcccctcatcactgcagggcccagagctgcatggctggcgtcctccggttgactgtgtcagagccaatgaactctgcgccgcagaatccaattgttcttctcgctaccgcacgcttagacagtgtctagctggcagggatagaaatacaatgctggccaataaagagtgccaagcagccctcgaagtcttacaggaaagccccctgtacgattgtaggtgtaagagggggatgaagaaggaactgcagtgtctgcagatttattggagcatccatttgggtctgacagagggcgaggagttctacgaggcatccccctatgaacctgtgactagtcggctgtcagacatttttcgcctcgcctcaattttttctggcaccggggcagaccccgtcgtgtcagcgaaatcgaatcattgtcttgacgccgcgaaagcatgtaacttgaatgacaactgtaagaagttaagaagctcatacatcagcatttgcaatcgcgagatcagcccaaccgagagatgtaataggcggaaatgccataaagcactgcggcagttcttcgatcgcgtcccatcagagtatacatatagaatgctgttttgctcatgtcaggatcaggcctgcgccgaacgacgccgccagactatactgcccagctgctcctacgaagataaggagaagccaaactgtcttgatctaagaggggtatgtagaacagaccacctctgtaggagcagattggcggattttcacgccaactgtagagcaagctatcaaactgtgacctcttgtccagccgacaattaccaggcgtgcctgggcagttatgccggcatgatcggatttgacatgaccccaaattatgtagatagcagtcctacaggaatcgttgtgtctccttggtgctcatgcagagggagtggcaacatggaagaagagtgtgagaaattcctaagagacttcactgaaaatccatgcctcaggaatgccatacaggcctttggcaatggcaccgacgtcaatgtgtcacccaagggtccctctttccaggccacccaggcccctcgagtcgagaaaaccccatccctgcccgacgacttatcagatagcacatccttgggaacctcagtgataaccacctgcacaagcgttcaggagcaaggcctgaaggcaaacaactctaaggaactgtctatgtgcttcacagagctcacgaccaacattatccctggctcgaacaaggtcattaaaccgaactccggaccctccagagcccggccgagcgctgctcttacagtactctctgtcctcatgctaaagctcgccctgtag

SEQ ID NO: 118229 - DNA, 1203 bp, synthetic construct
  misc_feature 1..1203: note = Description of Artificial Sequence: Synthetic coding sequence
  source 1..1203: mol_type = other DNA
atggtgcggcctctgaatcctcgccctcttccacctgtcgttcttatgctgctacttctacttcctccatcacccctgccactggcggccggggaccccttacccacagagtcaaggctgatgaactcctgcctgcaagcaagacggaagtgccaggccgatccaacctgctccgccgcctatcaccacttagattcttgcacaagcagtatcagtacccctctaccatctgaagaaccatcagttcctgccgattgtctggaggccgcccaacagctcaggaactcgagccttattggatgtatgtgtcatcgccggatgaagaaccaggtcgcatgcctggacatctactggaccgtgcatagagcccgttccttgggcaactacgagcttgatgtgtctccctacgaggacactgtgacctccaaaccctggaagatgaatctgtctaagcttaatatgttgaagcctgactcagacttgtgcctgaaattcgccatgctgtgtacgctgaacgataagtgcgataggctgagaaaggcctatggcgaagcatgttctgggcctcactgtcagcgacacgtctgcctgagacagcttctgacctttttcgagaaggcagctgaaccccacgcacagggtcttctgctatgcccatgcgcgcccaacgacagaggctgcggcgaacggcggagaaacaccatagcccctaactgtgccctgcctcctgtggcaccgaattgcctcgagctgcggcgcctgtgtttctctgatccgttatgtagaagccggctcgtcgattttcagacccactgccaccccatggatatcctgggaacatgtgctaccgaacagagcagatgcttgcgagcttatctaggcttgatcggcactgccatgacccctaactttgtgtctaatgttaacacctcggtggccttaagttgtacctgccggggtagcggcaatttacaggaagagtgcgagatgctggagggattcttttcacacaacccctgtttaaccgaggcgatcgcagccaagatgcgattccacagtcagcttttttcgcaggattggccccaccctacatttgccgtgatggcacaccagaatgaaaatccagctgtccgcccacaaccatgggtccccagccttttcagctgtaccctgccgctcattctgttactctccctctggtag

SEQ ID NO: 118230 - DNA, 1110 bp, synthetic construct
  misc_feature 1..1110: note = Description of Artificial Sequence: Synthetic coding sequence
  source 1..1110: mol_type = other DNA
atggtgcggccactgaacccccgtccgctgcctcccgtagtacttatgctgcttctcttgctccccccttctccgctgccactggccgctggtgatcctcttccaaccgaatcccgactaatgaactcatgtctccaggccagacggaagtgtcaggctgacccgacatgttctgctgcctatcaccacttggattcctgcacttccagcatctccacaccgctaccgtccgaggaaccgagtgtacccgctgattgtctggaagcagcacagcaactgcgcaattcaagtcttattgggtgcatgtgtcatcgcagaatgaagaatcaggtagcgtgcctggatatctactggacagtgcatcgtgccaggagcttggactcagatctctgcctaaagttcgcaatgttgtgcaccctgaatgacaagtgtgacagactgagaaaagcctacggcgaagcttgtagtggccctcactgccagcggcatgtttgccttcgacaattgcttacctttttcgagaaggccgcggaacctcacgcccaggggctactgctgtgcccgtgcgcccccaatgaccgcggctgcggggagaggcgccgaaacacaattgctccaaactgtgccctacccccagttgcccccaattgcctcgaattaaggagactgtgcttctcagacccactttgcagaagccgtcttgtcgattttcagactcattgtcaccctatggatatcctagggacatgcgctacggagcagtctagatgtctgagagcgtacttgggattaattggaactgccatgacaccaaatttcgttagcaacgtcaacacttcagtggctctttcttgtacctgtaggggttccggtaatctgcaggaggaatgcgagatgctggaaggtttttttagccataatccctgccttaccgaggccatcgctgccaaaatgcggttccacagccaactgttttcgcaggactggccacatccaacattcgctgtcatggcccaccagaatgaaaatccggccgtcaggccccagccatgggttccgtccctattttcatgcactctgccattgatcctgctgttgtctctctggtag

SEQ ID NO: 118231 - DNA, 2136 bp, synthetic construct
  misc_feature 1..2136: note = Description of Artificial Sequence: Synthetic coding sequence
  source 1..2136: mol_type = other DNA
atggagagcggagctgtgttgctggagtccaagtcctctcccttcaatctgctgcatgagatgcacgaattacgcctgttgggacatttgtgcgatgtaacagtctctgtggagtaccagggggtgcgtaaggacttcatggctcacaaagcagtgttagccgccacaagcaagttcttcaaggaggtttttttgaatgagaagagcgtggacggcacacggactaatgtctacctcaatgaggtgcaagtcgcggactttgcatcattccttgagttcgtatacacagccaaagtgcaggtggaagaggaccgcgtccagcgcatgctggaggtcgcggagaaactgaagtgtctagatttgagcgaaacatgttttcagctcaaaaagcagatgctggaatcagtccttctcgagttacaaaacttctctgagagccaggaagtggaagtgagctcaggctcccaggtgagcgctgccccagcccctagagcctctgtcgccaccgatggccctcacccctcaggactgaccgactctctcgattatcctggcgagcgggcttcaaatggcatgtccagtgatctcccaccaaagaaatcgaaagacaagctagacaagaagaaggaggtggtgaaaccgccttatcccaagataagacgggctagcggccgactagctgggcggaaagtgtttgtggagattcctaagaaaaagtacacacgacgccttcgagagcagcagaaaaccgcagagggggacgtcggcgattacaggtgcccccaggaccagagccctgacagggtaggaactgagatggagcaggtgagcaagaacgaggggtgccaggctggagcagaacttgaggaattgtcaaagaaggcgggacccgaggaggaggaggaggaagaagaagaggacgaagaaggagaaaagaagaaatccaactttaagtgttcaatctgtgagaaagcctttctgtacgagaagtcatttctaaagcactcaaagcaccgtcatggcgtggctactgaggtggtgtacagatgtgatacctgtggtcaaaccttcgccaatagatgcaatctgaagagtcatcagagacatgtgcactcttccgaacgtcacttcccctgcgagctgtgtggtaaaaaattcaagcggaagaaggacgttaagcgacatgttctgcaggtgcatgagggcggcggcgagaggcaccggtgcggacaatgtggaaaagggttgtcaagcaagacagccctccgcttacatgagcggacacacacaggggaccgaccatatgggtgcacagagtgcggagctcgcttttcccagccaagcgcactaaaaactcatatgcgcatacataccggcgagaagcccttcgtgtgcgacgagtgcggtgcccgattcacacagaatcacatgctcatatatcataaacgctgccataccggagagagacccttcatgtgtgagacttgtggcaaatctttcgcaagcaaagagtacctcaagcatcataaccgcattcatactgggtcaaaacctttcaagtgcgaagtctgtttcaggacgttcgctcagcgcaacagtctctatcaacacatcaaagtccatacgggcgagcgcccatactgttgtgaccaatgtggcaaacagtttacgcaactgaacgccctccagcgacatcggaggatccacactggggaacgtccctttatgtgtaatgcctgcggccgcacttttaccgataagagtaccctgcgcaggcacacgtcaatacatgacaaaaacaccccatggaaaagcttcttggtaattgttgacgggagcccgaagaacgacgacggacataagactgagcagcctgatgaagagtacgttagctcaaaactatcggacaagttattgagctttgccgagaatggacactttcataacctggcggctgtgcaggacactgtgccaaccatgcaggagaatagctcagctgacacagcttgcaaagcggacgactccgtggttagccaagataccctgcttgcaacaaccatttctgaactgtccgaattgactccccagaccgacagcatgcccacccaattgcattcactttctaatatggagtag

SEQ ID NO: 118232 - DNA, 2136 bp, synthetic construct
  misc_feature 1..2136: note = Description of Artificial Sequence: Synthetic coding sequence
  source 1..2136: mol_type = other DNA
atggaatcgggcgcagtactgctggagtccaaatcatcccccttcaacctgctccatgagatgcatgaactgcgactgctcggccacctgtgtgacgtgaccgtgagtgtggaataccaaggagtgaggaaagacttcatggcacataaagctgtcctcgcagccacttcaaaatttttcaaagaggtgttcctgaacgaaaagtctgttgatggcacccggaccaacgtttaccttaacgaagtgcaggtggccgactttgctagtttcctggagttcgtgtacaccgccaaggttcaggtggaagaggacagggtccaaaggatgctggaggtggcggagaaactgaagtgtctggatctgagcgagacttgtttccagcttaagaaacagatgttggagtcagtcttgctggagctccagaactttagtgagtcccaggaagtggaggtgagcagcggcagtcaggttagcgccgctccagcgccccgggccagcgtggcaaccgatggcccacacccaagtggacttaccgactcactggactacccgggagaacgcgcctcgaacgggatgagcagcgatctgccccccaagaagtcaaaagacaagttggataagaagaaggaagtggtgaagccaccgtaccctaagatccggcgggcgtctggccggttggccggacgtaaggtctttgtggaaatccccaagaaaaaatacacacgacggctgcgagagcagcagaagaccgcagagggtgatgtgggggattacaggtgccctcaggaccagtcaccagatagagtgggtaccgaaatggaacaggtgagtaaaaacgaagggtgtcaggctggcgctgaactcgaggagttatcaaaaaaggcgggacccgaggaggaggaggaggaggaggaagaagatgaagagggcgagaagaagaaatctaatttcaaatgcagcatctgcgagaaagcctttctctacgaaaagtcctttttgaagcattccaagcaccggcacggagtagctacggaggtggtttaccgatgtgacacctgcggccagaccttcgctaaccggtgcaacctgaaatctcaccagcggcacgtccattcctctgagcggcatttcccatgcgaactctgcggcaaaaagtttaagaggaaaaaagatgtcaaacggcacgtactccaagtgcatgaaggcggcggtgaacgacaccggtgcggacaatgcggcaagggtctgtcctcaaaaactgcactaagactgcatgagagaacgcatacaggcgaccgtccatacggctgcacagagtgcggcgcgcgtttctcccagccctctgcgctgaaaacacatatgagaatacatacaggagagaagcctttcgtgtgcgacgagtgtggggctcgatttacccagaatcatatgctgatttatcacaagcgttgtcatactggcgagaggccatttatgtgcgagacatgtgggaaatcattcgcaagcaaggaatatctgaagcaccacaataggattcatacaggcagcaaacctttcaagtgcgaagtgtgcttccgaacgtttgcgcaaagaaattccctttatcagcatattaaagtgcacacaggagagcggccctactgttgtgatcaatgtggcaaacagtttacccagcttaatgctctccagcgacaccggcggattcacactggagagcgcccattcatgtgtaacgcctgtgggagaacctttactgataagtctacactccggaggcacacatccatccatgataagaatactccctggaaaagcttccttgtcatcgtggatggttcccctaaaaacgatgacggccacaagaccgaacagcctgatgaagaatacgtgtcctcaaagctgtcagataagctgctgagctttgccgaaaacgggcattttcacaaccttgccgcagtgcaggacaccgtacccactatgcaggaaaacagctccgcagacactgcatgcaaggctgacgatagtgtagtgagccaggatactcttctggccacaaccatctctgaactgagtgagctgaccccccagacagactctatgcccacgcaactgcatagcttatccaacatggaatag

SEQ ID NO: 118233 - DNA, 147 bp, synthetic construct
  misc_feature 1..147: note = Description of Artificial Sequence: Synthetic coding sequence
  source 1..147: mol_type = other DNA
atggaatccggagccgtcctgctggagagtaagtccagcccctttaatctgctccacgaaatgcacgagttacggctgttggggcatctgtgtgatgttacagtgtcagtagagtaccagggagtgcgaaaggactttatggcctag

SEQ ID NO: 118234 - DNA, 663 bp, synthetic construct
  misc_feature 1..663: note = Description of Artificial Sequence: Synthetic coding sequence
  source 1..663: mol_type = other DNA
atgtgtgaaacgtgtggcaagtcttttgcatcaaaagagtacctcaagcatcataaccgcatccataccggttccaaaccttttaagtgcgaggtgtgcttccggacattcgcacagaggaattcactctatcagcatattaaagtccacaccggtgagaggccctactgttgtgaccagtgcggcaagcagttcacgcagctaaacgccctgcagcggcatcgccggattcacaccggagagcggcccttcatgtgtaacgcctgtggacggaccttcaccgataagagcacactcagacgccatacctcaatccacgacaaaaacacaccctggaaaagtttcctggtcattgtggatggtagtcctaaaaacgacgacggacacaagacagaacaaccagacgaagagtacgtctctagcaaactctctgataagctgttgtcattcgctgagaatggacattttcacaacctcgctgctgtgcaagatacagtcccaaccatgcaggaaaatagctctgccgatacagcctgcaaggctgatgactctgtggtgagtcaggacacactcctcgctactacaattagcgagcttagcgagttaacccctcagacagattcaatgcctactcagcttcactcgctgagcaacatggagtag

SEQ ID NO: 118235 - DNA, 708 bp, synthetic construct
  misc_feature 1..708: note = Description of Artificial Sequence: Synthetic coding sequence
  source 1..708: mol_type = other DNA
atgctgatttatcacaaaaggtgccataccggggagagaccattcatgtgcgagacctgtggaaaatcttttgccagcaaagagtatttaaagcaccacaatcgtatccataccggcagcaagccatttaaatgcgaggtatgcttccggactttcgcgcaacggaatagcctgtaccagcacattaaagtccatactggcgagagaccctattgttgcgatcagtgtggcaaacaattcacacagctgaatgcactgcaacgtcatagacgcatacatacgggagagcgcccctttatgtgcaatgcatgcgggcgtaccttcactgacaaatcaacgttacgtaggcacactagcattcatgataaaaacactccgtggaaatcattcctcgtcatcgtggatggcagtcccaagaatgacgatggccacaagactgagcaacctgacgaggaatacgtgtcttccaagctgtcagataagctgctctctttcgctgaaaacggtcatttccacaatctggctgctgtacaggatacagtgccgacaatgcaggagaatagtagtgccgatacagcgtgcaaggcggatgattctgttgtgagtcaggacactttacttgccactacgataagcgagctgagtgaattaacaccacagaccgactccatgcctactcaactccattccctgagcaatatggagtag

SEQ ID NO: 118236 - DNA, 1254 bp, synthetic construct
  misc_feature 1..1254: note = Description of Artificial Sequence: Synthetic coding sequence
  source 1..1254: mol_type = other DNA
atggatgaggaatatgatgtgattgttcttggaactggcctaaccgaatgtatactgtccggcatcatgtcagtgaatggaaagaaggttttgcatatggaccggaatccctattacggtggcgaatcatccagcatcacaccattggaagaactgtataagcgtttccagcttcttgaaggcccacccgaaagcatgggccgggggagagattggaatgtggacctgatccccaagtttctgatggccaacgggcaactcgtgaaaatgctcctgtatactgaggttaccagatacctggatttcaaagtcgtggaggggtctttcgtgtacaaaggcggtaaaatttacaaagtccccagcaccgagacagaggcattagcctcaaatctgatgggcatgttcgaaaacgatccgaaaacatttgaaggtgtggatccacaaaccacatctatgagagacgtttacaggaagtttgacttaggccaggatgtgatcgatttcacaggtcacgctcttgctctctaccggacagacgactacctagaccagccatgccttgaaactgtgaatagaatcaaactttattccgagtcactggcgcggtatggaaagtctccatatctttatccactgtacggcctcggtgaacttccccagggctttgctcgattgtcggctatctatggtggcacctatatgttgaataagcccgttgacgacatcattatggagaacggcaaggttgtcggagtaaagagcgagggagaggtcgctagatgcaagcagctaatttgtgacccgtcctacattcctgatagggtgcgcaaagccggccaggtcattaggatcatttgtatcttgtcccatccgatcaaaaacaccaacgatgctaactcttgccagattatcataccccaaaatcaagtcaaccgcaagtctgacatatacgtctgtatgatatcatatgcccacaacgttgctgcacaaggaaagtatattgccattgcaagcactacagtggaaaccacagaccctgagaaagaggtggagcccgctttggaactgttggagccaatcgacgatggctgtgaatctcaggtcttctgttcatgttcatacgatgctactacccactttgagactacttgcaatgatattaaagacatctataagcggatggccgggactgcatttgactttgaaaatatgaagcgtaagcagaatgacgtgtttggcgaagcagagcagtag

SEQ ID NO: 118237 - DNA, 1344 bp, synthetic construct
  misc_feature 1..1344: note = Description of Artificial Sequence: Synthetic coding sequence
  source 1..1344: mol_type = other DNA
atggacgaagaatacgacgtgatcgtgctgggtaccggcctgacggagtgcatcttgtctggaattatgagcgtgaatggcaagaaggttcttcacatggataggaatccatattatggcggggagtcttcttcaatcacaccactggaggaactctataagaggttccaattgttggaagggccccccgaatccatgggcagaggacgcgattggaacgtggatctgattcctaagttcttaatggctaatggacagctggtgaagatgcttctgtacacggaggtgactagatacctggactttaaggtcgtcgaagggagtttcgtgtacaagggcgggaagatttacaaagtcccaagcaccgagacggaagcactggcctctaatctgatggggatgtttgaaaagagaaggtttcgcaagtttttggtgtttgtagctaactttgatgaaaacgatcctaagaccttcgaaggtgtggacccccagacgacatccatgcgggacgtctaccgtaaattcgaccttggacaggatgtgatcgatttcaccgggcatgctctggccctgtataggactgacgactatttagatcagccctgcctagagaccgtaaaccgcatcaaactgtactcggagtccttggcccgatacggcaagagcccttacctttatcctctgtacggattgggagagcttccccagggattcgcaaggctatccgccatttacggcggaacttatatgttgaataagccagtcgacgatatcattatggaaaatggcaaggtggtgggcgtgaagagtgaaggcgaggtggcccgctgcaagcagctgatctgtgacccttcttatataccagatagggtgagaaaggcaggacaagtcatccgcatcatctgcatcctatcacatcctattaagaatactaatgatgcaaacagctgccagattattattccccaaaaccaggtgaatagaaaatctgacatatatgtttgcatgatttcctacgcccacaatgtcgcggcccagggtaaatatattgctattgccagcaccaccgtggagactacagatcccgagaaagaagtcgagcctgctctggagctcctggagcccatcgatcaaaagttcgttgctatttccgatctgtacgagcctatcgacgacggctgtgagtctcaggtgttctgtagctgtagctacgacgccaccacccactttgagacaacttgtaatgacatcaaggatatctataagagaatggctggcaccgcctttgacttcgaaaatatgaaacgcaagcagaacgacgtctttggggaggccgagcagtag

SEQ ID NO: 118238 - DNA, 447 bp, synthetic construct
  misc_feature 1..447: note = Description of Artificial Sequence: Synthetic coding sequence
  source 1..447: mol_type = other DNA
atgtcccttggcaagaggaaacccagcaatttctaccttgcaaacttcctggggaaggagtgcattctttctggtataatgagcgttaatggcaaaaaagtgcttcatatggatcgcaatccttattacggcggcgagagcgcatcaattaccccattggaggacctgtacaagaggtttaaaatccccggctcaccccccgagtccatgggtcgaggcagggattggaatgtggacctgattccaaagttcttgatggcaaatggccagctggtaaaaatgctgctatatactgaggttactcgatacttagactttaaggtgaccgaggggtcctttgtttataaggggggtaaaatttataaagttccctctactgaggcagaggcgttggcttcttctttaatgggcctgtttgagaaacggaggtttagaaaattcctatag

SEQ ID NO: 118239 - DNA, 1350 bp, synthetic construct
  misc_feature 1..1350: note = Description of Artificial Sequence: Synthetic coding sequence
  source 1..1350: mol_type = other DNA
atgtccttaggaaagagaaaaccaagcaacttctatctggccaatttcttgggaaaggaatgtattctgagtggcattatgtccgttaatggaaagaaagtgctccatatggatcggaacccttattatggaggggagagcgcatccatcactccactggaagacctctataaaaggtttaagattcccggctcacctcccgaatcaatgggcagaggccgggattggaacgtggatcttatccccaaatttctgatggcgaatggccaactggtcaaaatgctcctctacaccgaggtgacacgctacctggattttaaagttaccgaaggatcgtttgtatataaagggggtaaaatatacaaagtacccagcactgaagctgaagctctggcgtcctccttaatggggcttttcgagaagcgcaggtttcggaagtttcttgtatatgttgccaatttcgatgaaaaagaccctcggacattcgaggggattgaccctaaaaagactaccatgcgggatgtgtacaaaaagtttgacctcggccaggacgttatcgatttcacggggcatgcccttgctctctacagaacagacgattatttagatcagccttgttacgaaaccatcaatcgcatcaaactgtatagcgagtcacttgcgaggtacgggaaaagcccgtatctctatccattatacggcctcggggagctcccccagggcttcgcccgcctcagtgcgatctatgggggcacctatatgctcaataaacccatagaggaaatcatcgtccaaaacggcaaggtcattggcgttaaaagcgagggcgaaattgctagatgcaagcagctgatttgcgacccctcttacgtgaaagatcgggttgaaaaggttggtcaagttattagagtaatatgtattctgagtcaccctatcaagaatactaacgacgccaactcatgccaaattattattccccagaatcaggtgaatcgcaagtcggatatctatgtttgcatgatcagttttgcacataacgtggcagctcagggtaaatacattgctatcgtcagtaccacagttgagacaaaggagccagagaaggaaattcgacctgcactggagctgctcgagcccatcgagcagaaattcgtgagcataagcgatctactggttcctaaggatctaggcacagaatcacagatttttattagccgcacctacgatgccacaacacatttcgaaacaacctgtgacgatatcaagaacatttacaagcgtatgacgggcagcgaattcgatttcgaagagatgaaacgcaaaaagaacgatatttacggagaggattag

SEQ ID NO: 118240 - DNA, 627 bp, synthetic construct
  misc_feature 1..627: note = Description of Artificial Sequence: Synthetic coding sequence
  source 1..627: mol_type = other DNA
atgcgagatgtctacaagaagttcgatctgggccaggacgtgattgactttacaggccacgcgctcgctctgtaccggaccgacgattatctcgaccaaccatgctacgagacaataaatagaatcaaactgtatagcgagagcctcgcccgctatggaaagagtccttatctttaccccctgtacggtttgggggaactgcctcagggatttgcccgacttagcgcaatttatggaggcacttacatgctgaataagccaatcgaagagattattgtccagaacggcaaggtaatcggagttaagtctgagggggagattgccagatgtaagcagctgatctgcgacccctcctatgtgaaggatcgggtggagaaagtgggtcaggtaatccgggtgatttgcatcttgagtcatcctatcaaaaacacaaacgacgctaactcttgtcagatcataataccccagaaccaagtgaaccgcaagtccgacctccttgcaagcgtcacctcctggtaccagaagacctgggagcagaaggccaggagcctgtttcctgcccatatgatgccccctttgatccttaggcaacgtgtgatgactctcaaaacatctatacgggggtag

SEQ ID NO: 118241 - DNA, 1203 bp, synthetic construct
  misc_feature 1..1203: note = Description of Artificial Sequence: Synthetic coding sequence
  source 1..1203: mol_type = other DNA
atgaacgaggaatatgacgttatagtgcttgggacagggctcaccgagtgtattcttagcgggatcatgagcgtcaacggcaaaaaagtactgcatatggatcgaaacccttactacggcggagaatcagcaagcatcacaccacttgaggatctttacaagcgttttaaaattcctggctctccacccgaatctatggggcgcggaagggattggaacgtcgacctcatccctaaattcttgatggctaatggattgatgggcctcttcgagaaaagaaggttccgcaaatttctggtgtatgtcgccaatttcgatgaaaaagacccacgtaccttcgagggcattgacccaaagaagaccactatgcgcgacgtctacaagaagttcgacctggggcaggacgtaattgatttcacaggccacgcattggctctgtatcgcaccgacgactacctcgaccaaccctgttatgagactattaaccgaattaagctgtacagtgagtccctggcaagatacggtaaatcgccctacctgtatccactgtatggactcggtgaactaccacaagggttcgccaggctgtcagctatatacggcgggacatatatgttaaacaagccaatagaggaaataatagtgcaaaatgggaaggttataggggtgaaatccgagggcgagattgcccggtgtaaacagctcatctgtgatccctcttacgtgaaagatcgagtcgagaaagtgggacaggttatcagagtgatctgcatcttgtcacaccctatcaaaaacaccaacgatgctaattcctgtcagatcatcattcctcagaaccaagtgaatcgcaaatccgacatctacgtatgtatgataagcttcgcccataacgtcgccgcacagggaaaatacatcgctatcgtgtccactaccgttgagacgaaggagccagaaaaagagatccggccagcgctggagctgctcgaacccatcgaacagaaattcgttagcatctcggatctcctagtgccaaaagacctgggcacagagtcacagatatttatctcaagaacctacgatgcaaccacccattttgagacaacatgcgatgacattaagaacatatacaagcggatgactggttcagagtttgacttcgaggaaatgaagagaaaaaagaacgatatctatggggaagactag

SEQ ID NO: 118242 - DNA, 1338 bp, synthetic construct
  misc_feature 1..1338: note = Description of Artificial Sequence: Synthetic coding sequence
  source 1..1338: mol_type = other DNA
atgaacgaggagtatgatgtgatcgtgttaggcaccggactgacagagtgtatcctctcaggtatcatgtccgtgaacggcaagaaggtactccacatggatcgcaatccatactacgggggcgagtctgccagtattacccctctggaggacctgtataagcgatttaaaatcccaggctcaccccccgagagcatggggaggggacgggattggaacgtggatcttatccccaaattcctcatggccaatggccagcttgtgaaaatgctgctctataccgaggtgactaggtacctcgattttaaagtgacggagggatcgtttgtctataagggtggcaagatctataaggtccccagtacagaagccgaagcgctcgccagttcccttatgggactctttgagaagcggcgcttccggaagttccttgtgtacgtggctaatttcgatgaaaaggacccccgcacttttgaagggatcgaccctaagaagaccaccatgagggatgtgtacaagaaatttgatctaggccaggacgtcatcgatttcacaggacacgcgttggccctttaccgaactgacgattacttagaccagccatgttacgaaacaatcaatcggattaaactgtactccgagagtctggccaggtacggcaaatctccgtacctgtatccactgtatggactgggtgaactgccacagggatttgccaggctttccgcgatttacggcggtacatacatgctcaataaaccaatagaagagatcattgtacagaatggaaaggttatcggagttaagtccgagggcgaaatagcccgctgcaaacagttaatttgcgacccctcatatgttaaagaccgggtggaaaaggtagggcaggtcatccgcgttatctgcatcctcagccaccccatcaagaacacaaacgatgccaactcttgtcagattataatcccacagaaccaagtgaatcgtaagagtgatatatacgtctgcatgatctcttttgcgcataacgttgccgcccagggtaaatacattgccatcgtgagtacgacagtggaaactaaagaacccgagaaggagatacgcccagcactggaactgctcgaacctatcgagcagaagttcgtctcaattagtgatctcctcgttccaaaggacttaggtaccgaaagccagatttttatatcaaggacctatgatgccacgactcacttcgagacaacgtgcgacgatataaagaatatatataaaagaatgactgggtctgagttcgacttcgaggagatgaagaggaagaaaaacgacatttatggtgaagactag

SEQ ID NO: 118243 - DNA, 468 bp, synthetic construct
  misc_feature 1..468: note = Description of Artificial Sequence: Synthetic coding sequence
  source 1..468: mol_type = other DNA
atgaacgaagaatacgacgtcatcgtcttgggcaccggcttgaccctctacaagcgctttaaaatccccggcagtccacccgaatctatgggaagggggcgggactggaatgtcgatttgattcctaagtttcttatggcaaatgggcagctggtcaaaatgcttctgtacacggaagtgactcgctacttggacttcaaggtaacagaaggctcctttgtatacaaaggggggaagatttataaagtaccctccaccgaggccgaagccctcgccagctccttgatggggctgttcgaaaaaaggaggttcaggaagtttctagtgtatgtagctaactttgacgagaaagacccaaggacatttgaaggcatcgacccaaagaaaaccactatgagagatgtgtataaaaaatttgatctcggacaggacgtgatagactttaccggccatgctttggccctgtag

SEQ ID NO: 118244 - DNA, 612 bp, synthetic construct
  misc_feature 1..612: note = Description of Artificial Sequence: Synthetic coding sequence
  source 1..612: mol_type = other DNA
aaaaaattcgatctgggccaggacgtcatagatttcacaggacacgctctggccctgtacaggacagacgattacttggatcagccttgctatgagactatcaatagaattaaactgtattccgaaagcctcgcacggtacgggaagtctccttacctgtacccattgtacgggctgggcgagctaccccaggggtttgcccggctgtcagcgatctacggaggcacttacatgttaaataagcccattgaggagatcattgtgcagaatggtaaagtgatcggcgtcaagtctgagggcgagatcgcacggtgtaagcaactgatctgtgatccaagttacgtgaaggatcgagtggaaaaagttggccaggtgatccgggtgatatgtatcttgtcacacccgatcaagaatactaatgatgccaattcttgtcagatcattataccgcagaaccaggtcaatcgtaaaagcgatctgctggcgtccgttaccagctggtaccagaagacctgggagcagaaagccaggagcctctttcccgcacatatgatgccccccctgattctgcgccagagagtcatgacgctgaaaacttccattcgaggctag

SEQ ID NO: 118245 - DNA, 792 bp, synthetic construct
  misc_feature 1..792: note = Description of Artificial Sequence: Synthetic coding sequence
  source 1..792: mol_type = other DNA
atgaatgaggagtacgacgtgattgtgctgggcactggactcacagagtgcattctgtcaggcattatgagtgtcaacgggaaaaaagtactgcacatggacaggaatccatactacggtggggaaagtgctagcattacacctttggaggacctgtacaaaagattcaaaatccccgggtctccacccgaaagcatgggaaggggccgtgattggaacgttgacctcatcccaaaatttctgatggccaatgaggtcaccaggtacctcgactttaaagtcaccgaggggtcttttgtgtacaagggtggaaagatctataaggtgccatctaccgaagccgaagcactcgcgagttcgttaatggggctgttcgagaagaggagatttagaaagttcctggtgtatgttgcaaacttcgacgaaaaagacccccggacatttgaaggcattgatccgaagaaaacaactatgcgggatgtgtacaagaagtttgacctcggccaggatgtgattgactttacaggccacgcacttgcactttatcggacggatgattacctcgatcaaccttgctatgagacgattaatagaatcaaactatactcagagtctctggcacgctatggaaagtccccatacctgtatcctctgtacggtctcggcgagcttccgcaaggatttgcgaggctgagcgcaatttatggtggaacgtacatgttaaataaaccgatcgaggagattatcgtccagaacggaaaagtcatcggagttaaatcggagggtgagtag

SEQ ID NO: 118246 - DNA, 1119 bp, synthetic construct
  misc_feature 1..1119: note = Description of Artificial Sequence: Synthetic coding sequence
  source 1..1119: mol_type = other DNA
atggcgcatgccccagctcggtgtccatccgcgcggggctccggtgatggcgagatgggaaagcccaggaatgtcgcattgattacaggaataaccggtcaggacggctcctacctcgctgagttcctccttgaaaagggctacgaggtccacggtatagtacggcgatccagtagtttcaacacagggaggatcgagcatctctataagaatccccaagcgcatatcgagggtaacatgaagctgcattacggagatctgacagattcaacttgcttggtgaagatcatcaacgaagttaagccaacagagatttacaatctgggggcgcagagccacgttaagatctcattcgatttggccgagtataccgctgacgtggatggggtcggcactttgagacttttggacgccgttaagacttgtggactgatcaacagcgtgaagttttaccaggcgtccacaagcgaactttatggaaaagtccaggagatcccacagaaagagaccaccccattctaccctcggtcaccatatggcgcagcaaagttgtatgcctattggatcgtggtcaatttccgtgaagcgtataacctttttgctgtgaacggcatcctatttaatcacgagtctccgaggcggggcgccaatttcgtgactcggaaaataagtcggtccgtggccaagatctacctggggcagctagagtgtttctctctggggaatttggatgccaagcgcgattgggggcacgccaaggattacgtcgaagcaatgtggctgatgctacaaaacgacgagccagaggacttcgtcattgccacaggtgaagtccacagcgtcagggagttcgtggagaagagctttctgcacatagggaagaccatcgtgtgggagggtaaaaatgaaaacgaggttgggagatgcaaagagacggggaaggtccatgtcaccgtggatttgaagtactatcggccaacagaagtggatttcctgcagggagactgtaccaaagctaagcagaagcttaactggaaacccagagtagcttttgatgaactcgtgagggagatggtgcatgctgatgtggaactaatgcgaaccaaccccaacgcttag

SEQ ID NO: 118247 - DNA, 1029 bp, synthetic construct
  misc_feature 1..1029: note = Description of Artificial Sequence: Synthetic coding sequence
  source 1..1029: mol_type = other DNA
atgtgtaaaatggatggaagctacctagctgagtttttgctcgagaagggatatgaggtgcatggaattgtgaggagatctagcagttttaacaccggaagaatcgagcatctttataaaaatccacaggctcatatagaaggtaatatgaagctgcattacggtgacctcacagactcaacctgcctggtgaagatcattaatgaggtgaaacccaccgagatttataaccttggcgcgcagtcccacgtgaagatttcatttgatttggctgaatatacagcggacgtggacggcgtgggcaccttacgcctgctggacgctgtgaagacctgcggcctcattaatagtgtaaagttttaccaggcaagtactagtgaactgtacggaaaagtccaagagatccctcagaaggaaaccacacccttctatccccgctccccctatggagccgctaaactgtatgcatattggatagttgtgaacttccgtgaagcttataatctcttcgccgttaatggaatcctgtttaaccatgagagcccacgtagaggtgcaaacttcgtaacgagaaagatttcccgaagcgtcgcaaagatatacttaggccaattagaatgtttcagtctaggtaatctggacgcaaagcgcgattggggccatgctaaagactatgttgaggccatgtggctgatgctgcaaaacgatgagcccgaggattttgtcattgccacgggtgaagtgcattctgtcagggaatttgtggagaagtcattcttacatatcggcaagaccattgtatgggagggcaaaaatgaaaatgaagttgggcgatgcaaggagacaggcaaagtgcatgtcaccgttgaccttaaatattaccggcccacggaagtagacttcctccagggggattgtacgaaagccaagcagaaactgaactggaagcctcgggttgcctttgacgagcttgtcagggagatggtgcacgcagatgtggagttgatgcggactaaccctaatgcttag

SEQ ID NO: 118248 - DNA, 2196 bp, synthetic construct
  misc_feature 1..2196: note = Description of Artificial Sequence: Synthetic coding sequence
  source 1..2196: mol_type = other DNA
atggtggtcgagcatccagagttcctcaaagcgggcaaggagccggggctgcaaatttggcgggtcgagaaattcgacttggtgcccgtgcccaccaacctgtatggagatttttttaccggcgatgcatatgttattttgaagacagtgcaactgcgcaatggcaatctgcagtacgatttacactactggttggggaacgaatgtagccaggatgaaagcggcgccgcagctatctttactgtccagctggacgactatctgaacggcagggcggtgcaacatcgtgaagtgcagggattcgagtctgcaacttttctgggctacttcaagtccggacttaaatacaagaaaggcggggtggcctccgggtttaaacatgtggtgcccaacgaagtggtggtacagcggctgttccaggtcaagggaaggcgcgtggttagagccacagaagtgcccgtttcttgggagtccttcaacaatggggactgcttcattcttgacctaggaaacaacatccaccagtggtgcggctctaatagcaacaggtacgagaggcttaaggcaactcaggtatcgaagggaattcgagataatgagcgctctggaagagccagggtgcatgtgagcgaagagggaaccgagcccgaggccatgcttcaggtcctgggacccaagcccgcactacccgccggcaccgaggatacagccaaagaagacgcagccaaccgcaaactcgctaagctgtacaaggtgtctaacggcgcaggcactatgagtgtctcactggttgctgacgaaaatccttttgcccagggagccctgaagagcgaagattgcttcatattagatcatggcaaagacggtaaaatctttgtctggaagggaaaacaggctaacaccgaagaacggaaagcagccttaaagactgccagcgacttcattacaaaaatggattatcccaagcagacccaggtgagtgtccttcccgagggtggcgagactcccctgttcaaacagtttttcaaaaactggcgcgatcctgaccagactgacggcctgggactgtcctacttaagttctcacatagctaacgtcgaaagagtaccattcgacgcagcaaccttgcatacaagtaccgccatggctgcccagcacggtatggacgatgacggcacagggcaaaagcagatatggaggatagaaggctctaataaggtgccggtcgaccctgctacctatgggcagttttacggcggggatagctatattatactgtataactaccgccacggcggtcgacagggccaaatcatctacaattggcagggcgctcagtcaacgcaggacgaagtcgctgccagtgcgatcttgacagcccagttggacgaggaactgggcggaacccctgtccaatccagggttgtgcaagggaaagaaccagctcacctcatgtctctattcggtggaaaacctatgattatctacaagggaggaacatcgcgggaaggcggtcagacggccccagcctccacaagactgtttcaggtcagggctaattctgccggcgccaccagagccgttgaggttctgccaaaggccggagccttgaacagtaacgacgcctttgtgctgaaaaccccctctgctgcctacctgtgggtgggaactggggcctctgaggcagaaaaaacaggagcacaagaactgctccgggtgcttcgagcccaaccagtgcaggtggccgagggctctgagcctgatggcttctgggaggccctcggaggaaaggccgcctataggacctcccctaggctgaaagataaaaagatggacgcccatcccccccgccttttcgcctgcagcaacaagatcggcagatttgtcattgaggaagtgccaggcgaactcatgcaggaagacctggcaacagacgacgttatgctccttgacacgtgggatcaggtatttgtttgggtaggcaaggattcccaggaggaagaaaagaccgaagctctcacatcagctaagcggtatattgagactgatcccgccaatcgcgatagacggacccccatcactgtcgtcaagcaaggattcgaaccccccagctttgttgggtggtttctcggctgggacgatgactattggtcagtggatcctctggaccgagcgatggccgagttagccgcttag

SEQ ID NO: 118249 - DNA, 2196 bp, synthetic construct
  misc_feature 1..2196: note = Description of Artificial Sequence: Synthetic coding sequence
  source 1..2196: mol_type = other DNA
atggtggtggagcaccccgaattcctcaaggctggcaaggagcccggcctgcaaatctggcgggttgagaaatttgacctagtacccgtgcccactaatttgtatggggatttctttaccggggacgcgtatgttatcctgaagactgtccagctccggaacggcaacctccagtatgaccttcattattggcttggaaatgaatgcagtcaggacgaatccggcgcagctgctatcttcacagtccagctggatgattacctgaatggacgggcagtacagcatagggaggtccagggcttcgagagcgctacgtttctggggtattttaagagcgggcttaagtataagaagggtggagtggcctctggtttcaagcacgtggttcctaacgaggtggtagtccagcgactgttccaagtgaagggcagaagagtagttcgagcaaccgaggtgccagtgtcttgggagagttttaacaacggggactgtttcattctggacctggggaacaacatccaccaatggtgcggttctaattcaaaccgttatgagaggctgaaggcaactcaggttagtaaaggcattcgggacaatgaaaggtctggaagggcccgagttcatgtgtctgaggaaggaacagagcccgaagccatgctgcaggtcttaggacctaagcctgcactccccgctggaactgaggacactgcaaaagaagacgctgccaacaggaaacttgctaagctgtacaaagtgtccaatggggcagggaccatgtccgtaagtcttgtagccgatgaaaatccgttcgcacagggcgccctgaaaagtgaggattgttttatcctcgatcacggcaaagacggaaagatcttcgtgtggaagggaaagcaggcaaataccgaggagaggaaggccgcactgaagacagccagtgacttcatcacaaagatggactaccctaagcaaacacaggtgagtgtactgcccgagggaggggaaactccgttatttaagcagttcttcaagaactggagggatcccgatcagaccgacgggcttggcctatcctatcttagcagtcacatcgccaacgtagaacgagtcccatttgacgcagccactctgcatacctctacagccatggcagctcaacacggcatggatgatgacgggaccggccagaagcagatatggcgcattgaaggctctaataaagtacctgtggatcccgccacctacgggcagttttacggcggagattcgtatataattctttacaactacaggcatggagggagacagggacaaataatctataattggcagggggcccaaagcacccaggatgaagttgcagcctccgccatcctgactgcccagcttgacgaggaactggggggcactcccgtgcagagtagggtagtccaaggaaaggagcccgcccatttaatgagcttattcgggggcaagcccatgataatctataaaggaggcactagccgtgagggaggacaaacggctcctgcatccactcggctcttccaggtgagagcaaactctgctggagcaacaagggcagtcgaagtactccccaaggccggggctctcaacagtaacgacgcattcgtcctgaagacccccagcgctgcatatctgtgggtggggaccggagcgtctgaagctgagaagactggtgcccaggagctactccgcgtactaagggctcagcccgtgcaggtcgcagagggcagcgagcccgacggattctgggaggctcttggaggtaaggccgcctaccgcacatcaccgaggctgaaagacaagaaaatggatgctcatccccccaggctgttcgcctgtagcaacaagattggacggtttgtgattgaagaggtgcctggcgagctgatgcaggaagatctcgccacagacgacgtgatgttactggatacctgggatcaggtgtttgtgtgggtgggtaaggactcgcaagaggaggagaagacagaggccctcacgtctgccaaacgatacatcgaaacggaccccgctaatcgtgacaggcgcacaccaattaccgtggtgaagcagggtttcgaaccccctagcttcgtgggctggttcctaggctgggatgacgattactggtccgtggatcctttagacagggctatggccgagcttgcagcctag

SEQ ID NO: 118250 - DNA, 2349 bp, synthetic construct
  misc_feature 1..2349: note = Description of Artificial Sequence: Synthetic coding sequence
  source 1..2349: mol_type = other DNA
atggctccccataggccagctcctgcgctcctctgcgccctttccctggctctgtgcgccttaagtctgccagtgagagctgccactgcttcacggggggctagccaggccggtgcaccccaaggaagagtgccagaggcccggcccaattctatggtggttgagcatccggagttcctgaaagcggggaaagaacccggcctgcagatttggcgcgtggagaaattcgacctggtccccgttcctacgaatctatacggggacttctttaccggcgacgcatatgtgatcctgaagaccgtccaactgagaaacggtaacctgcaatatgacctgcattactggctgggaaacgaatgctcgcaagacgagagtggcgcggccgcgatatttactgtgcagctggacgactatctgaacggcagagccgtccagcacagagaggtccaaggcttcgagtccgccacctttctcggctacttcaaatccggactgaagtacaaaaaaggcggggttgcaagtggcttcaaacacgtggttcctaatgaagtggttgtgcagagactttttcaagttaaaggacggagggtggtacgcgccactgaggtacccgtgtcctgggaatcttttaacaacggggattgcttcatcctcgatctgggaaacaacattcaccaatggtgtggatccaatagcaatagatatgagcgacttaaggcaacgcaggtttccaaagggattagagataatgagcgcagtgggagagcgcgggtacacgtttccgaagagggcaccgagcctgaagctatgcttcaagttcttggcccaaagcccgcgctgcccgctggcacagaagataccgccaaggaggatgccgccaaccgcaaactggcaaaactgtacaaggtttccaatggagcagggacaatgtcagtgtccctcgtagcagatgaaaatccatttgcccaaggcgcccttaaaagcgaggactgcttcattctggatcacggcaaggatggcaaaatcttcgtgtggaaggggaaacaagctaacactgaggagaggaaagcagccttaaagactgccagtgacttcatcaccaagatggattaccctaaacaaacacaggtctctgtcttgccggagggtggggagacgcccctgttcaagcaattctttaagaattggcgggaccccgaccagaccgatgggctggggttgtcttacttgtccagccacatagctaatgtggaacgtgttccattcgatgctgctacactacacacaagtactgccatggccgcgcagcatgggatggacgacgatggcaccggacagaaacagatctggagaatcgaaggcagtaataaggttcctgtcgaccccgccacgtatgggcagttctatggcggggactcatacataatcctgtataactacaggcacggcggtcggcagggccagataatttacaattggcagggggcccagagcacccaggacgaggttgcagcctcggctattttaactgctcagctcgacgaagagcttggcgggacccccgtacaatctcgagtagttcagggcaaggagccagctcacctgatgagcctttttggcggcaagccgatgatcatttacaagggagggacatctagagagggtgggcagacagctcccgctagcacccgcctgtttcaggttcgcgccaacagcgccggtgcgaccagagcagtagaggtcctgccaaaagcaggggctcttaactccaatgacgctttcgtccttaaaactcccagcgccgcgtatctttgggttggcaccggagcctctgaagccgaaaagaccggagcccaagagctattgcgcgtactgagagctcagccagtgcaagtcgccgaaggcagtgaaccagatggattctgggaggcactaggaggtaaggctgcttatcgtacttctcctcggctgaaagataagaagatggatgcccatcctccccggctattcgcttgtagtaataagattggacggttcgtgattgaggaagtgccaggcgagttaatgcaggaagaccttgccactgatgacgtgatgttgctggacacatgggatcaggtctttgtgtgggtgggcaaagactcccaggaggaggaaaagacagaagcgcttacaagtgctaaaaggtacattgaaacggatcctgccaacagggataggagaacccctatcaccgtggtaaagcaaggtttcgaaccgccttcctttgtgggatggtttctgggctgggacgacgactattggtctgtcgatccgcttgaccgcgccatggctgagttggctgcatag

SEQ ID NO: 118251 - DNA, 2196 bp, synthetic construct
  misc_feature 1..2196: note = Description of Artificial Sequence: Synthetic coding sequence
  source 1..2196: mol_type = other DNA
atggtggtcgaacatccagagtttctgaaggcggggaaagaacccggtttacagatctggagagtggaaaagtttgacctggtcccagtgccaaccaatctttacggggacttttttactggtgacgcttatgtcatcctgaagacagttcagctccggaacgggaatcttcagtacgacctgcattactggctaggcaacgagtgctcacaggacgagagcggggctgccgcaattttcactgtgcaactggacgattatttgaatggccgcgcagtgcaacacagggaggtgcagggctttgagtctgcaacattcctaggatactttaagtctggactgaagtacaaaaagggaggggtcgcgagcggcttcaaacacgtggtaccaaacgaggtcgtggtacaacgtctgttccaggtaaagggccgtcgcgtggttcgggctaccgaggtcccagtaagctgggaatctttcaacaatggtgactgctttattctcgatctcggaaacaatatccaccagtggtgtggcagcaatagcaaccgatacgaaaggctgaaagcgacccaggtttctaaggggatcagagataacgaacggtctgggagagctcgggttcatgtatctgaagagggaactgagcctgaggccatgctgcaagtgttggggccaaaacccgcactacctgccggaacagaggacacagcgaaggaggatgccgcaaatcgaaagctagccaagctgtacaaagtgtccaatggggcaggaacgatgtctgtatcccttgtggctgatgagaatccttttgcacagggggcgcttaagtcagaagattgcttcatcctcgaccacggaaaggatggtaagatcttcgtttggaaaggtaagcaagctaacaccgaggaacggaaagcagcattgaaaacagcaagtgacttcatcacgaaaatggactaccccaagcagacccaagtttccgtactcccagagggtggcgagactcctctattcaagcagttctttaaaaactggagggatccagaccaaacagacggtcttggccttagctatctctcgagccacatcgcaaacgtggagagagtgcctttcgacgcggcaactttgcatacaagcacggctatggcagcacagcacgggatggacgacgatggcaccggacagaaacaaatatggaggatcgagggttctaacaaggtgcccgtggaccccgctacatacggccagttctatgggggggactcgtatatcatcctttataattatagacacgggggcaggcaaggtcagattatctacaattggcaaggtgcacaatccacacaggatgaggtggccgcctctgctatactgactgcacagctcgatgaagagctgggaggaaccccagtgcaatctcgtgtcgtgcaaggaaaggaacccgctcacctcatgagcctgttcggcgggaagcctatgattatatacaagggcgggactagcagagagggcgggcagacagcaccagcatctactcgcttgttccaggtgagagccaactctgccggggcaaccagggctgtggaggtgctgccaaaagctggcgccctgaactctaatgacgccttcgtgttaaagacaccttcagctgcttacctgtgggtcgggactggggcctcagaagcagaaaaaactggagcccaagagctgttgagggttctgagagcacagcctgttcaggttgcggaaggatcagagccagacggattctgggaggccctgggcggcaaggccgcctacaggacttctcctcgtttgaaggataagaaaatggatgcgcaccccccgaggctttttgcttgtagcaacaaaatcggccgctttgtgatagaagaggtgccgggagagttaatgcaagaggatctcgcaactgacgacgtgatgctccttgacacatgggatcaggtgttcgtgtgggtcggcaaggactctcaggaggaagagaagactgaagcactcacctctgccaagcgctatatagaaactgatccagcaaaccgcgatcggagaactcccatcactgttgtgaaacaaggcttcgagcccccatctttcgtcggatggttcttaggctgggatgacgattattggagcgttgacccccttgatcgagccatggcggagctggcggcttag

SEQ ID NO: 118252 - DNA, 2148 bp, synthetic construct
  misc_feature 1..2148: note = Description of Artificial Sequence: Synthetic coding sequence
  source 1..2148: mol_type = other DNA
atggttgtcgagcacccggagttccttaaggcaggcaaagagccagggctccaaatatggcgggttgagaagttcgacgcctatgtgatcctcaagaccgtgcagctacgcaatgggaacctgcagtatgatctgcactattggcttggcaacgagtgcagccaggatgagtccggagctgcagctatatttacagtacaacttgacgactacctaaacggtagagcagtgcagcacagggaggtgcagggtttcgagtctgcaacatttctaggctacttcaagtcgggactcaagtataagaagggcggagtggcctctggttttaagcatgtggtccctaacgaggtagtcgtgcaaagattgtttcaggttaaaggcaggcgcgtcgttcgagccactgaggtgcctgtgtcctgggaaagctttaataacggggactgcttcatcctggacctgggaaacaacattcaccagtggtgcggctcgaatagtaataggtatgagaggctgaaagccacacaggtaagtaaggggatccgcgacaatgagaggagcggtagagcccgagtacacgtgagtgaggaaggaacggaaccggaagccatgctgcaagtgttgggtcccaaacctgccctgccagcaggcaccgaagatactgctaaggaagatgccgccaatcgaaaactagcaaagctgtataaagtctccaatggcgccgggacgatgtctgtgtcactggtggctgacgagaatcctttcgctcagggcgcactgaagtcggaagattgttttatcctggaccatggtaaagatggcaaaatttttgtctggaaaggcaagcaagcaaataccgaggaaagaaaagcggctctcaaaactgccagtgacttcatcacgaagatggattatccaaagcagacccaggtctctgtgctgccagagggcggagagacccctctgttcaagcagtttttcaaaaattggagggaccccgatcagacggatggcctgggcctcagctaccttagcagccacattgccaatgtggagcgggttcccttcgacgccgcaacacttcacaccagcacggcaatggcggcccagcatggtatggacgatgatggtaccggacagaaacagatctggaggattgaaggctccaacaaggtcccagtagatccagcaacatacggccagttttatggtggagattcctacattattctgtataactatcgccatggcggccggcaggggcagataatctacaattggcagggagctcaatctacccaagacgaagtggccgcgtccgccattcttacagcacagctggacgaagagctgggtggtactccggttcagtcccgagtggtccagggcaaagagccagcccatcttatgagtctattcgggggaaagcccatgatcatatacaaaggtggcacaagccgcgagggcgggcaaacggccccagcctcaacccgcctctttcaggtgagagccaactccgccggggctacgagagcagttgaggtgctgccaaaagcaggggctctgaactctaacgacgcattcgtcctgaaaacaccgtctgcagcttatctgtgggttggaaccggagcgtctgaggcagagaaaacaggcgcacaggagttgttgcgcgtgttgagagcacagccagtgcaggtggctgaagggagtgaaccggatggcttttgggaggcacttggcggcaaggctgcctaccggactagccctagactcaaagataaaaagatggacgcccatcctcctagactattcgcctgttccaacaaaattggaaggttcgtcattgaagaggttccaggtgagctaatgcaggaagacctggcaactgatgacgtgatgctgttagacacttgggaccaggttttcgtttgggttgggaaggacagccaggaagaggagaaaacagaggccctcaccagcgccaagagatacatagagaccgatcccgccaatcgcgacagaagaactcctataaccgttgtgaagcagggctttgaaccgccatctttcgtgggctggtttctgggctgggatgacgattattggtctgtcgaccccctggatagagccatggcagaactggctgcatag

SEQ ID NO: 118253 - DNA, 2229 bp, synthetic construct
  misc_feature 1..2229: note = Description of Artificial Sequence: Synthetic coding sequence
  source 1..2229: mol_type = other DNA
atggagaagctgttctgctgttttcctaacagcatggttgtcgagcatcctgaattcctaaaagctggcaaagagccggggctgcaaatttggcgcgtcgaaaagttcgaccttgtgccagtgcctactaacctctatggcgatttttttaccggcgacgcgtatgtcatcctgaagacagtgcaactgaggaacgggaacctgcagtacgatttgcattattggctcggtaacgaatgctctcaggacgagtcaggtgcggccgcaattttcactgtccaactggacgactatctcaatggcagggcagtgcaacatcgcgaggttcaaggctttgaaagtgccacctttcttggttactttaaatcgggactcaaatacaaaaaagggggtgtagcttccggatttaagcacgttgtccccaatgaagtggtcgtgcagagactatttcaggttaaggggcgcagggtggtgagggctaccgaagtgcctgtgtcttgggaatctttcaacaacggagactgttttatcctcgatctgggcaataacatccaccagtggtgcggatcaaattccaatcgctacgagcgactcaaagccacccaggtctccaagggcataagagacaatgaaagatcagggcgagcacgcgtccatgtttcggaggaggggacagaaccagaggctatgctccaagtgttgggaccaaaacctgctctgccagccggtaccgaggatacagccaaggaggacgcagcaaaccgaaagctggccaagctgtataaagtgagcaatggagcaggaaccatgtctgtgagtctggtggcggacgagaacccctttgcacagggggcactcaaatcagaggactgttttatattagatcacggaaaagacggcaaaatctttgtttggaagggcaaacaggccaatacagaggagcggaaagccgctctgaaaactgcaagtgatttcatcactaagatggattaccccaaacagacacaggtgagcgtgctgcccgagggtggcgaaacgcctctgttcaagcagttcttcaaaaactggagagacccggatcagacagatggccttggattatcttacctgtcttctcatatcgctaatgtggagcgtgtaccatttgacgccgccactctgcatacctcaaccgcgatggctgcccagcatgggatggatgatgatggaacaggccaaaagcagatctggagaattgagggcagcaataaggtcccggtcgacccagcaacatacggacagttttatggaggagacagttacattatcttgtataactacaggcatggcggccgtcagggtcagatcatctacaactggcagggagcacagagcactcaggacgaagtcgccgcaagcgcaatcctcactgcccagcttgatgaggaactgggtgggactcccgtgcagagtcgggtggttcagggcaaagaacctgctcacttaatgtctctgtttgggggtaagccaatgatcatctacaagggtggtacaagtcgcgaaggcgggcagacggcccccgcatctactaggctctttcaggtgagagctaatagcgcgggggctaccagggccgtggaagtgttgccaaaggccggagcactcaacagcaatgacgctttcgtacttaaaacacccagcgccgcctatctctgggtcgggactggcgcgtccgaagcggagaaaaccggggcgcaagagttgctgcgggtgttaagggcccaacctgtgcaggtggccgaggggtccgagcccgatggtttttgggaggcactgggggggaaggcagcctaccggacttccccaaggctcaaggataaaaaaatggatgcacaccctccccgcctttttgcatgttccaataagattggaaggttcgtaatagaggaggtgcctggggaattaatgcaagaggatttagccactgatgacgtgatgctgctcgacacttgggatcaggtttttgtctgggtggggaaagactctcaggaagaggaaaagacggaagcccttacatccgccaagaggtacatcgaaaccgatccagctaacagagaccgaaggacacctattacagtcgtcaagcaagggttcgaacctccctcctttgtcggttggtttttaggctgggacgatgactactggtccgtcgatcccttagacagggccatggctgagctcgctgcatag

SEQ ID NO: 118254 - DNA, 2196 bp, synthetic construct
  misc_feature 1..2196: note = Description of Artificial Sequence: Synthetic coding sequence
  source 1..2196: mol_type = other DNA
atggtggttgaacatcccgagttcctgaaggctgggaaggagcctgggctgcagatctggagagttgaaaagttcgatctggtgcccgtgcccacgaatctctacggcgatttctttaccggagacgcatacgtcatcctcaaaacagtacaactcaggaatggtaacctccagtacgacttacattactggcttgggaacgagtgttcacaggacgagtcaggggcagcagctatatttacagtgcagctggatgattatctgaatggtcgggctgtccagcacagagaagtgcagggctttgaaagtgcaaccttcttgggctattttaagagcgggttgaagtataaaaaaggcggagtggccagtggcttcaagcacgtggtgcccaacgaggtggtagtccaaagactgttccaagtgaaaggaaggcgtgtagtgcgggcgacagaagttccggtgtcctgggagtcatttaacaatggagactgctttatcttggatctcggtaataatattcatcagtggtgtggctctaatagtaatcgatatgaacgtctgaaggctacccaggttagcaaggggataagagacaacgaacgatcggggagggctcgagttcacgtcagtgaggagggaacggaaccagaggcaatgctgcaagtcttgggccctaagcctgccctccctgccgggactgaagacaccgcgaaagaggatgccgccaacagaaagctcgccaagctgtataaggtatctaacggggccgggaccatgtccgtgtctctcgtggccgacgagaatccttttgcacagggggcactgaagtccgaggattgctttatcctcgatcatggcaaagacggaaaaatctttgtttggaaaggaaagcaagccaatacagaggaacgcaaagctgccctgaagacagcatctgattttattaccaagatggattacccgaagcagacgcaggtaagcgttctccctgaaggtggcgaaacgccactgttcaagcagttttttaaaaactggcgagatcccgatcagactgatgggctggggctgtcctacttgtccagccacatcgcgaatgtggagcgtgtgccatttgatgcagccacattgcacacctctaccgccatggccgcccaacatggcatggacgacgacggtactgggcaaaagcagatttggcggatagaaggaagcaacaaggtgcccgtagaccccgccacttatgggcagttttacgggggggactcctatattatcctgtacaattaccgtcacggcgggaggcagggtcaaatcatctacaattggcagggggctcagtctacgcaggatgaggtcgccgccagcgctattctcaccgcccagctcgatgaggaacttggcggaacccccgtacagtcgcgcgtcgtgcaggggaaagagcctgcccacttaatgtcactctttggtggtaagcctatgatcatctataaaggcggcacgtcaagagagggtgggcagaccgctccagcaagcacccggctatttcaggttcgggcaaactccgcaggcgcgacccgagccgtggaggtcctgccaaaggcgggggccctgaactccaatgacgccttcgttctgaaaacaccctccgctgcctatctgtgggtgggcactggtgcaagcgaggcggaaaagacaggagcccaggaactcctacgggtgctcagggcccagcccgtccaggtggctgaaggcagtgaaccagacggcttttgggaggcactcggcggcaaggctgcttaccgcacaagcccccggctgaaagataagaagatggatgctcacccaccacgactctttgcttgctccaacaagataggcaggttcgtgatagaagaagtccccggggagttaatgcaggaggatctggccactgacgacgttatgctgctcgatacttgggaccaggtcttcgtgtgggtggggaaagactctcaagaagaggagaaaacggaagcccttacatcggccaagcgctatatcgaaaccgatccagccaatcgcgaccgaagaacccctattaccgtggtgaagcaggggtttgagccacccagcttcgttggatggttcctgggatgggatgacgactattggtcagtcgaccctttggaccgtgccatggctgagctcgccgcgtag

SEQ ID NO: 118255 - DNA, 783 bp, synthetic construct
  misc_feature 1..783: note = Description of Artificial Sequence: Synthetic coding sequence
  source 1..783: mol_type = other DNA
atggtcgtcgaacatccagaatttctgaaggcgggaaaggagccgggtcttcaaatctggcgcgttgagaagttcgatctagttccagtacccaccaacctgtacggggattttttcactggtgatgcttacgttatattgaagacagtccagctccgcaacgggaaccttcaatatgatcttcactactggttaggaaacgagtgctcccaagatgagagcggagccgctgccatttttaccgttcagctggacgactatctcaacggcagggcggtccagcatcgcgaggttcaggggttcgagtctgccactttccttggatattttaaaagtggattaaagtacaagaaaggcggcgtggcatccggtttcaagcacgtcgtacccaatgaggttgtcgtgcagcgattatttcaagttaaaggaagaagggtggtgagagctactgaagtgccggtgtcatgggaatcctttaataatggggactgcttcatccttgatctgggtaacaatatccatcagtggtgcggcagtaactccaatcggtacgagcggctgaaggcaacacaagtgagtaaaggaatccgagacaacgagaggagcgggcgggcccgtgttcatgtgtccgaggagggcactgaaccagaggctatgctgcaagtgctcggccctaagcctgctctgccagcagggacagaagacacggccaaggaagatgccgccaacagaaagctggccaaactgtataaagtcagcaatggcgcgggcaccatgagctag

SEQ ID NO: 118256 - DNA, 2229 bp, synthetic construct
  misc_feature 1..2229: note = Description of Artificial Sequence: Synthetic coding sequence
  source 1..2229: mol_type = other DNA
atggagaaactgttctgttgctttccgaattctatggttgttgaacacccggagttcttaaaggcagggaaggagccgggactacagatttggagagtcgaaaaatttgacttggtccccgtcccaaccaatctgtatggagatttttttactggggatgcctatgtcattctgaagaccgtgcagctgcgtaatggcaatctccagtatgaccttcattactggctgggaaatgagtgctcccaggatgaaagtggcgccgccgcgatattcaccgttcaactggacgattatctcaacggcagagccgttcaacaccgggaagtgcagggtttcgaatccgccacttttctgggttactttaaaagcggacttaaatacaaaaaaggtggtgttgcttccgggttcaagcacgtcgtgcctaatgaggtcgtggtgcaacgcctgtttcaggttaagggaagacgcgtggttagggctaccgaagtgccggttagctgggagagttttaacaatggggactgctttattctggaccttggtaataatatccaccagtggtgtggttccaactcaaataggtacgaacgacttaaagctacgcaggtatccaagggaatccgcgataatgagcgctccgggcgcgcacgcgtgcatgtatcagaagaaggaaccgagcccgaggcaatgcttcaagtgctgggcccaaagccagctcttccggccggtactgaggatacagccaaagaagacgcagcaaaccgcaagctggccaagctgtacaaagtctctaatggggccgggaccatgtcagtgtcactggtcgcggatgaaaaccctttcgcccagggagctctgaaaagtgaagactgtttcattcttgaccatggcaaggacggaaagatcttcgtttggaagggcaagcaggccaacacggaggagcgtaaggccgctctgaagactgcctctgatttcataacaaaaatggattatcctaagcagacccaagtgagtgttttacctgaaggcggcgaaacaccacttttcaagcaattcttcaagaactggcgcgacccagaccagacagatggtcttggcctgagctatctgtcttcacacattgcaaacgtggaaagagtgcccttcgacgcagcaacacttcatacaagcacagccatggcggcacaacatggcatggacgacgacgggactgggcaaaagcaaatctggcgaattgaaggatctaataaagtgccggttgacccagcaacctatggccaattctacggcggtgactcttatatcatcctgtacaattatagacatggtggtagacaaggccagattatctacaattggcagggcgcccagtccacgcaggatgaggtggctgcatccgccatccttactgcacagttagacgaagaactgggcgggacacctgtgcaaagcagagtcgtgcagggcaaggagccagctcacctaatgtctctattcgggggtaagcccatgatcatttacaagggcggcacctctagagagggcggtcagaccgcccctgcttccactagactgttccaggttcgcgccaacagtgccggcgctactcgggccgttgaggtgttaccgaaagccggtgcgcttaactctaatgatgcgttcgtactgaaaaccccaagtgctgcatacctttgggtggggaccggagcctccgaggcagaaaagacgggtgcccaggagctcctgagagtgctgcgcgcccagcctgtccaggttgccgaaggaagcgagcctgacggtttctgggaagcgctgggaggcaaggctgcctaccgcacctccccaagactgaaagacaagaaaatggatgctcatcctccgcgcctgttcgcgtgcagcaacaagatcgggcgattcgtgatcgaggaggttcccggcgagctaatgcaggaagatctcgccaccgacgacgtgatgctgttagatacctgggatcaagtgtttgtctgggtcggaaaagactctcaggaggaagagaagacagaagcactcacctcagctaaaagatatattgagacagatccggccaaccgcgaccggcgcacaccaatcacagttgttaagcaggggttcgaaccccccagtttcgtgggatggttccttggatgggatgacgactactggtcagtagatccgctggatagagccatggccgagctcgcggcctag

SEQ ID NO: 118257 - DNA, 2196 bp, synthetic construct
  misc_feature 1..2196: note = Description of Artificial Sequence: Synthetic coding sequence
  source 1..2196: mol_type = other DNA
atggtggtggaacatccagaatttctgaaggccggcaaggaaccagggctccaaatctggcgggttgaaaagttcgacctggtgccagtccctactaatctttacggcgactttttcactggggatgcctatgtgattctcaaaacagtgcagctcagaaatggcaacctacagtacgatctgcactactggctggggaacgagtgttctcaggatgaaagtggggccgcagccatcttcacagtgcagctggacgactacttgaatgggagggcagtgcagcaccgcgaagtgcaggggttcgagtcggccacctttctggggtactttaagtcgggcctcaagtacaagaaaggtggcgtggcgtccggatttaaacatgtcgttcccaacgaagtggtggtccagaggctgtttcaggttaaggggcgtagagtggtccgagccacagaagttcccgtgagctgggagtcatttaataatggagattgcttcatcctggacctgggaaacaatatccaccagtggtgcggatccaatagcaatcggtacgaaagactcaaggctactcaggtgtccaaaggcatccgtgataacgagaggagtggcagggcaagagttcacgtcagcgaggaaggcactgagcccgaggcaatgctgcaggttcttggccctaaacctgccttgccggcagggacagaggataccgcaaaggaagacgctgccaataggaaactggctaagctgtacaaagtgagcaatggagcaggcactatgtcagtctctttggttgcagacgagaatccatttgctcagggtgctctgaaaagtgaagactgtttcatacttgatcacgggaaggacggcaaaatctttgtctggaaaggaaagcaagccaacactgaggaaagaaaggcggctctgaaaacggcttccgattttataaccaagatggattatccaaaacagacacaggtctccgtgctgcccgaagggggggagactcctctatttaagcagttcttcaaaaattggcgcgaccctgatcagacagacggcctgggactctcttatctgtcaagccacatcgctaacgtcgaaagagtcccattcgacgcagccactttgcacaccagcacggccatggctgctcaacacggaatggatgacgacggaacggggcagaagcagatttggagaattgaagggtctaataaggtgccagtggatccagccacatacggacagttctacggcggggattcatacataattctgtacaactacaggcatggcggtcgccagggccagatcatttataactggcagggtgcccaatcgactcaggacgaggttgctgcatctgccatactgacagcccagctggacgaagagcttggagggacaccggtgcagtccagggttgtgcagggtaaagaacccgctcacctgatgagcctttttggcggcaagcctatgattatttacaaaggcggcacaagccgagagggcggtcagaccgccccggccagtaccagactgttccaggtccgagccaatagcgcgggagccacccgggcagtcgaggtgctgcccaaggccggcgctctgaattctaacgacgcatttgtgctgaaaaccccctcagctgcctatttgtgggtcgggaccggcgcttctgaagctgagaaaaccggggctcaggaactcctgagggttctgcgtgcacaaccggttcaggtggcagagggaagcgagccggatggcttctgggaagctttggggggcaaggcagcctatagaacctcacctaggctcaaggataaaaagatggatgcccatcctcctaggttgttcgcctgcagcaataaaatcggcaggtttgtcattgaggaagtgcccggtgaattaatgcaggaggacctggctaccgacgacgtcatgctattggacacatgggatcaggtctttgtctgggtggggaaggacagccaggaggaggagaaaacagaagcactcacgagcgctaagcggtatatagaaaccgaccctgctaatcgagaccgaagaacccccattacagtggtgaaacagggatttgaacctccgtcctttgtcggatggttcctggggtgggacgacgattattggtcggtcgatccactggaccgcgccatggctgaactggctgcttag

SEQ ID NO: 118258 - DNA, 2118 bp, synthetic construct
  misc_feature 1..2118: note = Description of Artificial Sequence: Synthetic coding sequence
  source 1..2118: mol_type = other DNA
atggtggtggagcatcctgaattcctgaaagctggtaaggaaccagggctccagatttggcgggttgaaaaattcgacttggtgccagttccaaccaacctgtacggggacttttttaccggtgacgcttacgtcatcctcaagactgtgcagctgagaaacgggaatttgcagtatgacttgcactactggcttggaaacgagtgcagccaggatgaaagtggggccgccgcaatctttaccgtgcagcttgatgactatttaaaatataagaaaggcggagtggcttccggatttaaacacgtcgtgcctaatgaggtggtagtccagagactttttcaggtgaagggtaggcgagtggttagagcaaccgaagttcctgtgagttgggagtctttcaacaacggagactgtttcatacttgacctaggtaacaacatacaccagtggtgcgggagtaactcgaaccggtacgagagactgaaggccacccaggtgtcaaaggggatccgtgacaacgagaggtccgggcgggccagggttcacgtgagcgaggagggtaccgaacctgaggcaatgctgcaggtcttagggccaaagcctgctttacccgcaggcaccgaggatactgcaaaggaggatgctgcaaaccggaaactggccaaactctacaaagtgagcaatggggctggaacgatgtccgtgagtttggtggccgacgagaatccatttgcacagggggccctcaaatctgaagattgttttattctggatcacgggaaagatggcaagatcttcgtgtggaagggaaaacaagcaaacaccgaggagcgcaaagccgcgctcaagacggcgtccgattttatcactaagatggactacccaaaacagacacaggttagtgtgctgccagagggtggggaaaccccactcttcaagcagttttttaagaactggagggatccggatcaaactgacggcctggggttatcatatctctcatctcacatcgccaacgtggaaagagtcccatttgatgcagctaccctacacacttcaaccgcaatggcggcccagcacgggatggatgacgacggaacaggtcagaaacaaatctggaggattgaaggatctaacaaggtgcctgtggatccggccacatacggacagttctatggtggagacagttacatcattctgtacaattatcgccacggtggaagacaaggacaaataatatacaattggcagggtgctcaaagcactcaggacgaggtggcagccagtgctattctgacagcacagctggacgaagaactcggcgggacccctgtgcagtcaagggtcgtccagggtaaagaaccagcccatctgatgagcctgttcgggggaaaacctatgatcatctataaaggcgggacaagccgcgagggggggcagaccgcaccagctagcacccgccttttccaggtcagagccaacagcgctggtgcgacccgggctgtggaagtgctgccaaaagctggcgcccttaacagcaacgacgcttttgtactcaagactccatccgccgcttacctgtgggtggggacgggcgctagcgaggccgaaaagacaggcgcacaggagctgctgcgagtgcttcgcgctcagcctgtgcaggtagcagagggctctgaacccgatggcttttgggaagccctcggcggaaaggctgcctaccgaacctccccccgtctgaaggataaaaagatggacgcacaccctcctagactgttcgcgtgttctaacaagatcggccgattcgtgatcgaggaagttccaggcgagctcatgcaggaagacctcgccactgatgatgttatgctgctggacacgtgggatcaggtctttgtctgggtcgggaaggatagtcaggaggaggagaagaccgaggcgctgacttccgctaagaggtacatcgaaaccgaccctgcaaaccgagatcggcgcacgcccatcacggtggtgaaacaaggtttcgagcctccctcctttgttggatggtttctgggttgggacgacgattactggtctgtcgatcctcttgatcgcgccatggctgaactggctgcctag

SEQ ID NO: 118259 - DNA, 2220 bp, synthetic construct
  misc_feature 1..2220: note = Description of Artificial Sequence: Synthetic coding sequence
  source 1..2220: mol_type = other DNA
atgccactgtgcactcccaactccatggttgtagaacaccccgagttccttaaagcaggaaaagaacctggcctgcagatctggcgggtcgaaaaattcgatttggtccccgttcccacgaatctgtatggagacttcttcaccggcgacgcttatgtgatcttaaaaacggtccagcttcggaacgggaatcttcagtacgatctccactattggctgggaaatgagtgttctcaggatgaatccggcgccgctgctattttcactgtccagctggacgactacctcaacggtagggcggtgcagcaccgagaagtccaggggttcgaatcagctacatttctggggtactttaaatcaggactgaagtataagaaaggtggcgtcgcctctggttttaaacatgttgtcccaaatgaagttgtcgtccaacggctcttccaagttaagggccgacgcgtcgtgcgtgctactgaagtgccagttagttgggaatctttcaacaacggtgattgttttatccttgatctgggcaataatatccaccagtggtgtggctctaatagcaaccgttacgagcggcttaaggctacccaggttagtaagggaattcgggataacgagcgatctggaagagctcgcgttcacgtgagcgaggagggaacagagccggaagctatgttgcaggttctgggccccaaacctgcactgccggcaggcacagaagacaccgctaaggaagatgcggctaaccgaaagcttgctaaactttataaagtgtccaacggagcgggaacgatgagcgtctcattggtggcagatgaaaatcctttcgcgcagggcgctttgaaaagcgaggactgctttatcctggaccacgggaaggacggaaaaatcttcgtgtggaaaggaaagcaagctaacacagaggaacggaaagctgcgcttaagacagctagcgacttcataaccaaaatggattatcccaaacagacccaggtctccgtgctcccagagggtggggaaactcccttgttcaagcagttcttcaaaaactggcgtgatcctgatcagaccgacgggctgggccttagttatttgtcctctcatattgccaatgtagagagggtcccctttgatgctgccacccttcacacttctaccgctatggcagctcagcacgggatggatgacgacggcacaggccagaagcagatctggaggattgagggcagcaacaaagtcccagtagatcctgccacatacgggcagttctatgggggagactcctacatcatcctgtataattacaggcacggaggccggcagggacagatcatttacaattggcagggcgcgcagagtacccaagatgaagtggctgcttctgcaattctgaccgcacagctcgacgaggagctggggggcacgccagtccagtcccgcgtcgtccagggaaaggagcctgcccaccttatgtccctgttcggcgggaagccgatgatcatctataagggaggtacttcgagagaagggggccagactgcccccgcctccaccagactgttccaggtcagggccaactccgccggcgccactagagccgtcgaggtgctgcctaaggcaggtgctctgaattctaacgacgcctttgtgctgaaaaccccttctgctgcatacctgtgggtcggcaccggggcctcagaggcagaaaaaaccggcgcccaggaattactcagggtgctgagagcccagcctgtgcaggttgctgaagggagcgaaccagacggcttttgggaggcactgggtgggaaggcagcgtataggacatctcctcgactcaaggataagaaaatggatgctcaccctccaagactctttgcctgctcaaataagatcggacgctttgtcatcgaagaagtccctggtgagctcatgcaggaagatctggccaccgacgatgtcatgctcctggatacctgggatcaggtcttcgtgtgggtgggcaaggattctcaggaggaggaaaaaacagaggccctcacttctgcaaaaagatatatcgaaaccgacccagctaatcgagaccgcaggacgcccatcactgtagtgaaacagggattcgaacctcctagttttgtggggtggttcctggggtgggacgacgactattggtcagtggaccctttggaccgtgcaatggctgaattggccgcctag

SEQ ID NO: 118260 - DNA, 4527 bp, synthetic construct
  misc_feature 1..4527: note = Description of Artificial Sequence: Synthetic coding sequence
  source 1..4527: mol_type = other DNA
atgggtcaggaacccagaacactgcctccttccccaaactggtattgcgctcggtgttcagacgctgtccctggtggtctttttggttttgccgccagaacatctgtctttctggtaagggtaggacccggagccggagagagcccgggaacacccccttttcgggtcataggagagctggtcggccatacggaaagggtcagcgggttcactttctcgcatcatcctggccaatacaacctctgtgcaacctccagtgacgacggaacggtcaaaatctgggacgttgagactaaaacagtcgtcacggaacacgccctgcatcagcacaccatttctacattacattggtctcctcgcgtgaaggatttaattgtttcaggcgatgagaaaggagtggttttttgctactggttcaacagaaatgactcacagcatctgttcatcgaaccccgaactatcttctgtctgacctgtagtccgcatcacgaggacctcgtggccatcggctataaagacggaattgttgtaatcatcgacatttctaagaagggcgaagtaatccacagattgaggggacacgatgacgaaattcattctatagcctggtgcccactgccgggggaagactgcctctccatcaatcaagaggaaacctccgaagaagcagagatcacaaacggtaacgctgtagcccaggcaccagttacaaagggatgttacctggcaacagggtccaaggaccagactatcagaatatggtcttgcagccgggggaggggtgttatgatactcaagctaccatttttaaaacgccgaggcggcggcatagaccccacagtgaaagagagactttggttgacactgcactggccttccaatcagcctacacaactggtgtcttcttgctttggcggagagctcctccagtgggacctcacacaaagctggcggaggaagtatactttattctctgcctcatctgaaggccagaaccactctagaattgttttcaatctgtgtccgttgcagaccgaagacgacaaacaactgctgttaagtacgtctatggatcgggacgtgaaatgctgggatattgccacccttgaatgttcctggacccttccatcccttggtggctttgcgtactccctcgccttcagtagtgtggacatcggttcactcgccatcggagtcggcgacggaatgataagggtctggaacactttatcaataaaaaataactacgatgtcaagaatttctggcaaggagtgaagtctaaagtgacggctctgtgctggcatccaacgaaggagggttgcctggcgttcggcaccgacgatggtaaagtaggtctatacgacacatattctaacaagcccccacagatcagctccacatatcacaagaagacggtgtatactctggcctggggtcctcccgtgccacctatgtcactcgggggggagggtgaccggcctagcctcgcactctatagctgcggcggggagggaatagtgctgcaacacaacccgtggaaactgagcggcgaggccttcgatattaataaattgatcagggatactaattcaataaagtacaagctgcccgtccataccgaaatttcctggaaagctgacggtaagattatggcactcggtaacgaggatgggagcatagagattttccagatccccaatctcaagctcatctgtaccattcagcaacatcataagctggtgaacactatctcctggcaccatgagcatgggtcccagccagagttatcttatttgatggcctccggctcaaataacgcggtgatctatgtgcataatctgaaaactgtgatcgagtcctcaccagaatctcccgtaacgatcacagagccctacagaaccctcagcggtcacactgctaaaataacatctgtagcttggtcgccccaccacgacggcagactggtgtctgcatcctatgatggtacagcacaggtctgggacgcattgagggaagagcccctgtgcaatttcagaggccatagaggaaggttattatgtgttgcttggtcacccttggaccctgattgtatctattcaggcgccgacgacttttgtgtacataaatggctgacctcgatgcaggaccatagccggcccccccaaggtaagaagtccatcgagctggaaaagaaacggctgtctcaacccaaggccaagcctaagaagaagaaaaagccaaccctgcggacgcctgttaagctggagtccattgatgggaacgaagaggagtccatgaaggaaaactctggacccgtggagaacggcgtgagcgaccaggagggagaggagcaggcacgggagccagagctcccttgtggcctggccccagcggtgtctagagaacctgtgatctgcacccccgtatcaagcggatttgagaaaagtaaggttaccatcaataacaaggtgattctcttgaagaaggaaccccccaaggaaaagcccgagactttaataaagaagcgcaaggcaagatcactgctgcctctaagcacctccctggaccataggagcaaagaagagctgcatcaggattgccttgtgctggctactgctaaacattccagagaacttaacgaggacgtttctgcggatgtggaggagcgcttccatctcgggctcttcactgatcgggccacactgtatcgcatgatcgacatcgagggaaagggccatcttgagaatggtcatcccgaactgttccaccagctcatgctgtggaagggcgacctgaaaggtgtcttgcagacggccgcggagagaggcgagttgaccgacaacctggtcgccatggcccctgctgctgggtatcatgtatggttatgggctgttgaagcattcgccaagcaattgtgcttccaggaccaatatgtaaaggcagcatcacacctgctgtcaatccacaaagtgtacgaagccgtagagctattaaaatcaaatcacttctacagggaagctattgcgatcgcaaaggcgagactgcgtccagaggatcctgtgctcaaggatttgtatctgagttggggaactgtgcttgaacgggatggacattacgcagtggcagcaaagtgttatctgggagcaacttgcgcttacgacgccgccaaggtgctggctaaaaaaggtgacgcagcctccctgcgaactgccgccgagctggctgcaattgtcggcgaagatgagctatctgcatcccttgccctgcgctgtgcacaagaattacttctggcaaataattgggtgggcgcccaagaagctctgcagttgcatgaatctttgcagggacaacggctcgtattttgcctccttgaactgctgtctagacacctcgaggagaagcagctgagcgagggcaagtctagctcatcttaccacacatggaatacaggtacagaagggcctttcgtcgagagagtgactgcagtttggaagtctatctttagtcttgacacccctgagcaatatcaagaagcttttcaaaagcttcagaacatcaaatacccaagtgccaccaacaacactccagccaaacagctcctgctccatatttgtcatgacctcacgctggcggtcctcagtcaacagatggcttcctgggacgaggccgtgcaagctctcctgagagctgtcgttcgcagctacgattcaggatcttttactatcatgcaggaagtatactcagcgtttctgcccgacggctgtgaccatctgcgagataagctgggtgatcaccagagccctgctaccccggccttcaagtcattagaggcattttttctgtacggaagattgtatgaattctggtggtccttgtctcgaccttgcccaaatagctctgtctgggtacgggccggacatagaaccctcagcgtggagccatcccagcagctggacaccgccagcacagaggagaccgatcctgaaacatcacaacctgaaccgaatagaccctctgagctggatctacggctcactgaagagggcgagaggatgctctctacattcaaggagctgttctctgaaaaacacgcgtcgttgcaaaactcccagcgcaccgtggccgaagtccaagaaacccttgccgagatgatccggcaacatcagaaatcgcagctgtgcaaaagtaccgctaatggaccggacaagaacgagcctgaggtggaagccgaacagccactgtgtagttctcaaagccagtgcaaagaggagaaaaacgaacctctgagccttccagagttgactaagcgtctaactgaggcaaatcaaagaatggccaagttcccagagagcattaaggcttggccatttcccgatgtcctggagtgctgtcttgtgcttctcctcatccggagccatttccctggttgtctggcccaggaaatgcagcaacaggctcaagagttacttcagaaatacggcaacactaagacgtataggcgacactgccagaccttctgcatgtag

SEQ ID NO: 118261 - DNA, 396 bp, synthetic construct
  misc_feature 1..396: note = Description of Artificial Sequence: Synthetic coding sequence
  source 1..396: mol_type = other DNA
atgcaaacaccagtgaatataccagtcccggtacttagactgcccagagggcccgatgggttttcccgtggttttgccccagacggacggcgggcgcctctgaggcccgaggtgccagagatacaggagtgccctatcgcccaggaatccctcgagtcccaagaacaaagagctagggccgccttgcgcgagcgttacctcaggagcctgctggccatggtagggcaccaggtcagcttcacactccatgagggggtccgtgtagcagcccatttcggagcaacagaccttgacgtggctaacttctatgtgtcccagttgcagacgcccattggagtgcaggcagaagccttgctcaggtgttctgacattatatcctatacattcaaaccatag

SEQ ID NO: 118262 - DNA, 396 bp, synthetic construct
  misc_feature 1..396: note = Description of Artificial Sequence: Synthetic coding sequence
  source 1..396: mol_type = other DNA
atgcaaacccctgtgaatattccggtgcccgtcctgagactgcccagggggcccgacggcttttctcgtggattcgctcccgatggcaggcgggcaccactccggcctgaagtgcctgagatacaagaatgtccaattgcgcaagaatcactcgagtcacaagagcagcgcgctcgcgcggccttgagggaacgctacctgagatccctgttggctatggtcggccatcaggtgtcatttactctacatgaaggtgtcagagtcgccgcacactttggcgcaactgaccttgacgtggctaatttctatgtatctcagttacagacaccgattggcgtgcaggctgaggcgctactgcggtgcagtgacatcatctcctacacattcaagccatag

SEQ ID NO: 118263 - DNA, 2913 bp, synthetic construct
  misc_feature 1..2913: note = Description of Artificial Sequence: Synthetic coding sequence
  source 1..2913: mol_type = other DNA
atggacgccgcagaaccgggcctccccccaggacccgaaggcaggaaacgatactcggatatcttccgctctctggataacctggaaatttcattgggtaacgtgacccttgagatgctggcaggtgacccgctcctctcggaggacccagagcccgacaagactccaacggccaccgtgacaaatgaagcctcttgctggtctggaccatcccccgaaggccccgtgccattgaccggtgaagaactggacctgcgcctcatccgaaccaaagggggtgtcgacgcggccttagagtacgccaaaacttggtcccgatatgccaaggagctactggcatggacggagaagcgggcctcttacgagctcgaatttgccaaatcaacaatgaaaatcgccgaggcaggtaaagtgagcatacagcagcagtcgcacatgccacttcaatatatctacactctgtttctggagcacgacctcagcctaggcaccctggcgatggaaaccgtggcacagcagaaaagagactactatcagccactggctgcaaagaggaccgagatagaaaaatggcgcaaagaatttaaggagcagtggatgaaagagcagaagcggatgaacgaagcggtacaggccctgaggagggctcagttgcagtacgtccagcgctcagaggatctgagagcgcgcagccagggatcccccgaagatagtgctcctcaagcatcccctggtcccagcaagcagcaggaacgacgcaggcggtccagagaggaggcacaagccaaagctcaggaagcggaagccttgtaccaagcatgtgtaagggaagcaaacgctcgtcaacaggatctagaaattgctaagcagcggatcgtctcccacgtccgaaaactcgtgtttcagggagatgaagtgctgcggcgggttactttatcgctcttcgggctgcgcggcgctcaggccgagcgcggcccgcgggccttcgccgcactggctgaatgttgtgctccctttgaacctgggcaacgttatcaggaattcgtacgagcgctccggcctgaggcacctcctccaccgccccccgccttttcgtttcaggaatttctgccgagtctgaactccagtcctctggacattaggaagaaactctcaggacccctgcctcccagactggacgagaactcagccgagccgggtccttgggaggaccctgggactggctggagatggcaggggacacctggtccaactcctggtagcgacgtggactccgtgggcggaggctctgaatcacggtccttggattcccccacaagcagccccggagcaggcactaggcaattagttaaggctagctctacaggcactgaatctagcgacgacttcgaggaacgtgaccccgatttaggcgatggtctggagaacggattaggatcccctttcgggaagtggactctgtccagcgcagcacagacccaccagcttcgcagactacgaggtccagccaagtgccgcgaatgcgaggcttttatggtgtcaggaaccgagtgtgaggaatgttttctgacctgccacaaacgttgcttagagactcttcttattctgtgcggccatcggcggctgcctgcacgcactccactgtttggggtggacttcctccaactcccacgagactttccagaggaggttccctttgttgtgactaagtgtactgctgagatagagcatagagccctcgatgtacaaggcatttaccgcgtctccggctcacgcgtgcgggtggaacgcctgtgccaagcttttgagaacgggcgtgcgttggtggaactgtctgggaacagccctcatgatgtctcctcagtgctcaagagatttctacaggagctgaccgagcccgtgataccattccacctgtacgatgcattcatctcgttagctaagactttgcatgccgatcccggagatgatccgggcacgccctccccttcacctgaagtaatcaggagcctaaaaactttgcttgtccagttaccagattctaactacaacacactaaggcacctggtagcacatctgtttcgagtggccgcccggtttatggagaacaagatgtccgccaacaaccttggtattgtttttggcccaacgctactgcgtcctcctgatggacctcgcgcagcctcagccatccccgtgacctgcctcttagattcaggacaccaggcgcagctggtggaatttcttatcgtgcattacgaacagatatttggcatggacgaattacctcaagccaccgaacctcctccccaggactccagccctgcccctggccctctcacaaccagttctcagccaccccctccacatctcgacccggattcacaaccacctgtacttgcctctgatccggggccagaccctcaacaccactcgacactagagcagcatcccaccgcgaccccaaccgaaatacctacgccacagtctgatcaacgagaagatgtcgccgaggatactaaagacggagggggtgaggttagctcgcaaggcccagaggactctctcctgggcacacagagccgcggccactttagccgccagccagtgaaatatcctagggggggagtccgccccgtcacacaccagttgagtagcctcgcactcgttgccagcaagttgtgcgaagagacacctataaccagcgtcccaagaggaagtttaagaggccgggggccttcacccgctgcggcttctcccgagggttcacccctgaggcgcacgcccctgcccaagcattttgaaataacacaggaaaccgcccgactcctgtcaaagcttgactcggaggcagttccccgggccacttgttgtccagacgtgcagccagaagaggcggaggaccatctatag

SEQ ID NO: 118264 - DNA, 2826 bp, synthetic construct
  misc_feature 1..2826: note = Description of Artificial Sequence: Synthetic coding sequence
  source 1..2826: mol_type = other DNA
atggacgccgcggagccgggtttaccccctggccctgaagggaggaagcggtatagtgacatctttcgctcccttgacaacctggagatatctctgggtaacgtgacattggagatgttagcaggcgaccccctgttatccgaggaccctgagccagataaaacccctacagccaccgtcaccaatgaggcttcatgttggtcgggcccgtctcctgaggggccagtaccgttaacaggggaggaactggacctccgcctcatccggacaaaagggggggttgacgcggccctggagtatgccaaaacctggagccgctacgccaaggagctactggcttggactgagaagcgcgcctcctacgagctagaatttgctaagtcaacaatgaaaattgccgaggctggcaaggtaagcatccagcaacaaagtcatatgccattgcaatatatctatactctgttcctggagcatgatctctcactaggcaccctcgctatggagacggttgcgcagcagaaaagagattattaccagccactcgccgcaaaaagaacggagattgaaaaatggcggaaggaatttaaggagcagtggatgaaggagcagaaacgtatgaacgaggccgtccaggcccttcggcgggcccagttgcaatacgtacagcggagtgaggacctgcgggcacgctctcagggcagtcccgaagacagtgcaccacaggcgtcaccgggaccaagcaagcagcaggaaagacgcagacgatcccgagaggaggcacaggctaaggcacaggaggctgaggcgctgtaccaggcttgtgtccgcgaggctaacgcccgccagcaggatttagagatagctaaacagcgcatcgtcagtcatgtgaggaagctggtttttcaaggcgacgaggttctgcgcagggtgactctcagcctattcggcctgcggggagcacaggctgagagaggcccgagagcatttgcggcactagctgagtgctgcgctccttttgagccgggccagcgctaccaggaattcgtccgcgccttgcgcccggaagcaccacctccgccccctcctgcttttagcttccaggagtttctcccatccttaaactcgtctcctcttgacatccggaagaaactgtcgggacctctgccaccaaggttggacgaaaattccgccgagccaggaccttgggaagatccgggcaccggatggaggtggcaaggtccgactccagggtccgatgtggatagcgtcggcggagggagcgagtctagatccctcgactcgccgacctcaagtcccgatctgggggacgggctcgaaaacggacttgggagtccgtttgggaagtggactttaagttccgccgcgcagacacaccagctgcgtcgtctgcgtgggcctgccaagtgtagggagtgtgaggcttttatggtctcggggacagagtgcgaagaatgctttttaacttgtcataaacgttgtcttgaaacacttttgatcctgtgcgggcatcgtcgactgcctgctaggacgccactattcggagtggacttcctgcagttgccaagagactttccagaagaagtaccctttgtagtgacaaagtgcaccgccgagatcgagcatcgtgccctggacgtgcagggtatttaccgggtgagcggttcaagagtgcgggtggagcgcctgtgtcaggcatttgaaaacggccgggctctggtcgaactgtcaggaaatagccctcatgatgtgtctagcgtactcaaaaggttcttgcaggagctcaccgagccagtgatcccatttcacctgtacgacgccttcatctccttggctaaaactctacacgccgaccctggcgacgaccccgggacgccctcaccctcaccggaagtgattaggtctctgaagactctgctggttcagctgcccgatagcaattacaacacattgagacacctggtggcccacttgttccgggtggctgcgcgtttcatggaaaacaagatgtcggccaacaatctcggtattgtgtttggccctactctgttgcgtccacctgatggtcctagggctgccagcgctatcccagtcacttgcctgctggacagcggccaccaagcccagctggtggagtttctcatcgtgcattatgagcagatctttggcatggacgaactacctcaggccacagaacctcccccgcaggacagcagtcctgctcccggtccattgactacatcctcacaaccacctcctcctcacctagacccagactcccagccacccgttctggccagtgaccctggccccgatccacagcatcactccacgctggaacagcacccaacggccacccctaccgaaattccaacgccacagagcgaccaacgcgaggacgtggctgaggacacgaaagacggaggcggggaggtaagctcccagggaccggaggacagtctcctggggactcagagccgtggccatttttctcgtcaacctgtgaaataccctcgaggaggtgtgcgacctgtaacgcaccagctttccagtctggccttagtcgcctccaaactgtgcgaagaaactcctatcacgagcgtaccacgggggtccctcagaggccggggcccatccccagccgcagccagccccgaggggtccccattgcggagaacgccactgcccaagcacttcgagattacccaagagactgcccggctcctctccaaactggacagtgaggcagtccctcgagcaacctgctgccctgatgttcagccggaagaagcagaagatcacctgtag

SEQ ID NO: 118265 - DNA, 1005 bp, synthetic construct
  misc_feature 1..1005: note = Description of Artificial Sequence: Synthetic coding sequence
  source 1..1005: mol_type = other DNA
atgaatactatcctgccatgccaggaccaatacttcgtgggcggacaatcttacaattgtccttactccacgactaccagcgagagctccgttgatgtgtctacagagacttgggtgtcattttgggcagccgggttgctggataatcgtgaactccagcaggcaccgcaggcccaggagtcttttagtgatagcaatttcccactccctgatctgtgcagctgggaagaagcgcagctgtcgtcgcaactctacaggaacaagcaactccaggacaccctcgttcagaaagaggaggaactcgcgcgactgcacgaagagaacaaccacctacgccagtaccttaatagcgctctggtaaagtgcctggaggagaaagccaagaagttgctttcttccgacgaattcagcaaagcttacggcaagtttcgaaagggaaaacgaaagtcgaaagagcagcgctactcccctgccgaaatcccccatcctaaaaacgctaagagaaacctctctagcgaattcgcgaactgtgaggagcaggccggccctcccgtggacccatgggttctccagacactcggcctaaaagacctggacacaatcgacgacactagctccgcaaactatagtgccctcgcgtctcaccctcgccgggtggcaagcacatttagccagttcccagacgatgccgtggactataagaatatccccagagaggatatgcccatcgactacaggggagatcggactacacccctccactcgacagcaacccatggcgaagatttccacattctgtcccaacttagcaatcctcccgtgggcctcaagactttgccctactacacagcccatgtcagccccaataagaccgagatggccttctcgaccagcttgagcccacactgtaacgtgaagactcattctttccaccaggggcaggcattcgttaggagagacgaggaaggtgggtggaaattcacctgggtgcccaagcagagctag

SEQ ID NO: 118266 - DNA, 2727 bp, synthetic construct
  misc_feature 1..2727: note = Description of Artificial Sequence: Synthetic coding sequence
  source 1..2727: mol_type = other DNA
atgggcgtcaacgacctgtggcagatccttgagcccgtgaaacagcatattcctttgagaaatctgggtggcaagactatcgctgtggatctctctttatgggtatgtgaggcacaaactgtgaaaaagatgatggggtcagtgatgaagccacacctgagaaacctcttctttcgcattagctatttaacacaaatggacgtgaagttagtgttcgtgatggagggtgagcctcccaaattaaaagcagatgtcatcagtaaaaggaaccagtctagatacggaagtagcggaaaatcgtggtctcagaagaccggcagaagccactttaaaagtgtcttgcgtgaatgtcttcacatgctggaatgcctgggcatcccatgggtgcaggcggcgggtgaagccgaagctatgtgtgcttaccttaacgccggaggccacgtagatggctgtttgactaacgatggcgataccttcctctacggagcccagaccgtctatagaaatttcactatgaataccaaagatcctcacgtcgattgctatactatgtcgtcaattaagtccaaattaggactggaccgcgacgctttagtgggattggccattcttcttggatgtgactacctgcctaaaggcgttcctggggtcggcaaagagcaagcactgaagctgattcagattctgaaaggtcaaagcttgctccagagattcaacagatggaacgagactagctgcaactcgtctccccagcttctggtcaccaaaaagctggcgcactgcagcgtgtgctcgcatcctggctcccccaaggatcatgaacgcaatggctgtaggctgtgcaagtctgataaatactgcgagccccatgactacgagtattgttgcccttgtgaatggcaccgaacggagcatgatcgccagctttccgaggtggagaataacatcaagaagaaggcctgttgttgtgagggctttccatttcacgaggtgattcaggaatttcttttaaataaggacaaactcgttaaggtgattagataccagcgtcccgatctgctgctatttcagcggttcacactggagaagatggagtggcccaaccactacgcttgcgaaaagctcttggtgctactgacccactacgacatgattgaacgaaagctgggcagccggaatagcaatcagttgcagcccatccggatcgtcaaaaccaggattagaaatggggtccattgctttgaaatcgaatgggaaaaacctgagcactacgcaatggaggataagcagcatggagagtttgctcttctgacgatcgaagaggagtctcttttcgaagcagcctatcctgagatcgtggctgtgtatcaaaagcagaagttagagattaaggggaaaaaacagaaacggatcaagcctaaggaaaataaccttcccgagcctgacgaagtgatgtcatttcagtcccatatgacattaaaaccaacttgtgaaatttttcacaaacagaactcaaagttgaatagtggcatctccccggatcccactctgcctcaggagtccatctctgcaagcttgaattcgctgttgctgcccaaaaatactccctgcctgaacgcccaggaacagtttatgagcagccttcggccgcttgctatccagcagattaaagccgtgtctaagtccctgatatcagagtctagccagcctaatacctcttcccacaatattagtgtcattgctgacttgcatctttctacaatcgactgggaaggcacgtctttctctaactcccccgcgattcagagaaacacgttttcgcacgatctgaaaagcgaagtagagtccgagctgagtgccattccagacgggttcgagaacattcccgaacagttgtcctgcgaaagtgaacggtacactgctaacataaagaaggtcttggacgaggacagcgatggcatctcccccgaagagcatctgctgagcggcatcacagacctgtgcttgcaagatctgccactgaaggagcggattttcaccaagctgtcatatcctcaggataacctacagcccgatgttaacctgaagactttaagtattctcagtgttaaggaaagctgcatagctaatagcggctctgactgtacctcgcacctgtcaaaagatttgccaggaattcccctccaaaacgagtctcgggactccaaaatcctgaagggtgatcagctgcttcaggaggattataaggtcaacacttcagtgccatactccgtgagcaataccgtggtaaaaacttgcaatgtgcgtccccctaacacagcgctggatcacagccgcaaggtcgatatgcagacgactcgtaaaatccttatgaagaagtccgtgtgcctggaccggcactcatctgatgagcagtctgcccccgtctttggtaaggccaagtacaccacgcagaggatgaagcatagttcacagaaacataacagctcccacttcaaggagtccggccataacaaactatctagtccaaagattcacatcaaggaaactgagcaatgcgttcggtcctacgagactgccgagaacgaggagtcctgcttccccgacagtacaaagagttctctgtcttctctgcaatgccataagaaggaaaataatagcggtacctgcctggacagccccttgcctttacgccagcgcctgaagctgcgcttccagagcacctag

SEQ ID NO: 118267 - DNA, 2727 bp, synthetic construct
  misc_feature 1..2727: note = Description of Artificial Sequence: Synthetic coding sequence
  source 1..2727: mol_type = other DNA
atgggggtgaacgacctgtggcagattttggagccagtgaagcagcacatcccgttaagaaatttgggaggaaaaacaatcgcagtggacctgtccttgtgggtgtgtgaggctcagaccgtaaagaaaatgatgggctctgtcatgaagccgcacctgagaaatctattcttccggatctcatacttgacacagatggacgttaaactggtatttgtcatggaaggagaacctccgaagctcaaggccgatgtgatttctaaacgcaatcagtctaggtacgggagttcaggtaaaagctggtctcaaaaaacgggacgctctcattttaagtctgtgcttagagaatgcctgcatatgttggagtgtctggggatcccatgggtgcaagccgccggtgaagcagaggccatgtgtgcttatctaaatgctggcggccatgtggatggctgccttaccaacgacggcgatacattcctttatggcgctcagacagtttacaggaactttactatgaatacaaaagatcctcatgttgactgttatactatgtcaagcatcaagtccaaactcggcctagacagggatgcactggtcgggcttgctatcctcctaggctgcgactatcttcctaagggagtgcctggggtgggcaaggagcaagccctgaagttgattcaaatcctgaaagggcagtctctgttacagcgatttaacagatggaacgagactagctgcaacagctcaccgcaactgttggtgactaagaaactcgctcattgttctgtttgctcacacccagggtcccccaaggatcacgagcgcaatggatgtcggctgtgcaagtcagacaagtattgcgagccccatgattatgagtactgttgtccctgtgagtggcatcggactgagcacgaccgccagctgagcgaggtggaaaataatataaaaaaaaaagcctgctgttgtgaaggattcccctttcatgaagtcatacaagagtttcttctaaacaaggataagttggtgaaagttattcgttaccaaagaccagacctgttactgttccagcgatttaccctggagaaaatggagtggcccaaccactacgcctgtgagaagttgttggtcctgttaacccactacgatatgatagaacgaaaactcggtagccgtaactcaaatcaactgcagccaatccggatcgttaagacccgaattcgaaacggagtacattgtttcgagatcgagtgggaaaaacctgagcactatgctatggaggacaaacagcacggggaatttgcgctactgactattgaggaggagtccctgttcgaggccgcctatcccgaaatcgtggcagtctaccaaaaacagaagctggagatcaagggcaagaaacagaagaggatcaagccaaaggaaaacaatctgccagagcctgatgaggtcatgtcgttccagagccatatgaccctgaagccaacttgtgaaatattccataaacagaattcaaagctgaactcgggaatctcccccgacccaaccctaccccaggagtcaatatccgcgtcactcaacagcctgctcctgccgaagaatactccttgcttgaacgcccaggagcaattcatgtcaagtctcaggccccttgctatccagcagatcaaagcagtcagcaagtccctgataagcgaaagttcgcagcccaacacaagcagtcacaatatcagcgttatcgccgatctccatttgtctacaattgactgggaaggcaccagcttctccaatagtcccgccatccaaagaaatacattctctcatgatcttaaatctgaggtcgagtctgagctcagtgcaattcccgacggattcgagaatatccctgagcaactatcttgcgagtccgagaggtacacagctaacattaagaaggttttagacgaagattctgacggcatcagccctgaggagcacctgctctctggcatcacagatctgtgccttcaagacctcccgctgaaggaaagaatctttacgaaactttcctacccacaggataacctccagcccgacgtgaatctcaaaactctgtccatcctctcagtaaaggagtcatgcatcgccaacagtggatcagactgtaccagtcacttgtcaaaagatttaccaggcataccgctgcaaaacgaaagccgcgattccaaaattctcaagggcgatcagctgctgcaagaagactataaggtgaatacatcagtgccatattccgtgtccaacacagtagtcaaaacatgtaatgttcgccccccgaatacagcccttgatcatagtcgtaaggtcgatatgcagactacgagaaaaatccttatgaaaaagtcagtgtgtttagatagacacagctcggacgagcagtccgcacctgtgttcggcaaggcgaagtatactacccaacggatgaagcactctagtcaaaaacataatagctctcatttcaaggaatctggtcataacaaactatcctctcccaaaattcacattaaagaaacggaacagtgtgttcgttcttatgaaaccgctgagaatgaggagagctgtttcccagactcaacgaaatcgagcctgagctcgctacagtgccataaaaaagagaacaacagcggcacgtgcttggattcccctctccccctgagacagagacttaaattacgcttccagtcaacttag

SEQ ID NO: 118268 - DNA, 381 bp, synthetic construct
  misc_feature 1..381: note = Description of Artificial Sequence: Synthetic coding sequence
  source 1..381: mol_type = other DNA
atgggcgtgaacgatttatggcaaatcctggaacccgttaagcaacatatccccctccgcaacctaggcggcaaaaccattgcggtcgatcttagcctgtgggtgtgcgaagcacagactgtaaagaagatgatgggaagcgtaatgaaaccgcatttgaggaatcttttttttcggatttcgtatttgactcaaatggacgttaaactcgtgttcgtaatggagggagagcccccaaaactgaaagctgacgtcatctctaaaaggaatcaatcccgatacggatcaagcggcaaaagttggtcacaaaaaactgggcggtctcattttaaatcggtgttgagggagtgcctccatatgctcgagtgtctgggaatctag

SEQ ID NO: 118269 - DNA, 282 bp, synthetic construct
  misc_feature 1..282: note = Description of Artificial Sequence: Synthetic coding sequence
  source 1..282: mol_type = other DNA
atgggggtcaatgacctttggcagatacttgaacccgtaaagcagcacattccccttcgcaatctcgggggtaaaaccattgccgtcgacctatctttgtgggtgtgcgaggctcagactgtgaagaagatgatgggttccgtgatgaaaccgcatttgaggaacttgttcttccgaatcagttacctgactcagatggatgtaaagctggtctttgtgatggagggagagccacctaagttgaaggccgatgtcatttctaagcgcaaccagtccagatag

SEQ ID NO: 118270 - DNA, 1431 bp, synthetic construct
  misc_feature 1..1431: note = Description of Artificial Sequence: Synthetic coding sequence
  source 1..1431: mol_type = other DNA
atggagtggcctaatcattacgcatgtgaaaaactccttgtgctgctgacccactacgacatgatcgaacgaaagctcggcagccgtaactccaatcagctgcagccgatcagaattgttaaaactcggatccgaaacggcgtgcactgcttcgagatagaatgggagaaaccagagcactatgccatggaagacaaacagcacggagaatttgccctccttaccatcgaggaggagtctctttttgaggccgcgtaccctgaaatcgtagccgtgtaccagaagcagaagcttgaaattaagggtaaaaaacaaaagagaataaaacccaaggaaaacaacttaccagaaccagacgaggtgatgtcgttccaatcccacatgacactcaaaccaacatgtgaaatctttcacaaacagaacagcaagctcaattccggcatatctccagatcctaccctgccacaggaatccatttctgccagcttgaattcgcttctgcttccaaagaacactccctgcctaaacgcacaggaacagttcatgtcatcacttcgtcctctcgctatacagcaaattaaagccgtgtctaaatccttgatcagcgaaagttcccaaccgaatacatctagccacaatattagcgttatcgccgaccttcatctttcgactatcgattgggaaggcacatcgttcagtaattctccggcaatccagaggaatacattcagtcacgatctaaagagcgaggttgagagtgagctgtccgcgattcctgacggcttcgaaaacatcccagaacagctgtcctgtgaatccgaacgctacaccgcaaacattaagaaagtgttggacgaagattccgatggaatctctcccgaagagcacttattgagtggtatcaccgacttgtgtttgcaggacctgcccttaaaagagcggattttcactaaattatcgtaccctcaagataatctccagccagatgttaacctaaaaacgctgagcattctaagtgtaaaggagtcgtgtatcgccaacagtggaagtgactgcacttcccacctgtcaaaggacctcccaggtatcccgctgcagaatgagtcaagggacagcaaaatccttaagggggatcaattactgcaggaggattacaaggttaatacatcagtcccttactcagtttcaaacaccgtcgtaaagacttgtaacgtcaggcccccaaacacagcccttgatcactctcggaaagtggatatgcagacgaccaggaaaattctaatgaaaaagagtgtgtgtcttgataggcattccagtgatgaacagagcgcacctgtgttcggcaaagcaaaatacacgacacagagaatgaaacactctagccaaaaacacaattcaagccacttcaaagaatcagggcataacgaatag

SEQ ID NO: 118271 - DNA, 1437 bp, synthetic construct
  misc_feature 1..1437: note = Description of Artificial Sequence: Synthetic coding sequence
  source 1..1437: mol_type = other DNA
atggcatgcttaaatcccgttcccaaattgtacaggagtgttattgaagatgtgatcgaaggggtaagaaacctgttcgccgaggagggaattgaggagcaggtgttaaaggacctgaaacagctatgggaaaccaaggtcctgcagtccaaggccaccgaggacttttttcgcaacagtatacagtcaccattgtttaccctccaacttccccactctctccatcagacccttcagagctccacggcttccctagtgatccccgcggggcgcacactcccaagctttaccactgctgagctcggcaccagcaattccagtgcaaatttcacattcccgggctatccaatccatgtaccagctggcgtcacactccagacagtgagcggccacttatacaaggtaaatgttcctatcatggtaaccgaaacaagcggccgcgccgggatactccaacatccaatccagcaagtcttccagcagctgggtcagccatcagtgattcagaccagcgtgccgcagctgaacccttggagccttcaggccaccaccgaaaagagccagcggatagaaaccgttctccagcagcctgccatccttcctagcggacccgtggatcggaagcatctcgagaatgccacatccgacatcctggtcagtccaggaaatgaacataagattgtccctgaagcgctactctgccaccaagagtcttcccattacattagtctgcctggggtcgtattctccccccaagtgagccaaactaactctaatgtggagtcggtactaagcggctccgcctccatggctcagaacctccacgacgagtctttgagcacctcgccacacggggccctccaccaacacgttacagatattcagctccacattctgaagaataggatgtatggctgtgactctgtgaaacagcctcgcaatattgaagagccttctaatattccagtctcagagaaagactcaaactcccaggtggatcttagtatacgggtaaccgacgatgacattggcgaaattatccaggtcgatggcagcggtgacactagctctaatgaagaaatcgggtccacaagagacgccgatgagaatgaatttttgggaaatatcgacggcggcgatctcaaagtgccagaggaagaagccgatagcattagcaatgaagattctgctaccaactcatccgataacgaagaccctcaagtgaacatcgtggaagaggacccactgaacagcggggacgatgtaagtgaacaggacgtgcctgacctctttgatacggacaatgtgattgtatgccagtatgataagatccacaggtccaagaataagtggaagttctacctcaaggatggagtgatgtgtttcggcgggcgagactacgtctttgccaaggccatcggcgacgccgaatggtag

SEQ ID NO: 118272 - DNA, 1335 bp, synthetic construct
  misc_feature 1..1335: note = Description of Artificial Sequence: Synthetic coding sequence
  source 1..1335: mol_type = other DNA
atggcttgcctaaatccggttctgtgggaaacgaaagttctccagtctaaagcaacagaagacttttttcggaactccattcagagcccccttttcacgctgcagctccctcactctcttcaccagactctgcagagcagtacggcctcgctcgtgataccggcaggcagaacattgccttcctttactactgcagaactcgggacctcaaatagtagtgccaatttcaccttcccaggctatccaattcatgtgccagccggtgttacactgcagacagtcagcggccatctatataaggtcaatgtgcctataatggtgactgaaacctccggccgggcaggcatacttcagcacccgattcagcaggttttccagcagctggggcagccaagcgtgatccagacgagcgtccctcagctcaatccgtggtcattgcaggcgactactgaaaagtcacaacggatagagaccgtgttgcagcagccggcgatccttccatccggacctgtggaccggaaacacctagaaaacgctaccagtgatatcctggtatcgcctggcaatgagcacaaaatcgtgcccgaggccctgctctgccatcaggagagctcccactatatctccttgccgggagttgtcttctctcctcaggtgagtcaaacaaactctaacgttgaaagcgtgcttagcggatccgcgagcatggcccaaaacttgcatgatgaatctctctcaacctccccacacggcgcccttcatcaacatgtgaccgacattcagcttcatattttgaaaaaccgtatgtatgggtgtgactcagtcaaacagcccagaaacattgaggagcctagtaacatacccgttagtgaaaaggactctaactcacaagtggatctgtcaataagggtaacagacgacgacatcggggaaattattcaggtggacggcagcggagatacctcatccaatgaagaaataggcagcactcgggatgccgatgaaaatgaattcctcggcaatatcgatgggggggatctgaaagtgcctgaggaagaagctgatagtatttcgaatgaagattctgccacaaacagtagcgataacgaggatccccaggtgaacattgtcgaggaagatcccttgaactcaggggacgatgtttctgagcaggatgtccccgatctcttcgacactgataatgttatcgtgtgccagtacgataaaatccacaggagtaagaacaaatggaagttttacctgaaggacggggttatgtgtttcggtggaagagattatgtctttgccaaggcaattggtgacgctgaatggtag

SEQ ID NO: 118273 - DNA, 951 bp, synthetic construct
  misc_feature 1..951: note = Description of Artificial Sequence: Synthetic coding sequence
  source 1..951: mol_type = other DNA
atggcaagtacatcccgcctcgacgcccttcccagggtgacctgtccaaaccatcccgacgctatcctggtggaggactaccgggcaggagatatgatatgtccagagtgcgggctcgtggtgggagacagagtgattgatgttgggtctgaatggaggaccttttccaacgacaaagctacaaaggatccttcaagggtcggggactcacagaatccgctcctttcagatggcgatttgtccacaatgataggcaaaggaacgggtgcggcttctttcgatgagtttggtaattccaagtatcaaaatcgacggaccatgtcttcctctgatagggcaatgatgaatgccttcaaagaaatcacaaccatggctgacaggataaacctccctcgaaatatcgtcgaccgtacaaataacctgttcaagcaagtttacgagcagaagtcccttaagggccgggccaacgatgcaattgcctctgcctgcctgtacatcgcatgtcggcaggagggtgtgcctagaaccttcaaagaaatctgcgccgttagtcggataagtaaaaaggaaatagggcggtgcttcaagctcatacttaaggcactagaaactagcgtggacctgattactaccggggacttcatgtcgagattttgtagcaacctctgtctgccaaagcaagtccaaatggctgccacgcatatcgctcggaaggccgtcgagttggatctggtgcctggacgttcacccatatcagttgctgcggcagctatctatatggcttcccaggccagcgccgagaaaaggacacagaaagagatcggtgacatcgccggggtcgcagatgtgactattcgccagagctaccggctcatttatccacgcgctccggacctctttccaactgacttcaaatttgatacacctgtcgataaattacctcaactgtag

SEQ ID NO: 118274 - DNA, 696 bp, synthetic construct
  misc_feature 1..696: note = Description of Artificial Sequence: Synthetic coding sequence
  source 1..696: mol_type = other DNA
atggccagtacctctcgccttgatgctctgccccgcgtgacctgtcctaaccaccctgacgccatcctcgttgaagactatagagcaggagatatgatctgcccagagtgtgatagggtgatcgacgtggggtccgaatggcggactttttctaatgataaagcaacgaaggacccaagcagggtgggggatagccagaatcccctgctgtccgatggagacctctcgacgatgatagggaagggcacgggcgcagctagtttcgatgagtttggcaactcgaagtatcagaacaggagaactatgtcaagctcagaccgggccatgatgaatgcctttaaggaaattacaaccatggctgatcgaatcaatctaccgaggaacatcgtcgatcggacaaataacctgttcaagcaggtgtacgagcagaaatctttgaaagggagggcaaatgacgctatcgccagcgcctgcctgtacatcgcctgcaggcaggaaggcgtccctcgaactttcaaagagatttgtgccgtgtcccgcatatccaagaaggagatcgggaggtgctttaagctcattctgaaagctttagagacttcagttgacctcatcacaactggggacttcatgagtagattctgttcaaatctgtgcctgcccaagcaggtgcagatggctgcaactcacatcgcctag

SEQ ID NO: 118275 - DNA, 675 bp, synthetic construct
  misc_feature 1..675: note = Description of Artificial Sequence: Synthetic coding sequence
  source 1..675: mol_type = other DNA
gcctccacatccagactcgacgccctgcctagagttacctgtcctaatcatcctgatgctatcctcgtggaagattacagggctggcgatatgatatgccccgagtgtggactagtagttggtgatagggtgatcgacgtgggatcagagtggagaaccttttcaaacgataaggccacaaaggacccatcacgggtgggcgattcccaaaaccctctgctcagcgacggagatcttagtacgatgatcggaaaaggcaccggtgccgcgtctttcgacgagtttggcaatagcaagtatcagaaccggagaactatgtcttcatctgaccgggccatgatgaacgcattcaaagagatcacaaccatggccgacagaatcaatctgccgcgaaacatagtcgataggacaaataacctgttcaaacaggtttatgagcagaagagcttaaaagggagggctaatgacgctattgctagcgcctgcctgtatatagcctgccgccaggaaggggtacctcggacattcaaggagatctgcgctgtcagtcggatttcaaaaaaggagattggaaggtgctttaagctgatcctgaaggccttagagacctcggtcgatttgatcactaccggcgatttcatgtcacggaactggcggtactgctggtgttgctag

SEQ ID NO: 118276 - DNA, 876 bp, synthetic construct
  misc_feature 1..876: note = Description of Artificial Sequence: Synthetic coding sequence
  source 1..876: mol_type = other DNA
atggacccatctcttttgagggagcgagagctgttcaagaaacgggcgctctcaacacctgtcgtggagaagaggtcagcctcctctgagagtagtagttcttccagcaaaaaaaaaaagacaaaggtcgagcatgggggcagtagcggctctaaacagaactcagaccacagtaacgggagtttcaacctgaaggctctcagcggtagctccggatacaaattcggcgttctggcgaaaattgtgaactatatgaaaacacggcatcagcgaggagatacacacccgctgactctagatgagatcctggatgaaacccagcatttggatattggcttgaagcaaaagcagtggctgatgactgaagccctagttaacaatcccaaaatcgaggtgattgatggaaaatacgcgtttaaacctaaatacaatgttagggacaagaaagcactcctgcggctgctggatcaacatgaccaacgtggtttggggggaattctcctggaagatatcgaggaagcactgccgaatagtcagaaggcggtgaaggccctcggagaccagatcttgtttgtcaatcgccccgacaagaaaaaaattctgttctttaacgacaagtcgtgccagttcagcgtcgatgaggagttccagaaactgtggcgctctgttaccgtggattccatggacgaggaaaaaatcgaggagtatttgaaacgccagggcatctcctctatgcaggagtctggaccaaagaaggtagcacccatacagcgccggaaaaagcccgcatctcagaagaagcggagattcaagacacacaatgagcacttggctggcgtgttgaaggattactcggatatcacatcctccaagtag

SEQ ID NO: 118277 - DNA, 381 bp, synthetic construct
  misc_feature 1..381: note = Description of Artificial Sequence: Synthetic coding sequence
  source 1..381: mol_type = other DNA
atggacccttccctgctgcgggagcgggaattatttaagaagcgtgcactgtcaacccccgtggtagaaaaaagaagcgcttccagcgagtcctcctcctcgtcttccaagaaaaaaaagactaaagtcgaacatggcggctccagcggatcaaaacagaattctgaccattcaaatggcagtttcaacctcaaagctttatccggctcatctggctacaagtttggtgttctggcaaagatcgttaattatatgaaaacacggcatcagcgcggtgatacccaccccctgactttggatgaaatcctcgacgagacacaacatctggacatcggtttgaaacagaaacagtggttgatgacagaggcactcgtgaactag

SEQ ID NO: 118278 - DNA, 597 bp, synthetic construct
  misc_feature 1..597: note = Description of Artificial Sequence: Synthetic coding sequence
  source 1..597: mol_type = other DNA
atggaccctagcctgctgcgggaaagggaactcttcaaaaaaagggccctgtccacaccggtcgttgagaagcggagtgcaagttctgagtccagttcttcatccagcaagaaaaaaaagaccaaagtcgagcacggggggtcttccggaagtaaacagaatagcgaccactcaaatgggtcctttaacctgaaagccctgagcgggtccagcggctataagttcggcgtgctggccaagatagtcaactacatgaagaccaggcaccagagaggagacacccaccctttaacactcgacgaaatcctagacgagactcagcatctagacatcggcctaaagcaaaagcagtggctaatgacggaggccctcgtgaacaaccctaagatcgaggtgattgacggcaagtacgccttcaaacctaagtacaacgtgcgcgataaaaaggctctgcttaggcttttagaccagcacgatcagagaggactgggaggaatactgttggaggatatcgaggaagccctgcccaattctcagaaagccgtgaaggccctaggtgatcagatactgttcgtcaatcggcccgataagaaatag

SEQ ID NO: 118279 - DNA, 1554 bp, synthetic construct
  misc_feature 1..1554: note = Description of Artificial Sequence: Synthetic coding sequence
  source 1..1554: mol_type = other DNA
atggccgccctggggccttccagccaaaacgtgacagagtacgtggtacgagtgcctaagaatacaaccaagaagtacaatatcatggccttcaacgcggctgacaaggtgaatttcgccacatggaatcaagcgaggcttgaaagggatctgagcaacaagaaaatctatcaagaagaagaaatgccggagagcggcgccggatcggagtttaacaggaaactgcgggaagaggccagacgcaaaaagtatggaatagtgctcaaagaatttaggcccgaggatcaaccctggctgctcagggtcaatgggaagtcgggccgaaagtttaagggcattaagaagggcggcgtcaccgaaaacactagctattacatctttactcagtgccctgatggggccttcgaagctttccccgtgcacaactggtacaacttcacgcctttggcgagacatcggaccctgaccgcagaggaagcagaagaggaatgggagagaagaaataaagtcctgaaccatttctccattatgcagcagcggcgcctgaaagatcaagaccaggatgaagacgaggaagaaaaggaaaagcggggacggaggaaagctagtgaactgagaatccatgatctcgaagacgatctggaaatgtcttctgatgctagcgatgcatcaggagaagaaggaggacgggtacctaaagccaaaaagaaggcccctttggccaaaggcggacgaaaaaagaagaagaagaaggggtcagacgacgaggcatttgaagacagcgacgatggcgatttcgaaggtcaagaggtagactacatgtccgatggctcatctagcagccaggaggaacctgaatctaaagccaaggctccgcagcaggaagagggccctaaaggcgtggatgagcagtctgatagtagcgaggagagtgaagaggagaagcctccagaagaagacaaggaagaggaagaagagaagaaagcccccacacctcaagagaaaaaaagacgtaaagattcctcagaagaatccgacagcagtgaagagtcagacatcgactccgaagcaagctcagcactgttcatggccaaaaagaagaccccacctaagcgggagcgtaaaccctccggcgggtcatctcgggggaatagcaggccggggactccctcggcggaaggcggttccaccagtagcaccctgcgggctgccgcctctaagctagagcagggcaaacgggtttcagaaatgccagcagccaagcggctccggctggatactggaccccagtcattatcggggaaatccacacctcagcccccctctggaaaaactaccccaaattctggagatgttcaagtaactgaggacgcggttagaaggtatctgactcgtaaacccatgacgacgaaggacctgctaaagaaattccaaactaagaaaacgggcctgtcaagcgagcagactgtgaatgtactggcacagattttgaagcggttgaatccagaaagaaagatgattaatgacaaaatgcatttcagtctgaaagagtag

SEQ ID NO: 118280 - DNA, 1299 bp, synthetic construct
  misc_feature 1..1299: note = Description of Artificial Sequence: Synthetic coding sequence
  source 1..1299: mol_type = other DNA
atggccttcaatgccgcagacaaagtaaacttcgctacttggaatcaggccagactcgaaagagacctttcaaataaaaaaatataccaggaggaggagatgccggaatctggcgctggcagtgaatttaatagaaagctgagggaggaggcccggcggaagaaatatggcattgtcctgaaggagtttagacctgaggaccagccatggctgcttcgggtgaatggtaagtctggacgcaagcgaaacaaggtgctgaatcacttctcaattatgcagcagaggagactcaaagaccaggaccaggatgaagatgaagaagaaaaagaaaagcgcggacggagaaaagcgagcgaactacgcatacacgaccttgaagacgacttggaaatgtcctctgacgccagcgatgctagtggggaagagggcggacgggttccaaaggcgaaaaagaaagccccactagctaaagggggacgaaagaaaaaaaagaagaaaggttctgacgatgaagcgttcgaggacagcgacgacggtgatttcgaaggtcaagaggtggattacatgagcgatggctcatctagcagtcaggaggagcccgagagcaaggccaaggcaccacagcaggaggagggaccaaaaggcgtggacgagcagtctgattcttctgaagaaagcgaggaggagaagcccccagaagaggacaaggaggaggaggaagagaaaaaggcccccactccgcaagagaagaagagacggaaggattcttccgaagaaagtgacagttccgaggaatccgacattgatagcgaggcaagctctgcactgtttatggctaagaagaagacaccacctaagagagagcgaaagccgtctggcgggtcctcaaggggaaactcacggcccggaactccaagcgccgagggggggtccaccagctccactctgcgagcagcagcctctaagcttgagcaagggaaaagagtgtcagagatgcccgccgctaaaaggctccgccttgatacggggcctcagtccctatcgggcaaaagcacgcctcagccaccttcaggaaagacaacacctaacagtggggatgtgcaggtcacagaggacgcagtgcgacggtacttgaccaggaaacctatgaccaccaaagaccttctaaagaaattccagaccaaaaagaccgggctcagctcagaacagactgttaacgttctggcccagatactgaagaggctgaacccagagagaaagatgattaatgataagatgcatttttcattgaaggaatag

SEQ ID NO: 118281 - DNA, 384 bp, synthetic construct
  misc_feature 1..384: note = Description of Artificial Sequence: Synthetic coding sequence
  source 1..384: mol_type = other DNA
atggcagccctaggtccttcatctcagaatgtgactgagtacgtggttagagtacccaaaaacactacaaaaaagtacaacatcatggccttcaacgccgccgataaagtcaacttcgcaacatggaatcaggcgcggctcgagcgcgatctaagcaataagaaaatctatcaggaagaagagatgcctgaaagtggagctggctcagagttcaacaggaaactgagagaagaagcaaggcggaagaaatacggaattgtcttgaaggagttccgtcctgaggatcaaccctggctgctacgggtgaatggcaagtcaggcaggaagttcaaagggattaagaaggggggggttactgagaacaccagctactatatcttctag

SEQ ID NO: 118282 - DNA, 1647 bp, synthetic construct
  misc_feature 1..1647: note = Description of Artificial Sequence: Synthetic coding sequence
  source 1..1647: mol_type = other DNA
atggcaacatcgtctgaggaggtgctgctgatagtcaaaaaagtccgccagaagaagcaggacggggctctgtacttaatggcggagcggatagcgtgggccccagaaggtaaagataggtttactatctcacacatgtatgccgatatcaagtgtcaaaagatctctccagaaggcaaggcaaaaattcaactgcagcttgtgctgcacgctggcgacacaacaaacttccatttttcaaatgaatcaacagcagtgaaggagcgcgatgctgtcaaggacctgctgcagcaacttctgcccaagtttaaaagaaaggctaataaggagctcgaagagaagaatcgaatgttacaagaggatcccgttctattccagctatacaaggacttggtcgtttcccaggtcatctctgccgaggagttctgggcaaaccgactcaatgttaacgctactgactcttcctccactagtaaccataagcaggatgtgggtatctctgccgcgttcttggctgatgtgcgacctcagaccgatggatgtaatggcctcagatataacttgacctctgatattatcgaatccatttttagaacctaccctgctgttaaaatgaaatacgccgagaatgttccccataacatgactgagaaggagttttggactaggttttttcagagtcattattttcacagagaccgcttgaatacaggttccaaggatctcttcgcagaatgtgctaagatcgacgagaaaggccttaagactatggtctcgctgggcgtcaaaaatccgttgctagatctgaccgccttagaggacaagcccctcgatgaaggatatggaatctcctctgtgccgagtgctagcaactctaagtcaatcaaagaaaatagtaacgccgccattatcaagagatttaaccaccactccgccatggtgctggccgcgggcttaagaaagcaggaagctcagaatgagcagacctctgagccaagcaacatggacggtaatagtggcgacgccgactgtttccagccggccgtgaagagagcaaagctgcaggagagtatcgagtatgaggatctgggcaagaacaattctgtcaagaccatcgccctaaatctgaaaaagtcagacagatactatcatgggcctactccgattcagtctctgcaatacgctacatcccaggacatcataaacagctttcagagcatccgacaagaaatggaggcatataccccaaaacttactcaagtgctgagttcatccgctgcttcttccacgattaccgccctttcacccggtggggctctgatgcaagggggaacacaacaggccattaatcaaatggtccccaacgacattcaatccgagctgaaacacttgtatgttgctgttggcgagctgctgagacacttttggtcttgtttcccagtcaacacgccattcctggaggagaaagtggttaaaatgaagtctaacctggagcgtttccaggtaactaagctgtgtcctttccaagaaaaaatcaggagacagtacttaagtactaatctcgtgagtcacattgaagaaatgctccaaacagcctacaataagctccatacgtggcaatctaggaggctcatgaagaagacatag

SEQ ID NO: 118283 - DNA, 1647 bp, synthetic construct
  misc_feature 1..1647: note = Description of Artificial Sequence: Synthetic coding sequence
  source 1..1647: mol_type = other DNA
atggcaacttcttcagaggaggtgctgttgatagtgaaaaaagtgcgccaaaagaagcaagacggtgcgctttatttgatggccgagcggatcgcttgggctcctgagggaaaagaccgcttcacaatttcacatatgtacgctgatatcaaatgccagaagatctcacctgaagggaaagccaaaatccagttgcaactcgttttgcacgctggtgacacgacaaactttcacttttcgaacgagtcaactgccgttaaggagcgtgatgctgtcaaagacctcctgcaacagctcctaccgaagttcaagcgcaaagccaacaaggagctcgaagaaaagaaccgaatgctgcaggaggatccagtcctttttcagctgtacaaggatctcgttgtaagtcaggtgattagtgcagaagaattttgggccaatcggttgaacgtcaacgccacagactcttcaagtactagcaatcataagcaggacgtggggatcagtgcagccttcctcgcagatgttaggccccaaaccgacggctgcaatggactgcgctataatctgacttcagatatcatcgaaagcattttcaggacttatccagcagtgaagatgaagtatgccgaaaacgtgccgcacaacatgacagaaaaggagttctggaccaggttctttcaatcgcactattttcaccgcgacagactgaacacaggatccaaggacttgtttgcagaatgtgccaagatcgatgagaagggactgaaaaccatggtttcactgggagtgaaaaacccgctccttgatctgaccgcactagaagataaacctctggacgaagggtacggcataagttcagtacccagtgcctccaactcaaaatctataaaagaaaatagtaatgccgcaatcattaaaagattcaaccatcactccgcaatggtactggcggcagggctgcgaaagcaggaggcacaaaacgaacagaccagtgaaccttccaatatggatggtaatagcggcgatgcagattgcttccagcctgctgttaagagagcaaagctgcaggagtctattgaatatgaagacctaggcaaaaacaactccgtgaagacgatcgcccttaatctcaaaaagtccgaccgatattatcatggccctacgcccatccagtcactccagtatgccacctctcaggatatcatcaattctttccaaagcatacgccaggagatggaggcttatacacccaaattgacccaggtcctctcttcttctgccgcctcctctaccatcaccgcactttcaccaggcggtgcactcatgcaagggggcacacagcaggccattaaccagatggtcccaaatgacattcagagcgagttgaagcacctctatgtagccgtgggtgaattactgaggcacttttggtcatgttttcccgttaacaccccattcctagaggaaaaggtcgtcaaaatgaaatctaatctggaacgctttcaggtcaccaaattatgcccttttcaagagaagatcaggcggcagtacctctctactaacctcgtgtcacatatcgaagaaatgctccagacagcctacaataaactgcacacatggcaatccaggaggctgatgaagaaaacatag

SEQ ID NO: 118284 - DNA, 288 bp, synthetic construct
  misc_feature 1..288: note = Description of Artificial Sequence: Synthetic coding sequence
  source 1..288: mol_type = other DNA
atggccactagctccgaggaagtactgcttattgtgaagaaggtgcgccaaaaaaagcaggacggggccttataccttatggcagaacgaatcgcctgggccccagagggcaaagaccgcttcacaattagtcacatgtacgccgacataaagtgccagaaaatctcccccgaaggaaaagcgaaaattcaattgcagctcgtcctgcatgccggcgacacgactaacttccactttagcaacgagtccaccgcagttaaagagcgagatgctgtaaaggatctgtag

SEQ ID NO: 118285 - DNA, 1299 bp, synthetic construct
  misc_feature 1..1299: note = Description of Artificial Sequence: Synthetic coding sequence
  source 1..1299: mol_type = other DNA
atgctgcaggaggaccctgttctgttccagctgtataaggatctggtagtcagtcaagttatttccgcagaggaattctgggccaatcgcctaaatgtgaatgccacagattcttcttcaacgtctaatcacaagcaagacgtgggcataagcgctgccttcttggccgatgtaagaccccagacagatggctgcaacgggcttagatacaatttgacaagcgatatcatcgagagcatctttcgaacttacccagccgtgaagatgaagtatgccgaaaacgtgccacacaacatgactgaaaaggagttttggacaagattcttccagagtcactattttcacagagacaggctcaatacaggatcgaaagacttgtttgccgagtgcgcgaaaattgatgagaagggccttaaaaccatggttagtctgggcgtgaagaaccctttactcgacctcacggcattggaggataaacccctggacgaaggttacggtatctcctccgttccgtcagcctctaactccaaaagcattaaagagaactcgaatgccgcgatcattaaacgcttcaatcatcacagtgccatggtcctggcagctggtcttcgaaagcaggaggctcagaacgagcaaacttcagagcccagtaacatggatggaaattctggcgatgcagattgcttccaaccagctgtgaagcgtgcaaaactgcaggagtcaatagaatacgaggatctcgggaagaataactcagtaaagactattgccttaaacctcaagaagagtgatcggtactaccacggtccgacccctatacagagcctccagtacgcaacgtcccaggacataattaacagcttccagtcgattcggcaagagatggaagcctacacacctaagcttactcaggtgctgtcatcatccgccgccagtagtaccatcacagccttatctcctggtggcgctctgatgcaagggggtacgcaacaggctatcaaccagatggtgccgaatgacatacagtctgaactgaaacacttgtacgtcgctgtaggcgaactcctgcgccatttctggtcctgtttcccggtaaacactccctttctcgaggagaaggttgtgaagatgaagagcaatctggaacgtttccaggtgaccaagttgtgtccttttcaagaaaagattcgccggcagtatttatcaacaaaccttgtttcccacatcgaagaaatgttacagaccgcttacaacaagctgcatacttggcaaagcagacgcctgatgaaaaagacatag

SEQ ID NO: 118286 - DNA, 1188 bp, synthetic construct
  misc_feature 1..1188: note = Description of Artificial Sequence: Synthetic coding sequence
  source 1..1188: mol_type = other DNA
atggatgaagaaccagaaagaaccaagcggtgggagggcggctatgaaaggacatgggaaattctgaaggaagacgagagcggatctttaaaagcgaccatagaagatatactgtttaaggccaagagaaaacgcgtcttcgaacatcatggacaagttcgccttgggatgatgagacacctttacgtagtggtggatggatcaagaacaatggaggaccaggatctgaaacctaatcggctgacttgcacgttaaagcttctcgagtactttgttgaggaatacttcgatcaaaacccgattagccagataggcataattgtgacgaaatctaagagagcagagaagctgaccgaactgtcgggcaacccgaggaaacacataacgtcgcttaagaaggccgtagacatgacctgtcacggcgaacccagcttgtataacagtctgtctatcgccatgcagacactgaagcacatgcccggacacactagcagagaggtgctaatcattttttctagcctcacaacgtgcgatccctctaacatctatgacctgatcaaaacccttaaagcggcaaaaattagagtgtcagtgataggactgagtgcagaggtgagggtgtgcacagtgctagctcgggagacaggtggcacgtatcatgttatcttggatgagagtcattataaagaactgctcacccatcatgtgagtcctcctcctgctagtagctcctctgagtgcagcctgataagaatgggattcccacaacatactattgcatccctgagcgaccaggacgcgaagccatcattcagtatggcccacctggacggtaatacggagcctggactgacattggggggttatttttgcccgcagtgccgggccaagtattgcgaactgcctgtggagtgtaagatctgtggattgaccctggtcagcgcccctcacctggctaggagctatcaccatttgtttcccttggacgcgtttcaggaaatcccgctggaagagtataatggggaacggttctgctacggctgccaaggtgagttgaaggatcaacatgtatacgtctgtgctgtttgccaaaatgtcttttgtgtagattgcgacgtattcgtgcacgattctcttcactgctgtcccgggtgtattcacaagataccggcaccttccggagtatag

SEQ ID NO: 118287 - DNA, 1188 bp, synthetic construct
  misc_feature 1..1188: note = Description of Artificial Sequence: Synthetic coding sequence
  source 1..1188: mol_type = other DNA
atggacgaagaacctgaaaggacaaagcggtgggagggcggttatgaaagaacatgggaaattcttaaagaggacgaatccggtagcctgaaggcaactattgaagatattctgttcaaagcgaaaagaaagcgagtcttcgaacatcacggacaggtgagactcggtatgatgcgccacttgtacgtggttgtggatggatcccgaaccatggaagaccaggatcttaagcctaaccgattgacatgtaccctaaaactgctggagtattttgtcgaagagtacttcgaccagaatcccatctcacagattggaatcatcgtgactaagtcgaagcgggccgagaaactgaccgagctatccggcaatcctcgcaaacacattacttccttaaagaaggccgtggacatgacctgccacggtgagccttcactatacaactccctgtctattgcaatgcagacacttaagcacatgcccggacacactagtagagaagtcctcattatcttctcaagtttgacaacttgtgatccttccaacatttatgacttaattaagaccctgaaggccgccaagattcgggtaagcgtgattggactctcggccgaggtaagagtgtgcacagtgttagcccgggaaacgggaggaacctaccatgtcatcctcgacgagtctcattacaaagagttattgacccaccatgtgagcccgccccccgcttccagctcctcagaatgttccttaatccgcatgggcttcccccaacataccatcgccagtctctcagatcaagacgcaaagcccagcttctccatggcacatctggatggcaataccgaacccggcctgaccctgggcgggtatttctgcccacagtgtagggccaaatattgtgaactcccagtcgaatgtaaaatctgcggcctaacgctggtgtccgcgcctcacttagcccggtcctaccaccacctatttcccctagacgcatttcaagaaattcccctggaggaatacaatggtgaaaggttctgttacgggtgccagggggaactgaaggaccagcatgtttacgtctgcgccgtttgccaaaacgtgttctgcgtggactgcgatgtgttcgtacacgattcactgcattgttgccccggttgtattcataagatccccgcacctagcggggtatag

SEQ ID NO: 118288 - DNA, 1017 bp, synthetic construct
  misc_feature 1..1017: note = Description of Artificial Sequence: Synthetic coding sequence
  source 1..1017: mol_type = other DNA
atgaggcatctctatgtggtggtggacggatctagaacgatggaggaccaagatctgaagccgaaccgcctgacatgcactttgaaactcctggaatatttcgtagaagagtacttcgaccagaatccgatctcgcagattggcatcattgtgactaagtccaagcgagctgagaaattgactgaactcagcggaaacccacgaaagcacataactagcctcaagaaggcagtcgatatgacttgccacggcgaaccttccctttacaattctctgagcattgccatgcagacgcttaagcatatgccagggcataccagtagagaagttctgataatattctcctcattgaccacttgcgacccgtctaatatctacgatttaatcaagacactgaaagccgccaagatacgcgtgtctgtcataggactttctgccgaagtgagggtatgcactgtcctagcaagggagacaggaggcacctatcatgtgattctggacgaatcgcactacaaagagctcctaacgcaccacgtgagccccccgccagcttcttctagcagcgagtgcagcctgattcgtatggggtttccacagcacacgatcgcttccctctctgaccaggacgctaaaccctcttttagcatggctcatctggacgggaatactgaaccaggcctcaccctgggggggtatttttgccctcaatgtagagcaaagtactgcgagctgcccgttgagtgcaagatatgcggcctaacccttgtctctgccccccacctagctcgcagttaccaccacctgttcccactcgacgcgttccaagagataccactcgaagagtataatggagagcgtttctgttacggctgtcagggggaactcaaggaccagcacgtgtacgtctgcgcagtgtgccaaaatgtcttttgtgtcgactgcgacgtgttcgtgcatgactcactgcactgttgtcctggttgtatccataagatccccgcgccatctggggtgtag

SEQ ID NO: 118289 - DNA, 1188 bp, synthetic construct
  misc_feature 1..1188: note = Description of Artificial Sequence: Synthetic coding sequence
  source 1..1188: mol_type = other DNA
atggacgaggagcccgagcgaaccaagcgatgggaaggtggttatgaacgcacttgggagatcttaaaggaggacgagtccggcagtctgaaggctaccatcgaggacatcctgtttaaagccaagcggaagcgcgttttcgaacaccatggacaggtgcgtcttgggatgatgcggcacctgtacgtcgtggtggatgggtcacgtaccatggaggaccaagaccttaagccaaaccgactaacatgcacactcaaactcttggaatactttgtggaggagtatttcgatcagaatccaatctcacagattgggattattgttacaaagtcaaagcgggcggagaagctgaccgagctatccggcaatccacggaagcacatcacatcgctgaaaaaggcagtcgatatgacctgccacggtgaacccagtctgtacaactccctttctattgctatgcagacgcttaagcacatgccaggacatacttccagagaggtgctgattatcttttcctcactgaccacttgtgacccatcaaacatctatgatctaatcaagaccttaaaagctgccaaaatccgggtgagtgtgattggcctcagcgctgaagtgcgtgtgtgcaccgtgctggctcgtgaaaccggtggcacatatcacgtcattctcgacgagtcacactacaaggagctgctcacgcatcatgtgtctccaccacctgcatcatcatcatccgagtgttcccttattaggatgggatttccacagcacaccatcgccagtctgtcagatcaagatgctaaaccttcattctcgatggctcatctggacggaaataccgaacctggtttaacactgggtggctatttttgcccacaatgcagggccaagtattgcgaactgcctgtggaatgcaagatctgcggactcacactggtctctgccccacatctggcgagatcctatcaccatttatttccactggacgcattccaggagatccccctggaagagtacaatggagaacgtttctgctatggatgccagggggagctgaaagatcagcatgtttatgtgtgtgcagtctgtcaaaacgttttctgtgtggattgcgatgtcttcgttcacgattccctccactgctgtcccggctgcatccacaagattcctgctccctccggagtatag

SEQ ID NO: 118290 - DNA, 1389 bp, synthetic construct
  misc_feature 1..1389: note = Description of Artificial Sequence: Synthetic coding sequence
  source 1..1389: mol_type = other DNA
atggagtcgaccccatccagggggctgaatagggtccaccttcaatgcaggaacctgcaggaattcctgggcgggctaagtcctggcgtcttggatagactatacggacatcctgctacttgtctggctgttttccgcgaacttccaagcctggccaagaactgggttatgagaatgctcttcctggagcagccattaccgcaagccgccgtggcactgtgggtgaagaaggaattctctaaggcccaggaggagtctacaggcctgctcagtggtttgaggatctggcacacccagctgctgcccggggggctgcaggggctcattcttaatcctattttccggcaaaatctgaggatagctttgctggggggcggaaaggcgtggagtgacgatacttcccagttgggaccggacaagcacgcccgagacgttccgtcacttgacaagtacgccgaggaaagatgggaggtggtgttgcattttatggttggctctcccagcgccgctgtatcccaggaccttgcacaactactgtcgcaagcggggctcatgaagtctacagagcccggggagcccccttgtattacgagcgctggcttccagttcctgctcttagacacacctgcacagctctggtatttcatgctgcagtacctgcaaaccgctcagagccgtgggatggatctggtggaaatcttgtccttcctttttcagttgtccttcagcactctgggcaaggactatagcgtcgaaggcatgagcgactccctattaaactttctgcaacacctcagagagttcggactcgtttttcagagaaaaagaaaatcccggcgatactatcccactaggctggccattaacctatcttccggcgtctccggggcaggcggcaccgtgcatcagcccgggttcatcgtggttgaaacaaattacagactctatgcttatactgagagcgagctgcagattgctctcatagcattgttcagcgaaatgctataccggttcccgaatatggtggtagcccaagtgacccgtgaatctgtacaacaagccattgcgtcaggaattacagcacagcagattattcactttcttagaacacgtgcccatcccgtcatgctgaaacaaactcccgtcttgccgcctaccatcactgaccagatcaggttatgggagctggaaagggatagacttcgcttcaccgagggagtgctctacaaccagtttttgtcccaggtcgattttgaacttcttctggcgcacgcccgagagctgggcgtactcgtctttgaaaatagtgccaaacgcttgatggtggtgactcctgctgggcatagcgatgtcaagcgcttttggaaacggcaaaagcacagttcatag

SEQ ID NO: 118291 - DNA, 1389 bp, synthetic construct
  misc_feature 1..1389: note = Description of Artificial Sequence: Synthetic coding sequence
  source 1..1389: mol_type = other DNA
atggagagcactcccagtagaggattgaacagagtgcatctacagtgccgaaatctgcaggagttcctcgggggactttctcccggggtccttgataggctgtatgggcatccagcaacatgccttgcggtgttccgggagctcccaagcctggccaagaattgggtgatgcgcatgctctttcttgaacagccgctaccccaggccgccgtggctctatgggtgaaaaaggaattttctaaagcccaggaagaaagcacagggcttttgtctggcctccggatttggcatacgcagctccttccaggagggctccagggcctaattctgaatcctatcttcagacagaatctccgcatcgctctgttgggaggcggaaaagcttggtccgacgacacatctcaattgggccctgacaagcatgcccgcgatgtgcccagtctggacaagtatgcggaggagaggtgggaagtcgtcctgcatttcatggttgggagccccagtgcagccgtcagccaggatctggcacagctcctgtcccaggcaggccttatgaaatccacagagcccggagaaccaccgtgtataacatccgcaggctttcaattcctcttacttgatactccggcccaattgtggtatttcatgttgcagtatctccagacagctcaaagccggggtatggacctcgtggagatacttagcttcctgtttcagttaagcttctcaactctgggaaaggattactccgtggaagggatgtccgattccctgttaaattttttgcagcaccttagagaattcgggcttgtgttccaaaggaagcgcaagagccggcgatactatcctacacgccttgccattaacctttccagcggagtttccggcgccgggggcaccgtccaccagccagggttcattgtggtagaaacgaattaccggctctacgcttacacagagtccgagttgcagatagccttaattgccttgtttagcgaaatgctgtaccggtttcccaacatggtcgtcgcacaggttactcgtgagtctgtgcagcaggccatcgcttctggtatcaccgcccaacaaattatccattttcttagaacacgggcgcatcccgtcatgcttaagcagactcccgtgctgccgccaaccattactgaccaaatacgtttgtgggaattggagcgagaccggctgcgcttcacagagggtgtgctctataatcagttcctctcccaagttgatttcgagcttctcctcgcccatgcacgggaactcggggtgcttgttttcgagaactctgccaaacgactcatggtagtcacgccagcaggccatagcgacgtgaagcgattctggaagaggcagaagcacagctcgtag

SEQ ID NO: 118292 - DNA, 1389 bp, synthetic construct
  misc_feature 1..1389: note = Description of Artificial Sequence: Synthetic coding sequence
  source 1..1389: mol_type = other DNA
atggaatcaacccctagccgggggttgaatagagtgcacttacagtgccgcaatttgcaggagtttctaggaggcctgtcccctggcgttctggatagattgtatgggcaccccgcaacatgcctggccgtctttcgggaactgccgagtttggccaaaaattgggtaatgcggatgctgttcctggagcagcccctgccacaggctgctgtcgccctatgggtaaaaaaggaattctctaaggcccaggaggaaagtacagggctgctgtctggattacggatctggcatacacagctgctacctggcgggctgcagggactgatcctgaaccctatttttagacagaacctgcggatcgcactactcggaggaggcaaggcctggtctgatgacacgagccaactggggcctgataagcatgctagggacgtgccctccctggataagtatgctgaagagcgatgggaggtagtcttacactttatggtgggaagcccaagtgccgctgtgtcccaggatttggctcaacttctctcacaggcagggctaatgaagtcgaccgagccaggcgagcctccctgcatcacatcagctgggtttcaattcctgttactggacacccctgcgcaactctggtacttcatgctgcagtacctacagactgctcaatcacggggtatggacttagtggaaattctcagttttctcttccagctttcttttagcacactcggtaaggattactcagtggagggaatgtccgacagcctactgaactttctccagcacctgagagaattcggcctggttttccagcggaagcgaaaatctcggagatactatccaaccaggttagcaattaacctgagctcaggcgtaagtggtgcaggggggaccgtgcatcagccaggtttcatcgttgtggaaacaaattacagactctatgcctacacggagagtgaactccagattgctttaattgcgctgttttcagagatgctttacaggttccctaatatggtcgttgcacaggtgacacgggaaagtgtccaacaggctattgccagcgggattaccgctcagcaaataatccattttttgaggacacgcgcacatcccgtcatgctgaagcaaacccccgtgcttccacccacaatcacagaccagattaggctgtgggagctagagcgcgataggctcaggttcaccgaaggagttctgtacaaccagttcttgtctcaggtcgattttgaactcctgcttgcacatgctagagagctcggtgtactagtgttcgagaacagcgccaagaggctaatggtggtgaccccagccggccactctgatgtcaagaggttctggaagcgtcaaaaacactcctcttag

SEQ ID NO: 118293 - DNA, 1389 bp, synthetic construct
  misc_feature 1..1389: note = Description of Artificial Sequence: Synthetic coding sequence
  source 1..1389: mol_type = other DNA
atggagagtaccccttcgcgcggccttaatcgcgtgcaccttcagtgccgaaacctgcaagaattcctgggggggctcagcccgggcgtgctggacaggctgtacggccaccccgctacctgcttagcggtgtttcgggagctccccagcctagctaagaactgggtgatgaggatgctcttcttggagcaaccccttccccaggccgctgtggctctgtgggttaagaaagagtttagcaaggcacaggaggaaagcacgggcctcctgagcgggcttcggatttggcacacccaacttctgccagggggattacaaggactgatccttaatcccatatttagacagaacttgaggattgccttactggggggtggaaaggcatggtccgatgatacgtctcagctgggccctgacaaacacgctcgcgacgtgccgtctctggataagtatgccgaggagcgctgggaggtagttcttcacttcatggtgggcagcccatctgccgcagtgagccaagatctggcacagctgctatcccaggccgggctgatgaagagcacggaacccggggagcctccttgcatcactagcgccggctttcagtttctcctgcttgatactccagcccaattgtggtattttatgctgcagtatttacagaccgctcaatcacgcggaatggatctggtggagattcttagcttcctcttccagctgagcttctccacgcttggcaaagactatagcgtcgaaggcatgagcgattctttactcaatttcctgcagcacttgagagagttcggactggtgttccaaagaaagaggaagagtagacggtactatcccaccaggctcgcaataaatttaagtagcggcgtttctggcgcaggaggtacagttcaccagcccggcttcatcgtcgtcgagaccaactatagactgtatgcctatacggagagtgaactccaaatcgccctgattgctctgtttagtgaaatgctgtaccgctttccgaacatggtcgttgctcaagttacccgtgagtccgtccagcaagccatcgcctcaggcattaccgctcagcagatcattcactttctgcgaactcgagcgcacccggtcatgctcaaacagacccccgtgttgcctccaacaatcacagaccagattcgcctttgggagctggagcgcgataggcttagatttactgaaggcgtgctctataaccagttcctgtcacaggtggactttgagctactgctcgcccatgccagggagctgggagtgttggtgttcgaaaatagcgctaaaagactcatggttgtgacaccagccgggcattccgatgtcaaacgcttctggaagaggcagaaacactcttcgtag

SEQ ID NO: 118294 - DNA, 1389 bp, synthetic construct
  misc_feature 1..1389: note = Description of Artificial Sequence: Synthetic coding sequence
  source 1..1389: mol_type = other DNA
atggagagtacgccatcacggggacttaaccgggtccaccttcagtgtcgaaatctacaagaatttctggggggcctgtcacccggggttctcgatcggctgtatgggcacccagctacttgcctcgctgtatttcgggagttgccctctctggcgaagaattgggtgatgcgcatgctgtttcttgaacagcccctgccgcaagccgccgttgctctgtgggtcaagaaagagttctcaaaagctcaggaagaaagcaccggcctgctgagcggtctaagaatttggcacacacagctcctgccgggcggacttcagggtctgatcctgaatcccatatttaggcagaatctccgcatcgccctgctcggcggcgggaaggcctggtccgacgatacaagccaactgggacccgacaaacatgcccgagatgttccttctttagacaagtacgccgaagaacggtgggaagtcgtgcttcacttcatggtgggttcaccctctgccgccgtttcacaggacctggcccaattgctaagccaggccgggcttatgaaatcaaccgagcctggagaacccccctgcattacgtccgccggtttccagtttctactgttggatactccagcccagctttggtactttatgctccagtacttacagacggcgcaaagccgaggcatggacctggtcgagatcctctccttcctgtttcaactcagcttctcaacactcggcaaagactacagcgtggaagggatgtcggatagccttctgaactttttgcagcacctgagggagttcggcctcgtgttccaacgtaagcgtaaaagtagaagatactacccgacacggcttgcaattaacctctcttcaggcgtgagcggtgctggcggaacagtgcaccagcccggcttcatagtagtggaaaccaattacaggctgtacgcatataccgagagcgagctccagatcgccctgattgctcttttctctgagatgctatatcggtttccaaacatggtcgtcgcccaggtcacacgggaaagcgtccaacaagcaatcgcgagtggcatcaccgcccagcaaatcattcacttcctgcgaacccgggcccatcctgtgatgctgaagcagacccccgttctccccccaactattaccgaccagatcaggctctgggagctggagcgtgatagattacgcttcacggagggagttctgtacaatcagtttttaagccaagttgatttcgagctgctgctggctcatgcccgggaactcggtgtgctggtgtttgaaaacagcgctaaacgactgatggtcgtcacacctgctggacatagtgacgttaagaggttttggaagcgacagaagcacagctcctag

SEQ ID NO: 118295 - DNA, 417 bp, synthetic construct
  misc_feature 1..417: note = Description of Artificial Sequence: Synthetic coding sequence
  source 1..417: mol_type = other DNA
atggagagtactccctcacgcggactgaaccgagtgcatctccagtgccggaatttacaggaatttctcggcgggctctccccaggagtgctggatcggctttatggacatcctgccacttgcttagcagttttccgcgaactaccatctctggctaagaattgggtaatgaggatgttgttccttgaacagcccctcccacaagcggctgtggccctctgggtcaagaaggaattcagcaaagcgcaggaagaaagtacgggcttacttagcggacttagaatatggcacacgcaactgctcccagggggtctccaaggattgatcctgaacccaattttccggcaaaacctgcgaatcgccctgctagggggtacaggaatcactggcgtgagccattgcgcctggccaggctag

SEQ ID NO: 118296 - DNA, 1389 bp, synthetic construct
  misc_feature 1..1389: note = Description of Artificial Sequence: Synthetic coding sequence
  source 1..1389: mol_type = other DNA
atggaatcaacaccatctagagggttaaatagagtgcacctccagtgtcgtaacttgcaagagttcctcggcggcctgagccctggcgtccttgaccgtctttacggccatccagccacatgccttgctgtgtttagggagttgcctagcctcgcgaaaaattgggtgatgaggatgttgtttctggaacaaccactgccacaggcagccgtggctctgtgggtcaaaaaagagttcagcaaagctcaggaagagtctaccggactcctgagcggtcttagaatttggcacactcagttgttacctgggggcctgcagggcctgatcctgaaccccatatttagacaaaacctgcggattgccctgctggggggcggaaaggcatggtctgacgacaccagtcaactggggccagacaagcatgcccgggacgtgccttccctggacaaatatgctgaggagcgctgggaggttgtgctccatttcatggtggggagtccgtcagccgctgtaagccaggatcttgcccaattactgtcccaagccgggctcatgaaaagcactgagccaggcgagcctccttgtattacctccgctggattccagtttctcctgctggatacacccgcccagctgtggtacttcatgctgcagtacctccagaccgctcagtccaggggtatggacctggtcgagattctgagctttctgttccagctcagctttagcacattaggtaaagattactcagtagaaggaatgtccgattcgctcctcaactttcttcaacacctaagggaattcggacttgtattccagaggaaacggaagagccggcgttactacccaactcggctggcaatcaatctctcaagtggcgtgtcaggggcgggtggaacggttcaccagccaggattcatcgtggtcgaaacaaattacaggctgtacgcctataccgagtccgagcttcagatcgctttgatcgccctttttagcgagatgctgtatagatttccgaatatggtcgttgcccaggtaaccagggaatctgttcagcaggccattgcctccggcattaccgcccagcaaatcattcatttccttcgaacacgcgcacatccagttatgttgaagcagaccccagtgctgcccccgacaattacagaccagatcaggttatgggagctcgagagagatcgcctccgctttaccgaaggggtgctgtataatcaattcttgtcccaggtggatttcgagctgttgctcgcgcatgcgagagagctcggcgtgttggttttcgagaactcagctaaaagactgatggtggtaacccctgcaggtcatagcgatgtgaaacgtttctggaagagacagaagcacagctcctag

SEQ ID NO: 118297 - DNA, 417 bp, synthetic construct
  misc_feature 1..417: note = Description of Artificial Sequence: Synthetic coding sequence
  source 1..417: mol_type = other DNA
atggagagcactccctcaaggggccttaatcgcgtgcacctacagtgtcggaatctgcaggagttcctgggcggccttagccccggggtcttagacagactgtatggtcacccagccacgtgcttggctgtcttccgggagctgccttctttggcaaagaactgggtaatgcgtatgttgtttttggagcaacctctgccgcaggcagcagtggcactgtgggttaagaaggaattttccaaagcccaggaagagagcaccgggctgttatcaggactgagaatttggcacactcagctgcttcccggaggactccagggactcatcctcaaccctatcttccgccaaaacctaaggatagcacttctgggcggtacaggaatcactggcgtcagtcactgcgcttggccagggtag

SEQ ID NO: 118298 - DNA, 1389 bp, synthetic construct
  misc_feature 1..1389: note = Description of Artificial Sequence: Synthetic coding sequence
  source 1..1389: mol_type = other DNA
atggagtcgaccccttccaggggcctcaatagggtgcatttgcagtgtagaaacctgcaggaatttttggggggcctttccccaggagttctggaccgactgtacggtcacccagcgacttgtctagctgtgtttcgggagctaccgtcattggctaagaattgggtgatgcgtatgctgttcttggagcagccccttccacaggctgccgtcgcactgtgggtgaagaaagaattctctaaagcccaagaggagagtaccgggttactatccgggctgaggatctggcacacgcaactcctgcctggtggcctgcagggacttatacttaaccccattttccgtcagaacctccgcatcgcattgttgggaggggggaaggcgtggtccgatgataccagccagctgggccccgataagcatgctagagacgtccccagtctggacaaatacgctgaagagcgttgggaagtggtgctgcatttcatggtgggcagcccaagcgcagctgtttctcaagacctcgctcagctcctttctcaggccggccttatgaagtccacagagcctggggagcctccttgtatcactagcgctggattccagttcctcctacttgacacccccgctcagctttggtatttcatgctgcaatacttgcagaccgctcagagccgaggaatggacctcgtggagattctctctttcctgttccagctgagtttttccacactgggtaaagattatagtgtggagggcatgagcgacagccttcttaacttcctgcaacacctccgtgaattcggcctggtgtttcagaggaagcgcaaatctcggcggtactatccgacccgcctggccataaacctcagctccggcgtgtcgggggctggagggaccgtgcaccagccaggcttcattgttgtcgaaaccaactataggctgtatgcttacacggagagcgaactgcagatcgcgttaatcgctcttttctccgaaatgctctataggtttccaaatatggtggtagcacaggtgacaagggagtccgtgcagcaagctatcgcaagcggaattactgcccagcagatcatccattttctgagaacccgcgcccaccctgtcatgctgaaacagacacctgtgttaccccctaccataaccgaccagattaggctctgggaattggaaagggaccggcttcgcttcaccgagggagttctgtacaaccagtttctctctcaggttgacttcgaacttttgcttgctcatgctagagagctgggcgtgctagtcttcgagaattcagctaaaagattaatggttgtgacgcctgcgggccacagtgatgtgaaacgattttggaaaaggcaaaaacattcaagttag

SEQ ID NO: 118299 - DNA, 417 bp, synthetic construct
  misc_feature 1..417: note = Description of Artificial Sequence: Synthetic coding sequence
  source 1..417: mol_type = other DNA
atggagtcgacccccagccgtggacttaatagagtccatctgcagtgcaggaatctccaggagttcctcggaggcctcagccctggggttctcgacagactgtacggacacccagccacgtgcctggccgttttcagggaattgccatctctagcaaagaactgggtcatgagaatgctatttctggaacaaccactgccccaggccgccgttgctctgtgggtcaagaaggagttctcaaaagcccaggaggagtccaccgggttgctgtcgggattaaggatctggcatacccaactgttgccaggcggactgcagggactcattctgaaccctatttttcggcaaaatctccgcatcgctttacttggaggcacaggcataacaggcgtgtcccattgtgcgtggcctggatag

SEQ ID NO: 118300 - DNA, 1389 bp, synthetic construct
  misc_feature 1..1389: note = Description of Artificial Sequence: Synthetic coding sequence
  source 1..1389: mol_type = other DNA
atggaatccacgcccagcagaggtctcaatcgagtccacctgcagtgcaggaatctccaggaattccttggtggtctgtcccctggggtactcgaccggctctatgggcacccagctacctgcttggcagttttccgcgaactaccatcattggccaaaaactgggtgatgcgcatgctcttcctggagcagccactgccacaggccgccgtggcgttgtgggtgaaaaaagaattcagtaaggcccaggaggaatctactggcctcctttcaggcctgaggatttggcatacacaactgctacctgggggtttacaagggctaatcctgaatcctatattccgccagaaccttcgcatagcacttctcggtgggggcaaagcttggtccgacgacacaagtcagctgggtccggacaagcacgctcgggacgtgcccagccttgacaaatacgctgaagagaggtgggaggttgtcctccacttcatggttggcagcccctctgctgccgtctcgcaggatctcgctcagctcctaagccaagcaggtctcatgaagtcaacagagcctggggagcctccttgtatcacctctgccgggttccagttcctgctgcttgacacccctgcgcagctgtggtattttatgcttcagtatttacagactgcacagagccggggcatggatcttgtagaaatcctctctttcctcttccagttgtccttttccacacttggtaaagattattcagtggagggcatgtccgactctctgttgaacttcctgcagcatctgagggagttcggcctcgtcttccaaagaaaacgcaaaagtcgacggtactaccccactcggctggctatcaacctgtcaagtggcgtttctggagctggtgggactgtgcatcagcctggattcattgttgtggagaccaactatagactctacgcctacacagagtccgagttacagatcgcactgatcgctctcttttccgagatgctgtacagattccctaacatggtggtggcccaggtgacacgtgagtccgtacagcaggcaatcgcctccggcatcaccgcccagcagattatccacttcctgaggacccgcgcgcaccctgtaatgctgaagcagacccctgtcttacctccaaccattactgaccagattcggctttgggagctcgaacgcgaccgcttgcgtttcactgagggtgtgctctacaatcagtttctgtcacaggtcgattttgagttgcttctggcgcatgcccgcgagttgggggtgttagtgttcgagaatagcgcaaagagacttatggtggtgaccccggcgggacattccgatgtcaaaaggttctggaaacgtcagaaacactctagctag

SEQ ID NO: 118301 - DNA, 1389 bp, synthetic construct
  misc_feature 1..1389: note = Description of Artificial Sequence: Synthetic coding sequence
  source 1..1389: mol_type = other DNA
atggaatctacccctagtcgggggctaaatcgggtgcatctgcagtgtcgcaatctccaggaattcctgggcggcctgagcccgggcgtcctggataggctctatgggcaccctgctacctgcttggctgtatttcgcgaacttccttcattagcgaagaactgggtcatgaggatgctgtttctggaacaacctttgccacaggctgctgtggctctctgggtcaagaaggagtttagcaaggcacaggaggaatccaccggcttattatctggcctgcgcatttggcacacgcagttgttgcctgggggcctgcaaggtttgatccttaatcccattttccgacagaatctcaggattgctctgcttgggggtggaaaagcgtggtcagatgatacctctcagctgggcccagataagcatgcgcgtgatgtccctagcctggacaagtatgccgaggagagatgggaggtcgttttacacttcatggtgggttcccccagtgccgccgtgtcccaggatctggctcagctcctctcccaggccggactaatgaaaagcaccgaacctggggagcccccttgcattacatctgccggctttcagtttttgctgctcgatacccccgcccagctgtggtattttatgttgcagtacctacagaccgcacaatcccgtggcatggatctggtagaaattctttcttttctattccagttaagtttttccacgctggggaaggactattccgtggaaggtatgtctgactctctgttgaattttctccagcatctccgggaatttggcctggtcttccagcggaaacgaaaaagtcggcgctattatccaacaaggctggcaatcaacttgtcatctggggtgtcaggggccgggggaactgtgcaccagcccggtttcatagtcgtggagaccaactatcgcctctatgcttacacggagagcgagctacagatcgcactgatcgctctgttctcagagatgctttatcgctttcctaatatggtggttgcgcaggtcaccagggagtccgtacagcaagccattgcgtctggcataacagcacagcagattatccatttcctgagaactagggcgcatccagttatgttgaagcagacccctgttctgccacccacaattactgaccagatcagattatgggagctcgaacgcgaccgccttagatttacagagggggtcctttataaccagtttctgtcacaggtggatttcgagctcctcttagcacatgcccgcgaactaggtgtgttggtgtttgaaaacagcgcgaagaggctgatggttgtgacccctgctggacattccgacgttaaacgcttttggaagcggcagaaacacagctcctag

SEQ ID NO: 118302 - DNA, 1389 bp, synthetic construct
  misc_feature 1..1389: note = Description of Artificial Sequence: Synthetic coding sequence
  source 1..1389: mol_type = other DNA
atggaaagtaccccttcgagaggtctgaacagagtacacttgcagtgtcgcaatctgcaagagtttctcggtgggctgtcacccggggtgttggataggttatacgggcatccagctacatgcctcgcagtctttcgagagcttccttcccttgcaaaaaattgggtgatgagaatgctgttcctcgagcaacccttgccgcaggccgcagtggccctctgggtgaagaaggagttttcaaaggcccaagaggagtctactggactcctgtccggcctgcgaatctggcacacccaactgctgccgggcggacttcagggcttgatccttaatcccattttccggcaaaacctcaggatcgctctcttagggggaggaaaagcctggtcagatgatacgtcccagctggggccagacaaacacgccagagatgtgcccagcctcgacaagtatgcagaggaaaggtgggaagtggtgctgcacttcatggtggggagcccgagtgcagctgtttcacaggatttggctcagcttctgtctcaggccgggctgatgaagagcaccgagccaggcgaaccaccctgcatcacatcagcaggcttccagtttctgcttttagatacaccagctcagctgtggtatttcatgctccaatacctacaaaccgcccaatcgagaggtatggaccttgtcgagatcttgagcttcttgttccagttgtcattttcgacgttaggcaaagactatagcgtggagggcatgtcggactcactccttaacttcctgcaacatttaagggaatttggccttgtgttccagaggaagcgcaagagccgacgttattacccaactcgtttggccattaacctatctagcggcgtgtccggcgctggagggaccgtgcaccagcctgggtttatagttgtggaaaccaactatagactctatgcttacaccgagtcagagctccagatagcactcattgcacttttcagtgaaatgttgtaccggtttccgaatatggttgtggcgcaggtgacacgcgagtcagtgcagcaggcgattgcatccgggataactgcccagcagataatacacttcctccgcactagggctcatcctgtcatgctgaaacaaacacctgtcttacctcccaccatcaccgatcagatccggctgtgggaactagagagggatcgccttcgatttacagagggagtgctgtacaaccagttcctgagccaagtggacttcgagcttctgctcgcgcacgcaagagagctcggcgtcctcgtgtttgagaacagcgctaaaagactgatggtggttacccccgcgggccacagtgacgtgaaaagattctggaagaggcagaagcactcttcctag

SEQ ID NO: 118303 - DNA, 1389 bp, synthetic construct
  misc_feature 1..1389: note = Description of Artificial Sequence: Synthetic coding sequence
  source 1..1389: mol_type = other DNA
atggaatctacaccgagccgcggcctcaaccgagtccacctgcaatgcagaaacctgcaagaattcctgggcggactgagtccgggcgtgctggaccgactgtacggtcatcccgctacctgtcttgcggtctttcgggaactcccctcgctggcaaagaactgggtcatgcggatgctgttccttgagcaacccctgccacaggctgcagtggccctctgggtgaagaaagaattctccaaggctcaggaagagagcaccggcctactctccgggcttagaatttggcatacacagttgttgccgggtgggctgcagggcctgatcctgaacccaatctttaggcagaacctcaggatcgccctgctgggcggggggaaagcatggagtgacgatacaagtcaactgggcccagacaagcacgcccgggatgtgcccagcctagataaatatgcagaagaaagatgggaagtcgttctacacttcatggtcggatctccctccgctgccgtttcgcaggatctggctcagctgctgagccaggcagggctcatgaagtccacagaacctggggaaccgccttgcatcacaagcgcaggcttccagttcctcctgctggataccccagctcagctctggtattttatgctccagtatctacagaccgcccagtcaagaggtatggatctcgtggaaatcttgtcttttctgttccaactgtccttctcaactctaggaaaggactacagcgtcgaaggtatgtcagattctttgcttaacttcctacaacacttgagggagtttggcttggtgtttcagcgcaaacggaaaagtcgcagatattatccaactcgccttgcaattaacctcagctccggggtgtccggggctggtggcacggtgcaccagcccggattcatcgtagtggagactaactatcgtttatacgcttatacagaaagtgagcttcagatagctctgattgccctcttcagcgagatgctgtatcggtttcctaatatggtggtggcccaggtgactcgtgagtctgttcaacaagccattgcttccggtattaccgcacagcaaattattcatttcctccgcacgcgggcgcatcccgtcatgctgaaacagacacccgtactaccccccactattactgatcagatcagattgtgggagctcgaaagggataggctcagattcaccgagggtgtcttatacaaccagttcctgtcacaggtggatttcgaactgctgctggctcacgctcgggagttaggagtgttggtgtttgagaatagcgccaagagactgatggttgtgaccccagccgggcatagtgatgtgaagcgcttctggaagaggcagaagcactctagctag

SEQ ID NO: 118304 - DNA, 417 bp, synthetic construct
  misc_feature 1..417: note = Description of Artificial Sequence: Synthetic coding sequence
  source 1..417: mol_type = other DNA
atggagagcacgccctccagaggactgaaccgcgtgcatctgcagtgtaggaacttacaggaatttctcggaggtctgagcccgggcgtgctggataggctgtacggacaccccgccacatgcctcgccgtctttcgagagctgcccagcctagccaaaaactgggtgatgaggatgctgttcctggagcagcctctcccccaagccgccgtggccctgtgggtaaagaaagagttttcaaaagcacaggaagaaagcacaggcttgctgagcgggttgaggatctggcatacccagctgctgcctggggggctccagggcctcatcctgaaccctatctttcgccagaacttgcggatcgcccttctgggtggaaccggcattaccggcgtctcacattgcgcatggccggggtag

SEQ ID NO: 118305 - DNA, 417 bp, synthetic construct
  misc_feature 1..417: note = Description of Artificial Sequence: Synthetic coding sequence
  source 1..417: mol_type = other DNA
atggagagcactccatcgcgcggcctcaatagggtgcacctgcagtgcagaaacctacaggagtttctcggcggactaagtcccggcgtgctggaccgcctctacggacatccagccacttgcctcgcggtgtttcgtgagctcccctctcttgcaaagaactgggtaatgagaatgctcttcctggagcagcccttgccccaggccgctgtcgctctttgggttaagaaagagttttcgaaagcccaggaagagagtaccgggctgcttagtggactgcggatttggcacacccaactgctgcccggtggcctgcaaggacttatcctgaatcccatcttccgacaaaacctccggatcgctctcctggggggaactggtatcacaggggtctcacattgtgcatggccggggtag

SEQ ID NO: 118306 - DNA, 417 bp, synthetic construct
  misc_feature 1..417: note = Description of Artificial Sequence: Synthetic coding sequence
  source 1..417: mol_type = other DNA
atggaatccaccccatcaagaggactgaaccgcgtccacctccagtgcagaaaccttcaggagtttttgggcggtttgtcgccgggtgtgttagataggctgtacggccaccctgccacatgcctcgcagtgttcagggagctcccatcactcgccaaaaattgggttatgcgaatgttatttttggagcagccgctccctcaggccgctgtggccctgtgggtgaaaaaggaattcagcaaggcccaggaggagagcacaggactgctgtcaggcctcaggatctggcacacacaactgctgccaggggggctgcagggcctgattcttaaccccatctttcgccaaaaccttagaatcgccctcttgggggggacgggcattaccggtgtgtcacactgcgcctggcctggctag

SEQ ID NO: 118307 - DNA, 1389 bp, synthetic construct
  misc_feature 1..1389: note = Description of Artificial Sequence: Synthetic coding sequence
  source 1..1389: mol_type = other DNA
atggagagcactccctcccggggtctgaatcgggtgcacctgcagtgtcgaaatttgcaggaatttctgggtggcctaagccctggggtattggataggctctacggtcacccggccacctgtctggcggtcttcagagaactcccctctctggccaagaactgggtcatgagaatgctctttttagagcaacccctgccccaggcggcggtggcactctgggtaaagaaggaattctccaaggctcaagaggaatcgaccggtttattgagcggccttaggatttggcatacacagctgctgccaggcggcctccaggggctgattctgaatccaattttcaggcagaacctccgaatcgctttattgggcggaggcaaagcgtggtccgatgatacatcccaattagggccagataaacatgcccgagacgtcccttctctagataagtatgccgaggagagatgggaggtagtcctgcacttcatggtgggcagcccgagcgcagcagtctcgcaagacctggcacaactgctgagccaagcgggtctcatgaagagtaccgaacctggcgagccgccatgcatcactagcgctggcttccaatttctcctgctggacacacccgcccaattgtggtactttatgctacagtatctgcagacagcccagtctaggggcatggacttggtggaaattctctcattcctgtttcagctcagctttagcaccttagggaaagattactcagtcgaagggatgtcagactcactgctcaacttccttcagcacttgagggagttcggcttggttttccagcggaaacggaaatctagacggtactacccgactcgcctcgccataaacctcagctctggggtctcaggagcaggaggtaccgtgcaccaacctgggtttatcgtggtggagaccaactaccgcctatacgcatataccgaaagcgaacttcaaatagcactaatagcgctattcagcgaaatgctgtatagattccctaacatggtagtggcccaggtaacaagagagagcgtgcagcaggcgattgcttccggaataaccgcccagcagataatccactttctgcgaactcgtgcccacccagtcatgctgaaacaaaccccagtgctgccaccgaccattaccgatcagattagattatgggaactggagcgcgataggttaaggttcaccgaaggtgttctatacaatcagttcctctctcaggtcgacttcgaactactcctcgcccatgctagagaattgggggtacttgtcttcgagaactccgctaaaaggctaatggtggttactccagccggccactccgacgtgaaaaggttctggaagaggcagaaacattccagttag

SEQ ID NO: 118308 - DNA, 663 bp, synthetic construct
  misc_feature 1..663: note = Description of Artificial Sequence: Synthetic coding sequence
  source 1..663: mol_type = other DNA
atgagaatgctatttttagagcagccactaccacaggcggccgtggctctgtgggtcaaaaaggaattcagcaaggctcaggaggaatctaccggattactttccgggctgcgcatctggcacacccaactgctgccaggagggctccaaggtctgatactgaatcctattttcagacaaaaccttcgcatcgccctattgggaggaggcaaagcttggtcagacgacacgagccagcttggccctgacaaacatgctcgggatgtgcctagcttggacaaatacgcagaggagcgatgggaggtggtacttcacttcatggtagggagcccttcggcggccgtgtctcaagacctagctcagctgctaagccaagctggattgatgaagagcacagagcctggggagccaccatgtataaccagcgcggggttccagttcctgcttctcgatacaccagcccagctttggtatttcatgctacagtacttacagacagcccaaagccgcggcatggacttagtggagatacttagctttttattccagctctcattcagcaccctcggaaaagattattccgtggaaggaatgtctgactctctgcttaattttttacagcacctaagggagttcgggttggttttccaacgcaaggtgtag

SEQ ID NO: 118309 - DNA, 663 bp, synthetic construct
  misc_feature 1..663: note = Description of Artificial Sequence: Synthetic coding sequence
  source 1..663: mol_type = other DNA
atgcgaatgctttttttggaacagccgctaccacaggctgccgtcgcattatgggtgaaaaaggagttcagcaaggcccaagaggagagcaccggtctcctctcgggactgcggatttggcacacccagctcttaccgggagggctgcaggggttaattctgaacccgatattcaggcagaaccttagaatcgctctcctgggcggggggaaggcctggtccgacgatacctcacagctgggaccagacaagcatgctagggacgtgcccagcctggacaagtacgccgaggagagatgggaggtcgtgctccacttcatggtaggatctccttctgccgcggtgtcccaggatctcgctcagctgctgtcccaggccggcctaatgaagtcaaccgagccgggggaaccgccctgtatcacaagcgccgggtttcaatttctgttgctcgacacacccgcacaactgtggtatttcatgctccagtatctgcagacagcccagagtcgcgggatggacttggtcgagattctcagcttcttgttccaactctctttctcaaccctaggtaaggactactcggtagaggggatgtctgactccctactgaactttctccagcatctccgtgagttcggactggtcttccagcgaaaagtgtag

SEQ ID NO: 118310 - DNA, 663 bp, synthetic construct
  misc_feature 1..663: note = Description of Artificial Sequence: Synthetic coding sequence
  source 1..663: mol_type = other DNA
atgcggatgttgttcttagagcagccacttcctcaggcagctgttgctctctgggtgaagaaagaattcagtaaggctcaggaggaaagcactggcctactcagtggtctgcgtatatggcacacgcagctccttcctgggggactccagggactgattctgaatcctatcttcagacaaaatttgcgaatcgccctgctgggtgggggcaaggcctggagtgacgataccagccagttgggtccagacaaacacgctcgagatgtgccatctctcgataagtatgctgaggaacgatgggaagtcgtgctccatttcatggttggttcaccttccgccgctgtatcccaggatctggcccagctgctcagccaggcagggctgatgaagagcacagagcctggagagccaccctgcatcacttccgctggctttcagttcctgctcctggacacaccagcccaactgtggtatttcatgttgcagtacttacagaccgcccagtccaggggcatggatctggtggagattctgtcctttctgttccaactgtcattttccacattggggaaagactactcagtggaaggtatgtccgatagcctactgaacttcctgcaacatcttagggagtttgggcttgtgtttcagagaaaggtgtag

SEQ ID NO: 118311 - DNA, 663 bp, synthetic construct
  misc_feature 1..663: note = Description of Artificial Sequence: Synthetic coding sequence
  source 1..663: mol_type = other DNA
atgaggatgctgtttctcgagcagccactccctcaggccgctgtggctctttgggtaaaaaaggaattcagtaaggcacaagaagaatctaccgggttactgtctgggctgcggatatggcacacacagcttctccccggaggcctccaagggctcattctgaaccccatttttcggcagaatctgagaattgccttgttgggaggcggcaaggcctggagtgacgacacctcacaactcggccctgacaaacacgcacgtgatgtgccctctttggataagtatgcagaggaaagatgggaagtggttttgcactttatggtaggatctccgagtgctgctgtgtcacaggacctggcgcagctgctctcccaagcgggcctgatgaagtcaaccgaacccggcgagccaccctgtataacatccgcgggattccagtttcttttgctagatactccagcccagctttggtattttatgctgcagtacctgcagactgcacagtctcgaggaatggatctggtcgagattctgtcctttctctttcagctctcatttagcactctgggaaaggactattcagtagaggggatgagcgactctctgctcaattttctgcagcacctgagggagtttggcctggtgtttcagagaaaagtctag

SEQ ID NO: 118312 - DNA, 663 bp, synthetic construct
  misc_feature 1..663: note = Description of Artificial Sequence: Synthetic coding sequence
  source 1..663: mol_type = other DNA
atgcggatgctgttcctcgagcagcctctgccccaagccgctgtggcactgtgggtgaagaaggaattctcaaaagcacaagaggaatctacagggttgctgtccgggctgaggatatggcacactcagcttctgccgggcggactgcagggtctcatcctcaatcccatctttaggcagaatcttaggattgcactgctgggaggcggcaaagcttggtcagatgatacctcccaattggggcctgataagcacgccagggacgtgccaagcctggataagtacgcggaggagaggtgggaagtggttctccattttatggtcggctccccgtcagcggccgtatcgcaggacctagctcagctgctgtctcaagctggccttatgaagtcaacagagcccggagagcccccttgcatcacttcggcgggctttcagtttctactgctagacacccccgcacagctgtggtactttatgctccagtatctccaaacagcccagagcaggggcatggacctggtggagatcttgtcgttcctgtttcagctgagcttctcaacactgggcaaggactactccgtggagggaatgagtgattcactgcttaactttctccagcatctgcgcgagttcgggcttgtgttccaacggaaggtttag

SEQ ID NO: 118313 - DNA, 663 bp, synthetic construct
  misc_feature 1..663: note = Description of Artificial Sequence: Synthetic coding sequence
  source 1..663: mol_type = other DNA
atgaggatgctatttctggagcagcctcttcctcaggcagccgtagccctctgggtgaagaaggagttctccaaagcacaggaggagtcaaccggcttgctgagcggccttcggatatggcatacccaacttcttcccggaggactccaaggtctgattctcaacccaatcttccgacaaaatctccgcatcgcacttttgggaggaggcaaggcctggtctgacgatactagtcagttgggacctgacaagcacgctagggacgtccctagtctggacaagtacgcagaggagaggtgggaagtggtgctccatttcatggtcggctcaccttccgctgctgtctctcaggatcttgctcagctgctcagccaggcaggtctgatgaaatcaaccgagcctggagagcccccttgcataacctctgcagggttccagttcctcctactcgatacaccagcacagctctggtactttatgctacaatatctacagaccgctcagagtcgtggaatggatctcgtggagattctgagctttctgttccagctgtccttcagtacattgggaaaggattactctgtcgagggtatgagcgactcactacttaattttctacaacacttgcgggaattcgggcttgttttccagcgcaaggtgtag

SEQ ID NO: 118314 - DNA, 216 bp, synthetic construct
  misc_feature 1..216: note = Description of Artificial Sequence: Synthetic coding sequence
  source 1..216: mol_type = other DNA
atggtgaatgtactcaaaggcgtcctgatcgagtgcgatcccgccatgaagcagtttttactgtatctggatgaatccaacgctctgggtaaaaaatttattatacaggatatagacgatacacatgtcttcgtgatagcagagttggtgaacgtgctgcaggagcgcgtcggggaactcatggaccaaaatgctttcagtcttacccagaagtag

SEQ ID NO: 118315 - DNA, 2997 bp, synthetic construct
  misc_feature 1..2997: note = Description of Artificial Sequence: Synthetic coding sequence
  source 1..2997: mol_type = other DNA
atggcacaagtggctatgtcaacgctccctgtagaagacgaagaatctagcgagagtaggatggtggtgacctttcttatgtctgcccttgaaagtatgtgtaaagaactggccaagagtaaagccgaagtggcgtgtatagccgtgtatgagacagacgtgttcgtggtggggactgagcggggtcgcgccttcgttaacacacgaaaggatttccagaaggactttgtgaaatactgcgtcgaagaagaggagaaagcggcagagatgcacaagatgaagagcactacacaggccaataggatgtcagttgatgccgtcgaaatagagacattaaggaagacagtcgaagactatttctgcttttgttatggaaaggcactggggaagtctacggtcgtgcctgtaccttacgagaaaatgctgcgggatcaatcagccgttgtggttcagggcctgcctgagggggtggcattcaagcacccagagaactacgatctggctaccttgaagtggatcctggaaaataaagccggcatttcctttattataaagcggccgtttctcgagcctaagaaacacgtgggaggaagagtaatggtgactgatgctgaccggagtattctgagtcccggaggctcatgcggccccatcaaagtcaaaaccgagcctacagaggactcagggattagtctcgagatggccgcagtaactgtcaaggaggagtcggaagacccggattattatcaatataatatccaagcaggcccgagcgagacagacgatgttgatgagaagcagcctctgtccaagccattacagggctcccaccatagttcggaaggaaacgagggaacggagatggaggtccctgccgaggactccacacagcacgtcccgtcggaaacgtctgaagaccctgaggtcgaggtgaccattgaggatgatgactactcccctccatctaagcggcctaaggcgaacgagttacctcagccaccagtaccagagccagctaacgccgggaagagaaaggtgcgtgagttcaatttcgaaaaatggaacgcgaggatcaccgatttgcgtaagcaggttgaggagctgttcgagagaaaatatgcccaggcaatcaaagcaaagggaccagtcaccataccttacccgctctttcagtcacacgtggaagatctgtatgttgagggtctgcccgaaggcataccatttaggagaccctccacctacggaatccctcgactggagcgaattcttctggccaaagaaagaattagattcgtgataaaaaagcacgagctgcttaatagcaccagggaagaccttcagctggacaaaccggcttcaggtgttaaggaggaatggtacgcacggatcactaaactgagaaagatggtggatcagttattctgcaaaaaattcgctgaagcactggggtcaaccgaggcaaaggccgtgccataccaaaagtttgaggctcaccctaatgacctctacgttgagggcctccccgagaatattccctttcgatctccgagctggtacggtattccacgcctggaaaagatcattcaggtgggcaaccgcataaagtttgtgatcaaacgtcctgagctgctgacacactctaccaccgaagtgacgcagccgcgtacaaatacccccgtgaaggaggattggaatgttaggatcacgaagctcagaaaacaagtggaagagatcttcaatctgaaatttgctcaggctctgggattgaccgaggcagttaaagtgccctaccccgtgtttgagtctaatccggaattcctgtatgtagaggggctccctgagggcattcctttcaggagccccacctggtttggcataccccggttggaacgtatcgtgagaggcagcaataagattaaattcgtggtcaaaaaacccgaactggtaatcagctacctacctccagggatggcatctaagatcaacactaaagccttgcagtcgcccaagaggcccagatcacccgggagcaatagcaaagtccctgaaattgaggtaacggtcgaagggcccaataataataatcctcaaaccagcgctgtccgtacccccacgcagaccaacggctccaacgttccctttaagcccagagggcgagagtttagctttgaggcctggaacgcgaagattaccgacctgaaacagaaagtcgaaaatttgttcaatgagaaatgcggggaagcactgggcttgaaacaagctgtgaaagtgccttttgccctgtttgaatcgtttcctgaagacttttacgtcgagggcttgcctgaaggggttccgttccgcaggccttctacgtttgggatcccaaggttggaaaagattctgagaaataaggcaaagattaagtttataatcaagaaaccagagatgttcgaaactgccatcaaggaatctacgtcctccaagagcccgccccggaaaattaattcgtcgcccaatgtgaacacaacagcaagcggcgtagaggacctaaatatcattcaggtcaccatcccagatgatgacaacgaaaggctgagtaaggttgaaaaagctaggcagctacgtgagcaggtcaacgatctcttctctcggaagtttggagaagcaattggcatgggctttcccgtgaaggtaccatataggaagatcactataaatcctggttgtgttgtcgtggatggtatgcccccgggcgtgtctttcaaagctccttcctatttagaaatctcaagcatgagaaggattctcgactccgctgaatttatcaaatttacggtcattagacctttcccaggtctcgtgatcaataatcagctagtcgaccagtctgagagcgagggacccgtgatccaggaaagcgccgaaccaagccagctcgaggtgcctgccacagaagagatcaaggagaccgacggtagtagccagattaagcaggaacccgatcctacatggtag

SEQ ID NO: 118316 - DNA, 2934 bp, synthetic construct
  misc_feature 1..2934: note = Description of Artificial Sequence: Synthetic coding sequence
  source 1..2934: mol_type = other DNA
atggctcaggtggcaatgtccaccctgccggtggaggacgaggagagtagcgagagccgtatggtggtcactttccttatgtctgccttggagtccatgtgtaaggaactggcaaagtccaaagccgaggtagcttgtatagccgtctacgagacagatgttttcgtggtcggcaccgaacgagggcgggcgtttgtgaatactcggaaggacttccagaaagatttcgtaaagtattgcgtagaagaagaagagaaagcggcagaaatgcacaagatgaaatccaccacccaggcaaacagaatgtccgtggatgctgtggagatcgagacgctgcggaaaaccgtagaggattacttttgtttctgttacggcaaggccttggggaaatcaacagtggtccccgtcccatacgaaaaaatgcttcgggaccagtctgccgtggtagtacagggtttgccggagggggtggcattcaagcatccggagaattacgacctcgccactctaaaatggattctcgagaataaagccgggatttcctttattattaagcgcccttttcttgaaccaaaaaagcacgtcggaggacgcgtgatggtcaccgacgcagatcgctctattttgtccccagggggtagttgtgggcctattaaggtgaaaacggaaccaaccgaagactcggggatttcccttgagatggcagccgtcaccgttaaggaggagtccgaagaccctgattattatcagtacaacatccaggctggcccctctgaaaccgatgacgtggatgagaagcagcctctgagcaagcccctgcaggggtcccaccactcttcggaggggaacgaggggaccgagatggaggtgcccgccgaggatgacgattattcaccgcctagtaaaagacccaaggccaacgagctgccccagcctcctgttccggaacctgcaaatgcgggcaaaaggaaagttcgagagttcaattttgagaaatggaacgctcggattaccgacttaaggaagcaggtggaggagttatttgagaggaaatatgcgcaagcgatcaaagccaagggcccagtgacaataccctatcctttatttcaatcccatgtagaggacctgtatgtcgagggcttgccagaaggtattcccttcagaagacctagcacctacggtattccacgcctcgaaagaattctgcttgccaaagagcgaatccggtttgtgattaagaagcacgaactgctaaacagcactagagaggacctgcagctggacaaaccagcctcaggcgtaaaagaggagtggtacgccagaataacaaaacttagaaagatggttgaccaattattttgtaagaaattcgctgaagcccttggttctaccgaagcaaaggctgtgccttaccagaagttcgaagctcaccctaacgacctgtatgttgaggggctccccgaaaacattccgttccgatcaccaagctggtacggcatcccccgtctggaaaaaataattcaggtcgggaaccgcattaagtttgtgatcaaacggccagagctactgacccattcaaccaccgaagtgactcagccccggactaacacacctgttaaagaggattggaatgttcggatcacaaaactccggaagcaggtggaagagatctttaacctcaaattcgcccaagcactcggcctcacagaggcagtgaaggtcccctatcccgtgttcgagtctaaccccgaatttctctacgtcgaagggttgcccgaagggattcccttccgctctccaacgtggttcggaattccgcggctggagcgcatcgtcagggggtcaaataaaattaagtttgtagtgaaaaaaccagagttggtgatttcttatttgccaccaggcatggcctctaagattaacaccaaggccctgcagagcccaaagcgtcctaggtctcccggaagcaatagtaaggtgcctgagatcgaggtgacagtggaggggcctaataacaacaacccccaaacaagtgcagtgagaactcctacccagactaacggctcaaatgtacctttcaagcccaggggccgggagttcagtttcgaagcctggaatgcgaaaattaccgaccttaagcaaaaggtggaaaacctgttcaatgagaaatgtggcgaggccctagggctcaagcaagcagtcaaggtgccttttgcattattcgagtcgtttccagaagacttctatgtggagggccttccagaaggggtcccctttcgccgaccctctacattcggcatcccccggctggagaagatcctacgtaacaaggcaaagatcaagtttattatcaagaaaccagagatgttcgagaccgccataaaagagagtacaagtagcaagagtccaccccggaagattaattcttcccccaacgtgaacactaccgcttctggcgtggaggacctaaatatcattcaagtgaccatccccgacgacgacaatgaacgcttgtccaaagtcgagaaggctagacagttgcgggagcaagtgaatgacctgttctctagaaagttcggggaagccattggcatggggttccctgttaaggtgccctataggaagattactatcaacccaggctgcgtcgtggtggacggcatgcctcctggggtgagcttcaaggccccctcctatctggagatctcttctatgcgcagaattctggattctgctgagttcattaagtttacagtgatcagacctttcccaggcctggtcatcaacaatcaattagtggatcagagtgaaagtgagggtcccgtcatccaggaatccgcagagcctagccagttggaagtacccgccactgaagagatcaaagagaccgatgggtcaagtcaaatcaagcaagagcccgacccaacttggtag

SEQ ID NO: 118317 - DNA, 2937 bp, synthetic construct
  misc_feature 1..2937: note = Description of Artificial Sequence: Synthetic coding sequence
  source 1..2937: mol_type = other DNA
atggcacaagtggccatgtccaccttacccgtggaggacgaagagagctctgaatctcggatggtggtgacatttctgatgagcgccctggagtcaatgtgcaaggagttggcaaagtcaaaggctgaagtagcatgcatcgctgtgtacgagaccgatgtgttcgtggtgggaactgaacgcggaagggcctttgttaatactcgcaaggacttccagaaggacttcgttaaatactgtgtggaggaagaagaaaaagcggcagaaatgcataagatgaagtccacaacgcaggctaataggatgtcagtggatgccgtagagatagagacgctgcgaaagacagtggaagactacttctgcttctgctacggaaaggctctcggaaaatcaactgtggttcccgtgccatacgaaaagatgctcagggatcagagcgcagttgtcgtccagggcctgcccgagggagtggcattcaagcaccccgagaactacgatctagccacattgaagtggattctcgaaaacaaggctggtatcagcttcattattaagaggcctttccttgaacccaaaaaacacgtcggtggccgtgttatggtgacagacgcagacagatcaattttgagcccagggggttcctgtggccccataaaagtcaagacagaacccaccgaagatagcggaatcagcttagagatggccgccgttaccgtgaaggaggagtcagaggatcccgactactaccagtacaacattcagggatctcaccatagcagtgaaggaaacgaaggcaccgagatggaggtgcctgcagaggacagcacgcaacacgtgccaagtgagacatccgaggaccccgaggttgaggtgacaatcgaggacgatgactacagccccccatctaagcggcctaaggcaaacgagctgccgcaacctcccgtacctgagccagctaacgctggtaagcgcaaggtgagggaattcaactttgagaaatggaatgcaaggatcaccgacctaagaaagcaggttgaggagcttttcgaaaggaaatatgcccaggctattaaagcgaaaggaccagtaaccatcccttaccccctgtttcaatctcacgtcgaggacctgtacgttgagggactgccggagggcattcccttcaggagaccgtctacatatggcatccctcggctggaaagaatattactggctaaagaaagaattaggttcgttatcaaaaaacacgagctcttaaactccacgcgcgaggacttacagctggataagcccgcttctggcgttaaggaggagtggtatgcacggatcacaaagttgcggaagatggtggaccagctcttctgcaagaaattcgccgaagctcttgggtcaacagaagccaaggccgtcccctatcaaaagtttgaggcccaccccaatgatctatacgtcgaaggactgcccgagaacatccccttccgtagtccatcttggtatgggatacctcggctggagaaaatcatacaggtgggcaaccgtatcaaattcgttatcaagaggccagagctgctcactcattctactactgaagtcacccagccacgtactaatactcctgtgaaagaggattggaacgtgaggattaccaaactacgaaaacaggtagaagaaattttcaacctgaagttcgcacaggcactgggattgaccgaggccgtgaaagtcccttatcctgtttttgaatccaacccagagttcttatatgtagaaggtctccctgagggcattccatttcgttctccgacgtggttcggaatcccccgtctcgaacgtattgtgagaggaagcaacaaaatcaagtttgtggtcaagaaacctgaactcgttatatcatacctgccaccaggaatggcgtcaaaaattaataccaaggctctgcaatctcccaagcgtcctaggtcacccggctccaactctaaggtgcccgaaattgaggttaccgtggagggtcccaacaacaacaacccacagacgtcggccgtgcgtaccccgacacagactaatgggagcaacgtgccgtttaagcccagagggagggaattcagtttcgaggcttggaatgcgaaaataactgatctcaagcagaaggtagagaatctgtttaatgaaaaatgtggggaggctcttggactgaaacaagcggtgaaggtgccgtttgcgctattcgagagttttcctgaggatttctacgtcgaaggcctgcccgagggcgtgcctttccggcggccttctacttttggaatacctcgtctggagaaaatcctgagaaacaaagcaaagataaaatttataatcaaaaaaccggaaatgttcgagacagctattaaggagtccactagcagcaagtctccacccagaaagatcaacagttctccaaacgtcaataccacagcttccggagttgaggatctcaatatcatccaggtgactatccccgatgatgacaatgagagactgtcaaaagtggagaaagctcgacagctgcgggagcaggtgaatgatcttttttctagaaaattcggggaagcaataggtatgggctttcccgtgaaggtgccttatcgtaagattacgataaatccagggtgtgtggtggttgatggtatgccgcccggagtgagcttcaaagctcccagctatttagaaatcagctctatgagacgcattttggatagcgccgaatttatcaagtttacagtgatccgtccattccctgggctggtcatcaataaccaactcgtggatcagtccgagtcagaaggacccgtgatccaagagtctgctgaacccagtcaactagaggtaccagctaccgaagagatcaaggaaactgatgggtcgtcccaaataaagcaggaacccgatccaacctggtag

SEQ ID NO: 118318 - DNA, 2874 bp, synthetic construct
  misc_feature 1..2874: note = Description of Artificial Sequence: Synthetic coding sequence
  source 1..2874: mol_type = other DNA
atggctcaggttgccatgtccaccctgcccgttgaggatgaggagagcagtgagagccgaatggtggtgacttttctcatgtccgcccttgagtcgatgtgtaaggaactcgccaagtcaaaggccgaggtagcatgcattgcggtatatgaaactgacgtttttgttgtgggcaccgaaaggggacgcgcgttcgtaaatacacggaaggatttccagaaggacttcgttaagtactgcgtggaggaagaggagaaggccgccgaaatgcataaaatgaagagtactacacaggcaaatagaatgtccgttgacgctgtcgagatcgagacccttcggaaaaccgtggaggattacttctgcttctgctacggaaaagccctgggtaaatcgacagtagtgccggtcccctatgagaaaatgctgcgggatcagagtgcagtcgtggtccagggattgcctgaaggcgtggccttcaaacacccagaaaattatgacctcgcgacactgaagtggattctggaaaataaggctggaatctcctttattatcaagcgtccctttcttgaacctaagaagcatgtgggaggtagagttatggtcactgacgctgacaggtccattctatcacccggcggctcatgtggcccaatcaaggtgaaaactgaaccaaccgaggactcagggattagccttgaaatggcggcggtgactgttaaggaggaaagtgaagatcccgactactaccagtataacatacaggggagtcatcatagtagcgagggaaatgaaggcaccgagatggaagtccctgcggaggacgacgactacagtcccccatcaaagcgcccaaaggccaacgagctcccccagcccccggttcctgaacctgctaacgcgggaaaaaggaaggttagggagttcaattttgaaaagtggaacgccaggataactgacttaagaaagcaggtcgaggagttatttgagcgcaagtatgcccaggccatcaaggccaagggccctgtcactatcccttatccactctttcagtcgcatgttgaggacctctacgttgaggggctgccagaaggaattccttttaggagacctagcacgtatgggatccccaggctggagaggattttacttgcaaaggagcgcatcaggtttgtcatcaaaaagcatgaactgctgaattccaccagagaggatctgcagctggataagccagctagtggggtgaaggaagagtggtacgctcggattaccaaattgagaaagatggttgatcagctcttttgcaagaaatttgcagaagctcttgggtcaacggaggccaaggccgtcccatatcagaaattcgaggctcacccaaatgatctatacgtggaaggtctgcctgagaacatccccttcaggtccccatcctggtacgggatccctaggctggaaaaaatcattcaagtggggaaccgtatcaagtttgtgatcaaacgcccagagctgctgacacacagcacaacggaggttacgcaacctcgcactaacacccctgtgaaagaagactggaacgtccggatcacaaagctgaggaaacaggtcgaggaaatcttcaatctgaagttcgcacaagcgctgggcctcacagaggccgtgaaggtgccctacccagttttcgagtccaacccagagttcttatatgtggagggactccccgaagggatcccatttagatcgcccacctggttcgggatcccacggctcgagaggattgtgcgcggatccaataagatcaagttcgtggttaagaaacccgagctggtgataagctaccttccacctgggatggcgtccaagataaataccaaggcgcttcaatccccaaaacgccctcgctctcctgggagcaactccaaggtgcctgaaattgaggtcaccgtggaaggacctaacaacaataatcctcagactagtgccgtgcggaccccaactcaaaccaatgggagtaatgtgccttttaaacctagaggtagagaattctctttcgaagcatggaatgctaagattaccgacctcaaacagaaagttgagaatctgttcaacgaaaagtgtggagaagcactcgggctgaagcaggctgtgaaggtccccttcgcactgtttgaaagttttcccgaggacttctatgtggagggtctgcccgaaggagtgccttttaggaggcccagcactttcggaatcccccggcttgagaaaatcctgcgcaataaagcaaagatcaagttcattatcaaaaaacctgaaatgttcgaaactgccattaaagagagcacctcgagtaagtcacccccccgtaaaattaacagctcacccaatgtcaataccaccgcgtcgggggtagaggatttgaatattattcaggtaactatcccagatgatgacaacgaaaggctcagtaaggttgagaaagcacgtcaactgcgcgagcaagtgaacgacctgttttctaggaaatttggagaagccatcggaatgggctttccagtgaaagtaccatatagaaaaattacaattaacccgggctgcgtggtcgtggacggaatgcccccaggtgtctccttcaaagcccctagttacctggagatcagcagtatgcgaagaatactggactcagctgagtttataaagttcacagttatacggccatttccaggcctcgttattaacaatcagctcgtcgatcaatccgaatccgaaggcccagtgatccaagagagcgctgaaccctcccagctggaagttcctgctacggaggagataaaagagactgacggttcaagccagattaaacaagaaccagatccaacgtggtag

SEQ ID NO: 118319 - DNA, 321 bp, synthetic construct
  misc_feature 1..321: note = Description of Artificial Sequence: Synthetic coding sequence
  source 1..321: mol_type = other DNA
atggcccaagtcgccatgagtactctccctgtagaggacgaggagtcctctgagagcaggatggtggtcacctttctgatgtccgctttggagtcgatgtgtaaggaactggccaagagtaaggccgaagtggcctgcatcgctgtctatgagacggatgtttttgttgtgggcaccgaacggggaagggcctttgtcaacacacgtaaagatttccagaaagattttgtcaagtattgtgtagaggaagaggaaaaagctgccgagatgcataagatgaaatccactactcaggccaatcggatgagtgtggatgcatag

SEQ ID NO: 118320 - DNA, 825 bp, synthetic construct
  misc_feature 1..825: note = Description of Artificial Sequence: Synthetic coding sequence
  source 1..825: mol_type = other DNA
atggcccaagttgctatgagtacacttcctgtggaggacgaggagtccagtgaatccaggatggtggtgacgttcctgatgagtgccctggaatcaatgtgtaaagagctcgcgaaatcaaaagccgaagtagcttgtattgcggtgtacgagactgatgtgttcgtcgtaggaaccgaacgggggcgcgctttcgttaatacccgcaaagactttcagaaggatttcgttaaatattgcgttgaagaagaagagaaggccgcagaaatgcataaaatgaaatccaccacccaggccaaccggatgtccgtggatgcagtggaaatcgagactctccgcaagaccgtcgaagactacttctgtttctgctacgggaaagctctcggtaagtccactgtggtgccggtgccttacgagaagatgctgcgggaccagagcgcagtggtggtccagggcctgcccgagggcgtagccttcaaacatccagaaaactacgatctggcaaccttgaagtggatccttgagaataaagccggcattagctttattattaaacgcccctttctggagcctaagaagcacgtgggcggccgcgtgatggtcaccgatgcagaccgatctattctgagccctggcggctcctgtggaccgattaaggtaaaaaccgagcccacagaagacagcggcatctcgctcgaaatggctgcggtaactgtcaaagaggaatcggaggatccggactactaccagtacaacatccagggctctcatcatagtagtgagggaaatgaagggacagaaatggaggtgccagctgagggatag

SEQ ID NO: 118321 - DNA, 2982 bp, synthetic construct
  misc_feature 1..2982: note = Description of Artificial Sequence: Synthetic coding sequence
  source 1..2982: mol_type = other DNA
atgtccaccctccctgtggaggacgaggagagctccgaatcgagaatggtggtcaccttccttatgtctgccctcgagagtatgtgtaaggagctcgcgaagtctaaagccgaggtggcgtgtatcgctgtgtatgaaaccgatgttttcgtcgttggcacagagagaggacgcgcctttgtgaacacacgtaaggattttcagaaagattttgtcaagtactgcgtggaggaggaagaaaaagctgccgaaatgcacaagatgaaatctacaacccaggccaaccggatgtcagtggatgccgtggagatagagaccctgaggaagaccgtggaggactacttttgcttttgttatggaaaggctttaggaaaatccacagtggtgcccgtgccttatgagaaaatgctgagagatcagagcgcggtggtggtccaaggactccccgagggggtagccttcaagcatccagagaactacgatctcgctaccctgaaatggattctggagaacaaagcgggcatcagcttcatcatcaaaaggccttttcttgagcctaagaaacacgtaggaggtagagtgatggtaactgacgctgatagatctatcctctcgcctggaggttcctgtgggccaattaaggttaagactgagcccacagaagacagcgggatctccctggagatggcagccgtcacagtcaaggaggagagcgaagatcccgattactatcagtataatattcaagcaggtccttccgagaccgatgacgtggacgaaaagcagcctctgtctaagcccctccagggaagccatcactcctccgaagggaatgaaggcactgagatggaagtgccagccgaggactccacgcagcacgtgccaagcgagacatcagaggaccccgaggtggaagtgacgatcgaggacgacgattattcccctccctctaagaggcctaaggcaaacgagcttcctcagccaccagtccctgagccggcaaatgccgggaagcggaaagttagggagtttaacttcgaaaaatggaatgcgcggattacagatttaagaaaacaggtggaggagctttttgagcgaaagtatgcccaagccattaaggccaaggggccagtgactattccataccccctctttcagtcccacgtggaggacctgtacgtcgaaggtctgccagagggaattccttttaggcggcctagtacctacggaatccctcggcttgagcgcatccttttggccaaggagaggataagattcgttatcaagaaacatgagcttctaaattccaccagagaggacttgcaactggataaacctgcctcgggggtaaaagaggaatggtacgcacggattaccaagctccgtaagatggttgaccagctgttctgcaagaagtttgccgaggcattgggttccaccgaggcgaaagctgtgccctatcaaaagtttgaagctcaccccaacgatttgtacgtcgaaggactcccagagaacattccttttagatctcccagctggtatgggatcccccgactcgagaaaattatccaggtgggcaaccgcataaaatttgttatcaaacggcccgaattgctcacccacagcacaaccgaggtcactcagccccggacaaacactccggttaaagaggattggaatgtgcgaattactaagcttcgaaagcaggtggaagaaatttttaaccttaagttcgctcaggccttaggattaacagaagctgttaaggtcccttatcctgttttcgagtccaatcccgaatttctatatgtggaggggttgccagaggggatcccgtttagaagtcccacttggttcgggataccacggttggaacggattgtccggggctcgaacaaaattaagttcgtcgtgaaaaagcccgagttagttattagctatctgccccccgggatggcaagtaagatcaacacgaaagctctccagagccctaagcggccccggagcccaggaagcaactcaaaggtgcccgaaattgaagtgactgttgaggggccaaataacaacaaccctcaaactagtgcagtgcggacacccacgcagaccaatgggagcaatgttccgttcaaaccccgggggcgtgaatttagctttgaggcatggaacgccaaaataacggacttaaagcagaaagtcgaaaacttgttcaacgagaaatgtggtgaggcgttgggcttaaaacaggctgttaaagttccatttgctctgtttgaaagctttccggaggatttctacgtggaagggctgccagagggtgtccccttcagacggccctccacatttggcatccctcgccttgaaaagattctaaggaataaggccaagatcaagtttattattaagaaaccagaaatgtttgagaccgctattaaagagagtacaagctcaaagtcacctcctcggaagattaacagttccccgaatgtcaacacgaccgcttccggagttgaggacctgaatataatccaggtgacaattcctgatgacgacaacgaacggttgagcaaggttgagaaggctcgccaactcagggaacaggtaaacgaccttttctccaggaaattcggagaagccataggaatgggattcccggtaaaggtgccatatcgcaagattacaattaacccaggctgcgttgtggtggatggtatgcctccaggagtatccttcaaggctcctagctatttggagatctctagcatgcgtaggatattggacagcgcagagttcataaagtttaccgtgatacgcccttttccagggctggtcattaataaccagctggttgaccagagtgagtcagagggacccgtcatacaggaatccgccgagccttcccagttggaagtccccgctacagaggagataaaggagaccgatggctcctctcagatcaagcaggagccggaccccacctggtag

SEQ ID NO: 118322 - DNA, 642 bp, synthetic construct
  misc_feature 1..642: note = Description of Artificial Sequence: Synthetic coding sequence
  source 1..642: mol_type = other DNA
atggcagctgcagctgacgaaaggtccccagaggacggagaagatgaagaagaagaggaacagctcgtactggtcgaactctcagggattatcgactcagatttcctcagcaagtgtgagaacaagtgtaaagtgttggggatcgatacagaacggcctatactgcaggtggactcctgtgtgtttgctggggaatacgaggataccttgggcacatgcgtgatctttgaggagaatgtagagcatgcagacacagaagggaacaacaaaactgtgctcaaatataagtgtcacacaatgaagaaactctctatgactcggactctcctgacagagaaaaaagaaggggaggagaacatcgggggggtggagtggctccagatcaaggataacgacttctcctaccggcccaatatgatctgtaatttcctgcatgagaacgaggatgaagaggtagtagcatccgctccagacaaatccctggagttggaagaagaggagatccaaatgaatgattccagtaatctgtcatgtgaacaggagaagcccatgcatctagagatcgaggactcaggccctctaatcgatatcccttctgagacagaagggtccgtattcatggaaacacaaatgttgccatag

SEQ ID NO: 118323 - DNA, 2118 bp, synthetic construct
  misc_feature 1..2118: note = Description of Artificial Sequence: Synthetic coding sequence
  source 1..2118: mol_type = other DNA
atggccactgaggggatgattctcacaaatcacgaccaccaaatccgggttggagtgctgaccgtttctgactcctgcttcaggaatctggcagaggaccgcagcggcatcaatttaaaggacttggtgcaggacccctccctgctaggcggaaccatatctgcctataagattgttcccgacgagatcgaagagataaaagctaccaaggaagtgattgaacgcgaggcccccgggatggccttggcgatgctcatggggtccttaaacgttacacctctgggcatgctttcacggcccgtttgcggcattcgtgggaaaaccctcattattaatctccccgggtctaaaaagggcagccaggagtgcttccaatttatccttcctgccttgccacacgctatagatctattgagggatgccatcgttaaagtcaaagaagtgcatgatgagcttgaagaccttccttcaccaccacctcctctgagtcctccacctacaaccagtcctcataaacagaccgaggataagggtgtgcagtgtgaggaggaagaggaagaaaaaaaggattccggagtggcatctactgaagactcctcttccagccacatcactgcagccgctatagccgccaagatccctgattccatcatctcccgcggtgtccaggtccttccccgggacaccgccagcctttccactacaccttcagaaagtcctcgcgctcaggcaacttcgcggctgagtacagcctcctgccccacccctaaagtgcagtctaggtgcagttctaaggaaaacatcctgcgtgcttcccatagtgccgtggacattactaaggtggctagacggcacaggatgtccccttttcccctcacctccatggataaagccttcataaccgtcttggagatgacccccgtgttgggcactgagattatcaattaccgagacgggatgggccgcgtgctagctcaggatgtgtacgctaaagacaatctccctcccttcccggcatctgtcaaagacggctacgccgtgcgggccgccgatggacccggagaccggtttataatcggggaaagccaggccggggagcagccgactcagaccgtgatgcccggacaggtcatgcgggtgacaactggcgctcccatcccatgtggtgctgacgccgttgtgcaggtggaagacactgaactgatcagagaaagtgacgacggaaccgaagagttggaagtgcgaattctggtccaggcccgtcccggacaggatatcaggcctattggccacgatattaagcgcggtgaatgcgtgctggctaagggcacccacatgggtccatcagagatcgggttattggcaactgtgggcgtgaccgaggttgaagtgaacaagttccctgtggtggcggtgatgagtacgggaaacgagttactcaatcccgaggacgatcttctgcccgggaaaattcgggatagcaaccggtcaactttacttgccaccatccaggagcacggatatcctactattaatttagggatagtgggcgacaaccctgacgatcttttgaatgcgctgaacgagggcatcagtcgtgccgatgttatcatcacaagcggtggagtgtcaatgggtgagaaagattatctaaagcaggtgctggacatcgatctacatgcacagatccactttggtagggttttcatgaaacctggccttccgacaacctttgctactttagacattgatggagtgcggaagattatttttgctctcccagggaatccagtgtctgccgtggttacttgcaatctgtttgtcgtgcctgccctacgcaaaatgcaaggcattttggaccctcgaccaactatcattaaggcccgcctaagctgtgacgtgaagctcgacccgcggcccgagtatcatagatgtatattaacatggcatcaccaggagccattaccctgggcacagagtaccggtaatcagatgtcgtccaggctgatgtcaatgcggagcgccaacggcctgttgatgttacccccaaaaactgaacagtacgtcgagcttcataagggcgaagtcgttgatgtcatggtaattggtcggctgtag

SEQ ID NO: 118324 - DNA, 2211 bp, synthetic construct
  misc_feature 1..2211: note = Description of Artificial Sequence: Synthetic coding sequence
  source 1..2211: mol_type = other DNA
atggcaacggaggggatgatacttactaatcacgaccaccagattcgcgttggtgttctcactgtctcagactcgtgtttccggaatctggccgaagacagatctggcattaacctcaaagacctcgtgcaggacccatcccttttgggcgggacaatctcagcctacaaaatcgtccccgacgaaattgaggaaatcaaagaaaccttaatcgactggtgcgatgagaaggagctgaacctcatactgacaactggcggcaccgggtttgcaccaagagatgtaactccggaggccactaaggaggtgatcgagcgcgaggcacccggtatggccctcgccatgctaatgggctctctaaatgtaacacctctgggcatgttaagtcgacccgtatgcggcatcagaggaaagacactcattatcaacctcccaggaagcaagaagggaagtcaagaatgctttcagtttatcttgccagccctgccacacgccattgatctgctcagagacgccattgtgaaagtgaaggaggttcacgatgagctcgaggacttgccctcacccccgcctccattatcacctccccctacaacatccccccataagcagaccgaggacaagggtgtccagtgtgaagaggaagaggaggaaaagaaggactccggtgttgcatccactgaggacagttcgtcctcccatatcactgccgcggcgattgccgcgaaaatccccgattccataatttcgagaggagttcaggtgctacctcgggatactgcttctctgtccaccactccttcagagagcccgcgggcgcaggcaacctcacgactttccaccgcttcctgtcctacacccaaggtgcagtctaggtgttcatctaaagaaaacatactgagggctagccactccgctgtagacattacgaaggtggctcgaagacaccgcatgtcccccttcccgttgaccagtatggataaggccttcattacagttctggagatgacaccagtgctgggcactgaaataatcaattacagggacgggatgggcagagtgctggctcaagacgtgtacgccaaggacaacctccctccgttccctgcatcagtgaaagatggatatgctgttcgcgcggccgatggacccggggatcgattcatcattggcgagagtcaggctggggaacaacctacccagaccgttatgccaggacaggttatgcgagttacaacaggcgctccgatcccttgtggcgccgacgcagtggttcaggtggaagatactgagctgatccgggagtcagatgacggaacagaggaactggaggtaagaattttagtgcaggctcgcccaggtcaagacattagacctattggccacgacattaaacggggggagtgtgtcctggccaaaggcacacatatgggtcccagcgaaattgggttactagcaacggtgggcgtgactgaggtcgaagttaacaagtttcctgttgtcgcagttatgtccacaggtaacgagcttctgaacccggaggacgacttgctcccagggaaaatccgcgattctaataggagcactttgttagcgaccattcaggagcatggctatcccaccattaatctggggattgtgggagataatccggatgatctcttaaacgcactgaacgagggcatttcaagggccgacgtcataattacgtccggcggtgtatccatgggggaaaaggactaccttaaacaggtgttagacattgatctgcacgcacagatccactttgggagggtctttatgaaaccagggctgcctacgacattcgcaactttggatatagacggcgtgagaaaaataatatttgcacttcctgggaaccccgtttctgctgtggtcacatgcaatctcttcgtggtgccagctcttcgtaaaatgcaggggatcctggacccccggcctaccatcattaaggcccgacttagctgtgacgtcaagctggaccccaggccagagtaccaccgatgtatactcacttggcatcaccaagagccgttgccctgggcccagagcacaggaaaccaaatgtcatccagactcatgtccatgaggtctgcgaacggcctacttatgctcccccccaagaccgaacagtacgttgagcttcataagggtgaggtcgtggatgtcatggtcattggcagactgtag

SEQ ID NO: 118325 - DNA, 2310 bp, synthetic construct
  misc_feature 1..2310: note = Description of Artificial Sequence: Synthetic coding sequence
  source 1..2310: mol_type = other DNA
atggctaccgaaggaatgatattgaccaaccacgatcatcagatccgagtaggtgttttgaccgtcagtgactcctgctttagaaacctggccgaggataggtcaggtatcaacctgaaggatttagtgcaagatcccagcctgttgggcggtacgatctccgcctataagattgtgccagacgagattgaagagataaaagagactttgattgattggtgcgacgagaaagagctgaatctgatcttgaccaccggcggcacaggattcgcccctagggatgtcaccccagaggccactaaggaggttatcgagagagaggcacctggaatggctctcgcaatgctaatgggctccctcaatgttacccctctaggaatgttgagcaggcccgtttgtggtatccgcggtaagaccctgattatcaatctccctgggagcaagaaggggtctcaagaatgtttccagtttattcttccggccttgcctcacgcaattgacctgctccgggacgctatagtgaaagtgaaagaagtccatgatgagttggaggaccttccctccccccctccacccttaagccccccaccaactaccagcccccacaagcagactgaggataagggtgtccagtgcgaggaggaggaagaggagaaaaaggatagtggcgtggcctccactgaggactccagctccagccatattaccgccgctgcaatcgcagcgaagaaacaccccttctatacgagccccgctgttgtgatggcacacggcgaacagcccatcccaggcctgattaattacagccaccactccaccgatgaaagaatccctgactccattatctctaggggtgtgcaggtcctccccagggataccgccagtttatccacgactccttccgagagcccacgcgcacaggcaacatcacgcctgtcgaccgcatcctgtcctacgcccaaagtccagtcccggtgctcttctaaggaaaatatcctcagggctagtcatagtgcggtcgacatcaccaaggtggccaggaggcacaggatgagcccatttcccttaacatctatggataaggcgttcatcacggttttagaaatgaccccagtactcggcacagagattattaactatcgcgatggcatgggcagagtgctggctcaggatgtttacgccaaggataatcttccacccttccccgcttctgtgaaagatggctacgccgtacgggccgctgacgggcccggcgaccggtttattataggggaatcacaagcgggggagcagccgacacagacggtcatgccagggcaggtgatgcgggtcacaacaggtgcaccgatcccatgcggggcagacgccgtggtgcaggtggaggatacagaattaattcgcgagtcggatgacggcacagaagagctcgaggtacggattctggtacaggctagacccggtcaggatatacgccctatcggacacgacatcaagcggggggagtgtgttctggccaaggggacacacatgggcccctctgaaatcggccttttagccactgttggggtgacagaggttgaagtgaacaaatttccggtggttgccgtgatgagcaccggtaatgaactgctcaaccctgaggatgatctgctgccagggaagatccgcgattctaaccgtagtaccctcttagccaccattcaggaacacggataccctacaattaatcttggcattgtcggcgataatcccgacgacctgctgaacgccttgaacgaggggatcagccgggctgacgtcattataaccagcggcggtgtgagtatgggggagaaagattatctgaaacaggtgctggacatcgacctgcatgctcagatccactttggcagagtctttatgaaaccaggcctccctacgaccttcgctacattagacatcgacggcgtcagaaagattatttttgctttgcccgggaatccagtctccgcagttgtgacttgtaacctgtttgtagtgcctgcactccgaaagatgcagggcatcctggacccccggcccactatcatcaaagcccggctgtcatgtgacgtgaaactggacccgagacccgagtatcacagatgcatcctcacatggcaccaccaggaaccactaccatgggcacaatctaccggtaaccagatgtcgagcagactcatgagcatgcggagcgctaatgggctcctgatgcttccccctaaaacagaacagtacgtcgaactgcacaaaggagaggtagtcgatgttatggtcatcgggaggctgtag

SEQ ID NO: 118326 - DNA, 903 bp, synthetic construct
  misc_feature 1..903: note = Description of Artificial Sequence: Synthetic coding sequence
  source 1..903: mol_type = other DNA
atggagaaaacgcaggagactgtgcagcgcattctgctcgagccatataaatacttgctgcagctgcccgggaagcaggttcggaccaagctgagtcaggccttcaaccactggttaaaagtgccagaggataagcttcagatcattatcgaggtgaccgaaatgctgcacaacgcctcactgctgatagacgatatcgaggacaacagcaagctaaggcggggtttcccggtcgcacactcgatctacgggatacctagcgtcataaattccgcgaattacgtgtatttcctggggcttgaaaaagtactgacacttgaccatcccgatgcggtcaagctgttcacacggcagttgctcgagctccatcagggccagggcctggacatatattggcgggacaattacacatgtcctactgaagaggagtataaggcaatggtgttgcagaagacgggtggactctttggcctggcagttggcctgatgcagctgttctccgactataaagaggacctcaaacctctcctgaataccctgggtttgttctttcagattagggatgattacgccaacttgcactccaaagagtacagtgaaaataagtccttctgcgaggacttgacagaaggtaaattctcattcccgaccatccacgctatctggtccaggccagagagcacacaagttcagaacatcctgagacagaggacagagaacattgacatcaagaagtactgcgttcattatctggaagatgtcggcagttttgaatatacccggaacactcttaaggaacttgaagctaaggcttacaaacagatcgacgctaggggcgggaaccctgagctggtagctctggtgaagcaccttagcaaaatgttcaaggaggagaatgaatag

SEQ ID NO: 118327 - DNA, 903 bp, synthetic construct
  misc_feature 1..903: note = Description of Artificial Sequence: Synthetic coding sequence
  source 1..903: mol_type = other DNA
atggaaaagacacaagagacggtgcaaagaatcctgctagaaccatacaagtatctgcttcagctgcctgggaagcaggttaggacaaaattaagccaggctttcaaccattggttaaaggtccctgaagacaaattgcagattatcattgaagtgactgagatgcttcacaacgcaagtctgcttatcgacgacatcgaggataacagtaagctccgaagaggcttcccagtggcccactcaatttatgggattccctcggttatcaattctgccaactatgtatattttctcggtctggaaaaagttctcaccctagatcacccggatgctgtcaagttgtttacacgtcagttactggagctacaccagggacagggtctggacatatattggagagataactatacatgtccaacagaagaagagtataaggcaatggtgctgcaaaagaccggggggctgtttgggctcgcggttggccttatgcagctgttcagcgattataaagaggatctcaagccacttctcaacacgcttggactgttttttcagatccgggacgattatgctaatctgcactccaaggagtactcggagaacaaatcattttgtgaggaccttaccgaaggcaaattttcctttcctactatccacgccatctggtcgagacccgaatcaacacaagtgcagaatatcctgcgtcagcggacagaaaacattgatattaagaagtattgtgtgcactacctcgaggacgttggctctttcgagtacacccggaacactttaaaagagctggaagctaaggcttacaagcagatagatgctaggggcggaaatcctgagctagtcgctctagtcaagcatttatcaaaaatgtttaaggaagaaaacgagtag

SEQ ID NO: 118328 - DNA, 729 bp, synthetic construct
  misc_feature 1..729: note = Description of Artificial Sequence: Synthetic coding sequence
  source 1..729: mol_type = other DNA
atggagaagacccaggagaccgtacaacgcatccttttagagccttacaagtatttactgcaacttccaggaaagcaggtccgtacaaagttaagccaggcgttcaatcactggcttaaagttccagaggacaaactgcagattataatcgaggttacagaaatgttgcacaacgcttctctgctgatcgacgacatcgaggacaatagcaagctgagacgcggcttccccgtggcccacagcatctatggtataccttccgtaattaacagtgcaaattacgtatatttcctagggttggaaaaagtcctgacgctagaccatccagacgcagtgaaactgttcactagacagctgttagagctgcaccaggggcagggcctggatatctattggcgggacaactacacctgtccaacagaggaggagtacaaagctatggtgctgcagaaaacaggcggcctctttgggctcgctgttggcctgatgcagctgttcagcgattacaaagaggacctgaagcccctcttaaacactctggggttgttcttccaaatcagggatgattatgcgaatctccacagcaaagagtactccgagaacaaatccttctgcgaagacctgaccgagggcaagttcagtttcccaaccatccatgctatatggagccgtccagaatccactcaagtgcaaaatattctcaggcaaaggacagaaaacatcgactag

SEQ ID NO: 118329 - DNA, 903 bp, synthetic construct
  misc_feature 1..903: note = Description of Artificial Sequence: Synthetic coding sequence
  source 1..903: mol_type = other DNA
atggagaagacgcaggaaacagttcagcgtattctgctggagccctacaagtatctactccaactgcctgggaagcaggtgcggacaaagctcagtcaggcatttaatcattggcttaaggtgcctgaagacaaattgcagatcattattgaagtcactgagatgctacataacgcctctctgcttatcgatgatattgaggataacagtaaactccgaagaggtttcccggtggcccactccatctatgggattccatctgtgataaactcggctaactacgtgtattttctggggctcgagaaggttttgacattagatcatccggatgctgtaaagctttttacacggcagcttctcgaactacatcagggacagggcctcgatatctactggcgagacaattatacgtgccctaccgaggaagagtataaggccatggttttgcaaaaaactggtgggttgtttggcctggccgtaggactgatgcagctgttttccgattacaaggaagaccttaagcccctgctcaacaccctggggctatttttccagatccgcgacgactatgcaaacttacatagcaaggagtattccgaaaataagtccttttgcgaagacctcaccgaggggaaattctccttccccacaatacacgcaatatggagccggccagagtccacgcaggtgcaaaatatccttcgtcagagaaccgagaatatcgatatcaaaaaatactgtgtccactacttggaagatgtgggcagctttgaatacacaaggaacaccctcaaagaactagaggccaaggcctataaacaaatcgatgcccgcgggggaaaccccgagctggtagcattggtgaaacacctctctaaaatgtttaaagaagagaacgaatag

SEQ ID NO: 118330 - DNA, 903 bp, synthetic construct
  misc_feature 1..903: note = Description of Artificial Sequence: Synthetic coding sequence
  source 1..903: mol_type = other DNA
atggagaagacgcaggagaccgtccagcgtatcttgctggagccgtataaatatcttcttcagttgccagggaaacaggtccggaccaaattaagccaggcttttaaccattggctgaaagtgcctgaagacaagttacagatcattattgaagtaaccgagatgctccataacgcctctctgcttatcgacgatattgaagacaactcaaagttgagacgcggatttcccgtcgcacacagcatctatggcattccgtccgttataaactccgccaactatgtgtacttcctgggtcttgagaaagtccttactcttgaccacccagacgccgtgaagctgttcaccaggcaactcctggagctgcatcagggccagggcctggacatctactggagagataattatacttgtcctactgaagaggagtacaaagcgatggttttgcagaagaccggagggctatttggcctggccgtcggtcttatgcaactgttctccgattataaagaagatctcaaacccctactgaataccctcggcctattctttcaaattcgggacgattacgctaacttgcactccaaagaatatagtgagaataagtccttttgcgaagacttgaccgaagggaaattctctttccccactatccacgccatttggtcacgacccgaatccacacaggtgcagaatatcctgcgccagaggacagaaaatatcgacatcaaaaaatattgcgtccattacttggaggacgtggggagttttgagtacactagaaatactttaaaggagctcgaggcgaaggcctataaacagattgacgcccgcggaggcaatccagaattggtcgccttggtgaagcacttgagcaagatgtttaaggaagagaatgagtag

SEQ ID NO: 118331 - DNA, 693 bp, synthetic construct
  misc_feature 1..693: note = Description of Artificial Sequence: Synthetic coding sequence
  source 1..693: mol_type = other DNA
atggagaaaacccaagagaccgttcagcgcatcctcctggaaccttataagtatttgcttcagctaccaggtaagcaggtgcgtacaaagctctcacaggccttcaaccactggttgaaggtaccggaagacaagcttcaaattatcatagaggtgaccgagatgctacacaatgcctccttgttaattgacgacatcgaggacaatagcaaactgcggagaggctttcctgtggcacactccatctacgggatcccatccgtcattaactctgcaaattacgtgtactttctgggactggagaaagtcctaacactggaccacccggatgcagtgaagctctttacccgccagttgctcgaacttcaccagggacaggggcttgatatctactggcgtgataactacacttgtcccaccgaggaagaatacaaagccatggttttgcagaagaccggcggactttttgggttggctgtgggcctgatgcagctgtttagcgactataaagaagacctaaagcctctcctgaataccctgggtctgttctttcagattcgagacgactatgcgaatctgcactccaaggaatattctgaaaataagtctttttgtgaagatcttactgaaggaaaattctctttccctaccatccacgccatttggagtaggcccgagagtacccaggtctag

SEQ ID NO: 118332 - DNA, 537 bp, synthetic construct
  misc_feature 1..537: note = Description of Artificial Sequence: Synthetic coding sequence
  source 1..537: mol_type = other DNA
atggggaattcattactgcgagaaaaccgaaggcagcagaacacccaggaaatgccgtggaacgtgcgcatgcaaagcccaaaacagcgtacatctagatgctgggaccaccacatcgcagaagggtgtttctgtctgccctggaagaaaattctgatcttcgagaagcggcaggattcccagaatgaaaacgagaggatgagctccacgcccattcaggacaatgtggaccagacctacagcgaggagctgtgttacacgctcataaatcatagagtgctgtgtaccaggcccagtggaaatagtgccgaagaatactacgaaaatgtgccgtgcaaagctgagcggcctagggagtccctgggaggcactgagaccgagtattctctgctgcacatgccaagcacagaccctcgtcatgctcggagtccagaagacgagtacgaactgttgatgccccacagaatcagcagccacttcctgcagcagccacgacctttgatggccccgagcgaaacgcaattctctcatctgtag

SEQ ID NO: 118333 - DNA, 492 bp, synthetic construct
  misc_feature 1..492: note = Description of Artificial Sequence: Synthetic coding sequence
  source 1..492: mol_type = other DNA
atgggtaacagcctgcttagggagaatagacggcagcagaacacccaagaaatgccatggaatgtgcgtatgcagagtccaaagcagcgcacgtcacggaaaaagatccttatttttgagaaacgccaggacagtcagaacgagaacgagaggatgagctcaacacctatacaggataacgtggaccagacctactccgaggagctctgttataccctcataaaccatcgtgtgctctgtaccagacccagtggcaacagcgccgaggagtattatgagaacgtcccatgcaaggcagaacggccacgagaatccctaggaggtacagagaccgagtattctctgcttcacatgccatcaaccgatccacgtcatgcgagaagcccagaagatgaatacgagttgctgatgcctcatcggataagcagccacttcctacagcagccgaggccattgatggctccatccgagacacagttttcacacctgtag

SEQ ID NO: 118334 - DNA, 543 bp, synthetic construct
  misc_feature 1..543: note = Description of Artificial Sequence: Synthetic coding sequence
  source 1..543: mol_type = other DNA
atgggtaacagtctgctgagggagaatagctttagaaggcaacagaacacacaggagatgccttggaatgtgcggatgcagtctcccaaacagagaacttccagatgctgggatcatcatattgccgaagggtgcttttgtttaccctggaagaagattttgatatttgagaagcgccaagactctcagaacgagaatgaaaggatgagtagcaccccaatccaggataatgttgaccagacatattcagaggaattgtgttacactttaatcaaccacagggtgctgtgtactcgccctagtggaaatagcgctgaagaatattacgaaaacgtcccctgcaaggccgagcgcccgcgggagagccttggtgggaccgaaactgagtattcactgcttcacatgccttccacagatccaaggcacgcgcggtccccagaggacgagtatgagctcttgatgcctcaccggatctcttcccactttctgcaacagcccaggccactaatggcaccatccgaaacgcagttttcccacctttag

SEQ ID NO: 118335 - DNA, 351 bp, synthetic construct
  misc_feature 1..351: note = Description of Artificial Sequence: Synthetic coding sequence
  source 1..351: mol_type = other DNA
atgccttctcccggtacagtgtgttccctcctgttgctggggatgctgtggctggacctcgccatggccgggagttccttcctcagcccagaacatcagagagtacagaggaaagaatccaaaaagcctcccgccaaacttcaaccacgcgccttagccggctggctgcgtcccgaagacggcgggcaggctgaaggcgccgaagatgagttggaagtgcgttttaatgctccctttgacgtgggaattaagctaagtggcgttcagtatcaacaacattcacaagccctcgggaaattcctgcaagacattctttgggaggaggccaaggaagcccccgccgacaagtag

SEQ ID NO: 118336 - DNA, 354 bp, synthetic construct
  misc_feature 1..354: note = Description of Artificial Sequence: Synthetic coding sequence
  source 1..354: mol_type = other DNA
atgccttctccagggacggtgtgttcgctactgttgcttggaatgctatggctagaccttgctatggcgggctcatctttcctgtccccagagcaccagagggtacagcagcgcaaggaatccaagaaaccgcccgccaaactgcaaccacgcgccttggctgggtggctccggcccgaagacggcggccaggctgagggcgccgaagatgagctagaggtgaggtttaatgcacccttcgatgtgggcatcaagctgtcgggggtccagtatcagcagcactctcaggcattggggaaattccttcaggatattctctgggaggaggctaaggaggctccggccgacaaatag

SEQ ID NO: 118337 - DNA, 276 bp, synthetic construct
  misc_feature 1..276: note = Description of Artificial Sequence: Synthetic coding sequence
  source 1..276: mol_type = other DNA
atgcccagcccgggcactgtttgctcccttctgctcctcggcatgctgtggcttgaccttgcaatggccggctcatcatttttgtcgccggaacatcagcgggttcagcaacgaaaagaaagtaaaaagcccccagctaagttgcagcctcgagctctggctgggtggttacgccccgaggacggcggacaggccgagggagcagaagacgagttggaagtccgccgaccccagcccacaagtgatagaccccaggctctcctgacaagcctatag

SEQ ID NO: 118338 - DNA, 102 bp, synthetic construct
  misc_feature 1..102: note = Description of Artificial Sequence: Synthetic coding sequence
  source 1..102: mol_type = other DNA
atgccctcacctgggaccgtgtgctccctgctgctgctgggtatgctgtggttagatctggctatggctgggagctcctttctcagccctgaacaccagtag

SEQ ID NO: 118339 - DNA, 354 bp, synthetic construct
  misc_feature 1..354: note = Description of Artificial Sequence: Synthetic coding sequence
  source 1..354: mol_type = other DNA
atgccgagtccaggaacggtctgtagtttgcttctcctgggcatgctttggctggacctggcaatggccggctcttcttttttgtctcctgaacaccagcgagttcagcagagaaaagagtctaaaaagcctcccgccaaattgcaaccgagggccctagctggctggctgcgccccgaggatgggggacaggcggaaggcgctgaggatgaactggaagtcaggtttaacgccccgtttgatgtgggcattaaactgtccggcgtgcagtatcagcagcactctcaggccctgggaaagttcttgcaagacatcttgtgggaggaagccaaagaggccccagccgacaaatag

SEQ ID NO: 118340 - DNA, 351 bp, synthetic construct
  misc_feature 1..351: note = Description of Artificial Sequence: Synthetic coding sequence
  source 1..351: mol_type = other DNA
atgcccagccctggaactgtgtgtagtctgctcctattgggaatgctctggttggatctggcaatggcgggctccagctttctgtcacctgagcaccagcgtgtccagcggaaggagtctaagaagcccccagccaaattgcagccccgcgccctggcgggctggctgagacctgaagacggcggtcaagctgagggcgccgaagatgagttggaggtgagattcaatgcacccttcgacgtagggatcaaattgtctggcgtgcagtatcagcaacactcccaagcgttaggaaaatttctccaggacatactgtgggaagaggctaaggaagccccagctgataagtag

SEQ ID NO: 118341 - DNA, 318 bp, synthetic construct
  misc_feature 1..318: note = Description of Artificial Sequence: Synthetic coding sequence
  source 1..318: mol_type = other DNA
atgttcacctgttggtggtcctatcttcgtagcactctcgccgccgtgccgggcgaagcatcccgcgttcagcaacgcaaagaaagcaagaaaccccccgcaaaattgcagccccgcgccctggcaggatggctccgcccagaagatggtggacaggcagagggggctgaagacgagctggaagtgcgcttcaatgcaccttttgatgttggcatcaagctcagcggggtccagtaccaacagcatagccaagccctgggcaagtttctgcaagatattctgtgggaggaagccaaagaagcacccgctgacaaatag

SEQ ID NO: 118342 - DNA, 201 bp, synthetic construct
  misc_feature 1..201: note = Description of Artificial Sequence: Synthetic coding sequence
  source 1..201: mol_type = other DNA
atgtttacttgctggtggtcataccttagatctaccctcgctgccgttcccggagaggccagccgggtgcaatttaacgccccatttgacgtaggtatcaagctttcaggggtgcagtaccagcagcactctcaggcgctgggaaagtttctgcaggacatcctgtgggaggaagctaaggaagcacctgccgacaagtag

SEQ ID NO: 118343 - DNA, 315 bp, synthetic construct
  misc_feature 1..315: note = Description of Artificial Sequence: Synthetic coding sequence
  source 1..315: mol_type = other DNA
atgttcacgtgctggtggagctaccttaggtcaaccctggccgccgtgcccggggaagcaagccgtgttcaacggaaggagagcaaaaaacctccggcaaaattgcaaccaagggcccttgctggctggctgagaccggaggatggagggcaggcagagggagccgaagacgagctggaggtccgctttaacgctcctttcgatgttggtatcaaattgtcgggcgttcaatatcagcagcactctcaggcactcgggaaatttctgcaggatatcctgtgggaggaggccaaagaggccccagcggacaagtag

SEQ ID NO: 118344 - DNA, 351 bp, synthetic construct
  misc_feature 1..351: note = Description of Artificial Sequence: Synthetic coding sequence
  source 1..351: mol_type = other DNA
atgccgagccctggcaccgtctgtagcctcctgttgctcgggatgttatggcttgatctggccatggccggatcatcattcctctcaccagaacatcaacgcgtccagcgtaaggagtccaagaaaccacctgctaaactccagccgcgggccttggccggctggttgcggcccgaagatggcggtcaggcggaaggggcggaagacgaactggaggttaggtttaacgctccctttgacgtgggcatcaagctgtccggggtgcagtaccagcagcactcacaggcgctgggcaagttcctgcaggatatattgtgggaagaggcaaaggaggctcccgctgacaagtag

SEQ ID NO: 118345 - DNA, 354 bp, synthetic construct
  misc_feature 1..354: note = Description of Artificial Sequence: Synthetic coding sequence
  source 1..354: mol_type = other DNA
atgccctctcccggcactgtctgctcccttttactactgggaatgctgtggctcgacctggctatggccggcagcagttttctgagtcctgagcatcaacgtgtgcagcagcggaaagaatctaaaaaaccacctgcaaaattgcagccccgggcgctggcaggctggttgcgccccgaggacggtgggcaggcagagggcgcagaggatgaactggaggttaggtttaatgcgcctttcgacgtggggatcaagttatctggcgtacagtaccaacaacactcccaggctcttgggaagttcttacaggacatcctgtgggaggaggctaaggaggccccagctgataaatag

SEQ ID NO: 118346 - DNA, 354 bp, synthetic construct
  misc_feature 1..354: note = Description of Artificial Sequence: Synthetic coding sequence
  source 1..354: mol_type = other DNA
atgcccagtcccgggacagtgtgctccctcctgctattagggatgctatggctggacctggctatggctgggtcatccttcctgagtcctgaacaccaacgggtgcaacaaagaaaggaatctaagaagccaccagctaagttgcagcctcgggctctggctgggtggctgcgccctgaggacggcggtcaagctgaaggcgcagaggacgaacttgaggtgcggtttaacgcccccttcgacgtgggcattaaactgagcggagttcagtatcagcaacattcccaagcgctcggcaaatttctacaggacattctctgggaggaggccaaagaggctccagccgacaaatag

SEQ ID NO: 118347 - DNA, 1794 bp, synthetic construct
  misc_feature 1..1794: note = Description of Artificial Sequence: Synthetic coding sequence
  source 1..1794: mol_type = other DNA
atggcagagggttctgcagtctctgacccccagcacgccgccaggttactccgcgctttgtccagcttccgggaagaatcacggttctgtgatgcacatcttgtgctggatggagaagaaataccagtgcagaaaaacatcctggcagctgcttcaccatacattagaactaaactcaactataatccccccaaggacgacgggagcacatacaagatcgaactcgaaggaatctccgtgatggtgatgagggaaattttagactacatctttagtggacaaattaggctcaacgaggacaccatccaggacgtcgtgcaggcagccgatctcctgctgttaaccgatttgaaaactctgtgttgtgagtttttggaaggctgtattgccgctgagaattgtattggaatccgggattttgccctacactactgtctgcaccacgttcactacctcgcgacggagtacttagagacgcacttccgtgacgtaagctctaccgaagaattcctcgaactcagtccccagaaattgaaagaagtgatctccctcgagaaacttaatgtcgggaacgaacgctacgtgtttgaggcggtgattaggtggattgcccacgacactgaaatcaggaaggtccatatgaaggacgtgatgagcgccctgtgggtctcaggcctggatagttcctatctgcgtgagcaaatgttaaatgaaccactggttagagagattgtgaaagaatgctccaatatccctctcagccagcctcaacagggggaggcaatgctggccaattttaaaccccgaggttacagcgaatgtatagttactgttgggggcgaggaacgcgtgagccggaaacccaccgctgccatgcgctgtatgtgcccgctgtacgaccctaacaggcagctgtggatagaactggccccactgtcaatgccgagaataaatcacggcgttctgagcgccgaggggttcttgttcgtgtttggaggccaggatgaaaacaagcaaacattgtcaagcggagaaaaatatgacccagacgctaatacttggactgccttgccccctatgaacgaagccaggcataatttcgggattgtggaaatcgacggaatgctgtacattctgggaggcgaagatggtgagaaagaattaatttctatggagtgttatgacatctatagcaaaacatggactaaacagccagatttgacgatggtacgtaaaatcggatgttatgcagccatgaagaaaaagatctatgccatgggaggtgggtcctatgggaagttgtttgaatcggtggaatgctacgatccaagaacacagcagtggacagcgatctgccctttgaaagagagacggtttggcgctgtggcttgcggagtggcaatggagctgtatgtgtttgggggcgtgaggtccagagaggacgcccagggtagtgagatggtgacttgcaagagcgaattctaccatgatgaattcaaaagatggatttatttaaacgatcagaatctgtgtatcccagcttcgagcagctttgtttatggggccgtcccaattggcgcctcaatttacgtgatcggcgatctagataccggcactaactacgattatgtcagagagtttaaaagatctaccggcacttggcaccacacaaagccgttgctgccttccgatctgaggaggactggctgcgctgctctccggatagcgaactgcaagctattcaggctccaactgcagcaggggctttttcggatccgcgttcactccccttag

SEQ ID NO: 118348 - DNA, 591 bp, synthetic construct
  misc_feature 1..591: note = Description of Artificial Sequence: Synthetic coding sequence
  source 1..591: mol_type = other DNA
atgttctgcgaaaaggctatggaactaattcgtgaactgcaccgtgcacccgagggccagctcccagcgttcaacgaggatggcttgcggcaagtgcttgaagaaatgaaggctctctatgaacagaaccagtctgatgtgaatgaggcaaaaagcgggggtcggtctgacctaattcccacaatcaagttccgtcactgttccctgctcaggaaccgacgatgtactgtggcatacctttacgacagactcttaagaatacgcgccctgcgttgggagtatggctctgtgctgccaaacgctctgcggttccatatggccgccgaggaaatggaatggtttaataactataagcggagcctggccacatacatgagatccctaggcggggatgaaggtctggacatcactcaagatatgaaacctcctaagtctctgtacatagaggttcggtgcttgaaagactatggggagtttgaagttgatgatggaacctctgtgcttttgaagaagaacagccagcacttcctgccgcgatggaagtgtgagcagctgataagacaaggcgttctggaacatatactttcctag

SEQ ID NO: 118349 - DNA, 498 bp, synthetic construct
  misc_feature 1..498: note = Description of Artificial Sequence: Synthetic coding sequence
  source 1..498: mol_type = other DNA
atgttttgtgagaaagcaatggagctcatcagagaactgcatagggcccccgagggccagctgccagcttttaacgaagacgggctgaggcaggtgctggaagagatgaaggccctgtatgagcagaatcagagtgatgtaaacgaggctaagtctggaggtcgatccgacctgattcccacaatcaagttcagacattgttccctgctgcgcaaccggaggtgtaccgtggcatatctgtacgaccgtctgctgcgaattagggctctgcggtgggaatatggcagtgtgctgccgaatgcgttgagattccacatggcagccgaagagatggagtctagatctgttgcacaggcgggcgttcagtggtgtattttatgttccctccaacttcctcctcctggattcaagcagttttcctgtctgagcctcccatccagctgcgattatagatggagcgggttgattatcattaaggacttgctgctgctgatttag

SEQ ID NO: 118350 - DNA, 558 bp, synthetic construct
  misc_feature 1..558: note = Description of Artificial Sequence: Synthetic coding sequence
  source 1..558: mol_type = other DNA
atggatgccgctgaggtcgaattcctggcagagaaagagctcgttaccatcattcctaacttctcactggataaaatctatcttatcgggggcgacctaggaccgttcaatccagggctaccggtggaggtgcccctttggttagccatcaatctgaagcaaagacagaagtgccgcctgctccccccagagtggatggacgtcgaaaagctggagaaaatgcgagaccatgagcggaaagaggagacctttaccccaatgccaagtccatactacatggagcttactaaactgctgttgaatcacgcaagcgacaatattcccaaggccgatgagatccggaccctcgttaaggacatgtgggacacgcgtattgccaagcttcgggtctccgcagattcatttgtaaggcaacaagaggcccatgccaagttggataacttgactttaatggagatcaacacatctggcaccttcttgacgcaggcgctgaaccatatgtacaagctcagaaccaacttacagccgttggagtccactcagagtcaggatttctag

SEQ ID NO: 118351 - DNA, 651 bp, synthetic construct
  misc_feature 1..651: note = Description of Artificial Sequence: Synthetic coding sequence
  source 1..651: mol_type = other DNA
atgtcggaggcgtacttccgcgtggagagcggcgcacttggtcccgaggaaaattttctgtctctggacgacattctaatgtcccacgaaaagttaccagtgaggacagaaaccgctatgccccgcctgggagcattctttcttgaaagaagcgcaggtgccgaaactgacaacgccgtgccacaaggctctaagctggaacttccactctggctcgcaaagggtcttttcgacaacaagcggagaatcctctcagtcgagctcccgaaaatctatcaggaagggtggagaacggtcttctccgccgacccaaacgtggtggacctgcataagatgggaccccacttctatggtttcgggtctcaactgctgcacttcgatagccccgaaaatgctgatatttcacagagcctgttgcagacctttatcgggcggttcagaaggatcatggattcttcacaaaacgcttacaacgaagacaccagcgcgcttgtggcgcgcctcgacgagatggagcgaggactatttcagactgggcagaaaggtctgaacgattttcaatgttgggagaaaggccaggcctctcaaataactgcgtcgaatcttgtccagaattacaagaaacgcaaatttactgatatggaggactag

SEQ ID NO: 118352 - DNA, 417 bp, synthetic construct
  misc_feature 1..417: note = Description of Artificial Sequence: Synthetic coding sequence
  source 1..417: mol_type = other DNA
atgagcgaagcatacttcagagtggaatccggtgccctggggcctgaagagaactttctttctctcgacgacatcctgatgtctcatgaaaaactcccagtgcgaacagagactgcaatgccacgcctcggagcatttttcttggaacgctctgccggtgccgagactgacaacgccgtaccacaaaccttcatcggccggtttagacgcatcatggactcaagccagaacgcgtacaacgaagacacttcagccctggtggctaggctggatgaaatggagcggggattgtttcagactggccagaaagggctgaacgatttccaatgttgggagaagggccaagcctctcagattaccgcttcaaatttagtccagaactacaaaaaacgcaagttcactgacatggaggattag

SEQ ID NO: 118353 - DNA, 768 bp, synthetic construct
  misc_feature 1..768: note = Description of Artificial Sequence: Synthetic coding sequence
  source 1..768: mol_type = other DNA
atgagtgaagcatattttcgtgtggagtccggtgctttgggcccagaagaaaattttctcagcctcgatgatattctcatgagccatgaaaagctcccggtgagaaccgagacggctatgccaagactgggtgccttttttctggaaaggtctgctggagccgagaccgataacgccgttccgcagggttttgccctgctgccacgcctagagtgctctggggtcatttggctgaccgccgcattgacgtctcaggcacctgagatcctgcccccgcagccaccgatgtggcttgtgcttcagggatctaagctcgaattgccgctgtggctggctaagggactgtttgacaacaaaaggcgtatcttgtcggttgaactgcctaagatctatcaagaaggatggcggacggtatttagtgcagacccaaacgtcgtagacctgcataagatgggcccacacttctacggctttggatcgcaactcctacacttcgattctcctgagaacgccgacatctcccagtccttgctccaaacattcataggcaggttcaggcgcatcatggattcgagccaaaacgcatataatgaagacacatccgctctggtggccagattagatgaaatggagaggggactctttcagactggacagaaaggtctgaacgactttcaatgctgggaaaagggacaagcttcccagattacggctagcaaccttgttcaaaattacaaaaagagaaaatttacagatatggaagactag

SEQ ID NO: 118354 - DNA, 672 bp, synthetic construct
  misc_feature 1..672: note = Description of Artificial Sequence: Synthetic coding sequence
  source 1..672: mol_type = other DNA
atgacagaagaggttgacttcttaggccaagactctgacggcggaagcgaggaggtggtgctaacccctgcggaactgatcgagcggctggagcaggcctggatgaatgagaagttcgctcctgaattgcttgagagcaagccagaaattgtagagtgcgttatggaacagctcgaacacatggaggaaaatttgcgcagagcaaaacgggaagacctcaaggtgtcaattcaccagatggagatggagcggattagatatgtgctgtcaagctatcttcgatgcagactcatgaagattgaaaagttcttcccccacgtgcttgagaaggaaaagacacggccagaaggcgagccgtcctccctctcgcctgaagagcttgcattcgcccgtgagttcatggctaacactgagtcatacctgaaaaatgtggccctgaagcacatgccacctaacctgcagaaagtggatctctttcgagcggtgccaaaaccagatctcgactcctatgtttttttacgagtcagagagaggcaggaaaacatcctggttgaacctgacacagatgagcagagggactacgtgatcgatctcgaaaaggggtcacaacatctgatccggtataaaacgatagcccccctcgtggcctcaggagcagtgcaattgatttag

SEQ ID NO: 118355 - DNA, 672 bp, synthetic construct
  misc_feature 1..672: note = Description of Artificial Sequence: Synthetic coding sequence
  source 1..672: mol_type = other DNA
atgactgaagaggtcgatttcctgggccaggattcagacggaggttcagaggaggttgtgctgacccccgcagaattaattgaacgcctcgaacaggcctggatgaatgagaaattcgctccggagctgcttgaatcaaagccagagattgtggaatgcgtgatggagcagctggaacatatggaggagaaccttaggagagccaagcgagaggacctgaaagtttccattcatcagatggagatggaacgcattagatacgttctttcgtcatatttgagatgcagactgatgaagatagaaaagttcttccctcacgtgcttgaaaaggaaaagacccgcccagaaggcgaaccgagtagccttagtccagaagagcttgctttcgcccgcgagtttatggctaatacagagtcataccttaagaacgtggcactgaaacatatgcctcctaacttacagaaagtggacctgttccgggcagtgcccaagcctgatctggacagctacgtgtttctcagagtccgggaaagacaagagaatattttagtcgagcctgatacagacgagcagagagactacgttatagacctggagaaaggaagtcagcacctcattcgctacaagactattgcaccactggtcgccagtggggccgttcagcttatctag

SEQ ID NO: 118356 - DNA, 303 bp, synthetic construct
  misc_feature 1..303: note = Description of Artificial Sequence: Synthetic coding sequence
  source 1..303: mol_type = other DNA
atgaccgaagaggtggattttctgggtcaggattcagatggtgggagcgaggaggtggtcctgacgcccgcagagctcattgagagactggagcaagcatggatgaacgaaaagttcgcccctgagctcctggaaagtaaacccgagatcgtggagtgcgtgatggagcagctcgagcacatggaggagaatctgagaagagctaagcgcgaggatcttaaggtctctatacaccagatggagatggagaggattaggtatgtgttgagttcttatctgcgatgtcgactgatgaaagtgtag

SEQ ID NO: 118357 - DNA, 939 bp, synthetic construct
  misc_feature 1..939: note = Description of Artificial Sequence: Synthetic coding sequence
  source 1..939: mol_type = other DNA
atggagggtgccgccgctcgtgaagccaggggaacagaaaccccacgagcttctgctccccccccagccccaagcgagccccccgctgccccacgagcacgacctcggctggtgtttagaacacagctcgcccatggctctcccacagggaagattgagggattcactaatgtgagagagttgtatgctaagatcgccgaagccttcggcatcgctccgaccgagattctcttttgcaccttaaactctcacaaagtggacatgcagaaattacttggggggcaaattggcctcgaggacttcatatttgcccatgtgcgaggcgagactaaagaggtggaggtcacaaagactgaagacgctctggggctcactataaccgacaatggggcgggatatgcttttatcaagcggatcaaagaggggtccatcattaacaggatcgaagcagtgtgtgtcggggactccattgaggccattaatgaccatagtatcgtcggttgcaggcactacgaggtcgctaaaatgctaagagagctgccaaaaagccaaccgtttaccctgcggctggtacaacccaaaagagcttttgacatgattggacagagatcccggtccagcaaatgccctgtggaagctaaagtgacctctggccgggagacgctgagactgcgttctggcggagccgcaaccgtcgaagaggcaccatccgagttcgaggaagaagctagccgcaaggtggacgacttactagaatcatacatgggaatcagagacccggagcttgctagtacaatggtcgaaacatctaagaagaccgccagcgcccaggagttcgctcgctgccttgattccgtccttggagaatttgccttccctgacgagtttgttgtagaagtctgggcggctatcggcgaggctcgagaagcttgcggctag

SEQ ID NO: 118358 - DNA, 2097 bp, synthetic construct
  misc_feature 1..2097: note = Description of Artificial Sequence: Synthetic coding sequence
  source 1..2097: mol_type = other DNA
atgccctccgaaggtcgctgttgggagaccctaaaagctctgcgatctagcgacaagggccgcctgtgttattatagggactggctcctccgcagagaggacgtcttagaagagtgtatgtctctcccgaaactgtcaagctatagcggttgggtagtggagcatgtgcttccccatatgcaggagaaccagccactaagcgagactagtccatcctccacttctgccagcgctctagatcagccgtctttcgtccccaaaagtcctgatgcttccagtgcattcagtcccgctagccctgccacaccaaatgggaccaaaggcaaggacgaatcacagcatactgaatcaatggtgttacagagcagccgaggtattaaggtcgagggttgcgtgcgtatgtacgaactcgtccatagaatgaaagggacggaaggcctgcgactgtggcaggaggaacaggaacgcaaggtgcaggccctgtccgagatggccagtgaacagctaaaaaggtttgacgaatggaaggaactgaaacagcataaggagtttcaggacttgagagaggtgatggaaaagagttctagggaagctctgggtcatcaagaaaaactaaaagccgagcacagacaccgcgctaaaatactcaacctgaagctacgcgaggcggagcagcaacgggtcaaacaggccgagcaagagcgtttgagaaaagaagaaggccagattaggctcagagccctgtacgccctacaggaagaaatgttgcagctaagtcagcagctcgacgcgtctgaacagcataaggcattactgaaagtcgatcttgcggcctttcagactaggggaaaccagttgtgttcacttatatccgggattattagggcgtcgtcggaaagcagttaccctacagctgaaagccaagcagaagcagaaagagccctgagggaaatgagggacctcttaatgaatctcggacaagaaattactagagcctgcgaagacaagcgacgccaagatgaggaagaggctcaggtcaagctgcaggaggcccaaatgcaacagggacccgaggcacataaggaaccgcctgccccttcccagggacccggtgggaagcagaatgaagatttacaagtcaaggtacaagacatcacaatgcagtggtatcagcagcttcaggacgcatcaatgcagtgcgtcctcactttcgagggtctgacgaacagtaaagactctcaggccaagaagatcaagatggacctccagaaagccgccaccattccagtcagccagatcagcacgatcgccggttcaaaacttaaagaaatttttgataagatccattcgctcctctctggcaagcctgtgcagagcggcggccgttccgttagcgtgaccctcaatccccaggggttggactttgttcagtataaacttgctgaaaaatttgtgaagcaaggggaagaagaggtggcttctcatcatgaggcagcatttccaatagcagttgttgcaagtgggatctgggagctccatcctcgggtcggagatcttatattggcccatttacacaaaaaatgtccttactccgtgcccttttacccaacattcaaggagggaatggctctggaggactaccagcggatgctcgggtatcaagtgaaagactccaaggtggaacaacaggacaatttcttgaagagaatgagtggaatgatccgactgtacgccgcgatcatccagttgcgatggccatacgggaaccgccaagagattcatccacacggtctaaaccacggctggcggtggctggcccagattctgaacatggagcccctgagcgacgtcacagccacgctgctcttcgactttttggaggtctgtggcaacgcccttatgaaacagtatcaagtgcaattctggaaaatgctgatcttaattaaggaagactactttcctaggatagaggccattacaagctccgggcagatgggctcattcatcaggctgaagcagtttctggagaagtgtctccagcacaaggacatccccgtgcctaaggggtttctcacatctagcttttggagatcatag

SEQ ID NO: 118359 - DNA, 1980 bp, synthetic construct
  misc_feature 1..1980: note = Description of Artificial Sequence: Synthetic coding sequence
  source 1..1980: mol_type = other DNA
atgccatctgaagggcgctgctgggaaacattaaaggcattgcgcagttcagacaaaggcagattatgctactatcgggattggttacttcgccgtgaggacgtcttggaggaatgtatgagtctccccaaactgtcttcctactcaggctgggtggtcgagcacgtacttcctcatatgcaagagaaccagcctctcagcgagacctctccctcatccacttcagcaagtgcgttagaccaaccgtcatttgtccctaaatctcctgacgccagctccgcgttctccccagcaagccctgcgactcctaatggtactaaagggaaagatgaaagtcagcacaccgaatctatggtccttcagtcgtcccggggcataaaagtggagggatgcgttcgcatgtacgaactggttcacaggatgaagggcaccgaaggactaagactttggcaggaggaacaagaaagaaaggttcaggccctttccgagatggcctccgagcagctgaaacgattcgatgagtggaaggagctgaaacagcataaggaattccaggatctgcgggaggtgatggagaagagcagccgggaagctctcggtcatcaggagaagcttaaagctgagcatcgccatcgagcgaagatactgaatttaaaactgagggaagcagaacagcagcgagtcaaacaggccgagcaggaacggttacgtaaggaagaaggccagatccggctgcgggccctctacgccctgcaggaagagatgctgcagttgtctcaacagctggatgccagcgagcagcataaggcattgctgaaagttgaccttgcggccttccaaacccgcggcaaccagctttgcagccttatcagcggaatcataagggctagctctgagtcctcttaccctactgcagagagccaggctgaagctgagcgtgcacttcgtgaaatgagagaccttttgatgaatctcggccaggagatcactcgggcttgcgaagataagaggcggcaggatgaggaagaggctcaagtcaagctgcaggaggctcagatgcagcagggccccgaagctcacaaggagccccccgcaccatcccagggcccaggtggtaagcagaacgaggatctgcaggtcaaggtccaggatatcacaatgcagtggtaccaacagctgcaagacgcatctatgcagtgcgtgcttaccttcgaaggactgaccaacagtaaggactctcaagccaagaaaatcaagatggatctgcaaaaagccgctacgatccctgtgagccagatatccacaattgcaggatcaaagctgaaagagatttttgataaaatccactccctgctctccggtaagcccgtccagtcaggtggtaggtcggtttccgtcactttgaatcctcaaggtctggatttcgtacaatacaaactggcggagaagttcgttaagcaaggagaagaggaagtagcttcccatcacgaggcagcgttcccgatcgcagtggtagcttcggggatctgggagctgcacccccgcgtgggtgatctaattctcgctcatcttcacaagaagtgcccttacagcgtccccttctatccaacttttaaggagggcatggcgttagaagactaccagagaatgcttgggtaccaggtcaaagattctaaggttgagcagcaggacaattttctcaaacgtatgtccggcatgattagactctacgcagctatcatccagttaaggtggccctacggcaatcggcaggagatccatcctcatggcctgaatcatggctggagatggctcgcccagattctaaacatggaacctctgagcgacgtcactgcaaccttactgtttgatttcctggaggtgtgcggcaacgccctaatgaagcagtaccaggtccaattttggaagatgttgatcctgattaaagaagattatttccccagataccaggcctgttag

SEQ ID NO: 118360 - DNA, 1335 bp, synthetic construct
  misc_feature 1..1335: note = Description of Artificial Sequence: Synthetic coding sequence
  source 1..1335: mol_type = other DNA
atgctccagttgtcccagcaactcgacgctagtgagcagcacaaggcgttgcttaaggtggacctagccgcgttccagacacgggggaaccagctgtgtagcctgatatcggggataataagagcttcgagtgaaagttcataccctacggctgaaagtcaggctgaggccgagcgcgcactgagggagatgcgggatctcctgatgaatcttggccaggaaatcactcgcgcttgtgaggataaaagacgccaagatgaggaagaagcccaggtgaagcttcaggaggctcagatgcagcaaggtcctgaagcccataaggaacctccagctccctcacagggtcctggtggcaaacaaaatgaagatctgcaagtgaaggtgcaagacattacgatgcaatggtaccagcagctccaggacgcgtcaatgcagtgtgtcctgaccttcgagggattgacaaattctaaagatagccaggcaaaaaagataaagatggacctccaaaaggctgccaccattcctgtgagccagatatcgacaattgctggaagcaagctgaaggagatctttgacaagatccatagcctgctcagtggtaagcctgttcaatcaggcggtaggagcgtgtcagtgaccctgaatccccaggggcttgacttcgttcagtataaacttgctgagaagtttgtgaagcagggcgaagaggaggtggcgagccaccatgaggcagccttccccatcgcggtggtggcgtctggcatctgggagctgcaccccagggttggtgatctgattttggctcacctacacaagaagtgcccttactcagtccctttttatcctacattcaaggaaggcatggctctggaggattatcagagaatgctgggctaccaggtgaaagactccaaagtggagcagcaggataacttcctgaaacgcatgtccgggatgatcaggctttatgcagcaattatccagctgagatggccttatggcaacagacaggagatccaccctcacggcctgaatcacggctggcgctggctcgcccagatccttaatatggagccgctttccgacgtgactgccactctgttgttcgacttccttgaagtgtgtggtaatgctctgatgaaacagtatcaagtacagttctggaaaatgctgattctgattaaggaagattacttccctcgaatcgaagcaatcactagctccggccagatgggatcgtttattcgcctaaagcagttcttagaaaagtgtcttcaacacaaggacatccccgtgcccaaaggattcttgacctcttcattttggaggagctag

SEQ ID NO: 118361 - DNA, 2490 bp, synthetic construct
  misc_feature 1..2490: note = Description of Artificial Sequence: Synthetic coding sequence
  source 1..2490: mol_type = other DNA
atggctctaacctctatcaatgcaacgccaacacagctgtcatcgtcttcaaattgtctatccgacactaaccagaataaacagagttcggaaagcgccgtttcaagtactgtaaatccagtagcaatacacaaacgatcgaaagtcaaaactgaaccggagggcttgcgtccagctagccccctggcgctgacacagggtcaggtatcaggccatggctcttgcggctgcgcacttccactttctcaagagcaacttgctgacctcaaagaagaccttgaccgcgacgactgtaagcaggaagctgaggtagtaatatatgaaactaactgtcactgggaagattgcaccaaggaatacgatacccaggagcaactggttcatcacataaacaatgagcatatccacggcgagaagaaagaattcgtgtgcagatggcaggcctgcaccagggaacagaaaccgtttaaagcacagtacatgttggtggttcatatgagaaggcacaccggtgaaaagccccataaatgcacattcgaaggctgcagcaaggcttatagcagactcgagaatttgaagactcacttgaggagccatacaggcgagaaaccatacgtgtgcgagcatgagggttgtaacaaggccttcagcaacgcctctgaccgtgccaagcaccagaatcgcacacattccaacgaaaaaccttatatatgcaagatccccgggtgtacgaagaggtacactgatccatccagtttacggaaacacgttaagactgttcatggtcccgacgctcatgttactaagaagcagcgcaatgatgtgcacctccgaacccctctgctcaaggaaaatggcgactctgaagctgggaccgaaccaggtggccctgagagcaccgaggcctccagtacctctcaggcagtcgaagattgtctgcatgtccgggcaatcaaaactgaaagctccggcttatgtcagagttctcccggtgcccagagttcctgttctagtgagccatcacctctggggtctgctccgaacaatgatagcggcgtggaaatgcctgggaccggacccggctccttaggcgatctcactgcactggatgacacaccccccggtgccgatacttccgctctcgccgcaccatcagccggaggtctgcaactgagaaaacacatgacaacaatgcacaggttcgaacaactaaagaaagaaaagctgaagagtctgaaggactcctgcagttgggccgggccaacgcctcacacccgcaatactaagcttcccccactgcctggctctggctcaattttggaaaacttcagtggctctggaggcgggggccccgctggcctcctgccaaatccccgcctatcagaactctctgcatcagaggtcactatgttgagccaactccaggagcgccgcgattcgagtacttcaaccgtcagcagcgcatatactgtctctcgccgcagttcggggatctctccttacttttcctcacgaagatcttcagaagcctctccacttggggccggtcgtccccataacgcaagctctgccgactcgtatgacccaatctccactgatgcgtctaggaggagctcagaggccagccagtgcagtggaggcagcggcttactcaacctcacccccgcacagcagtactcgcttcgagccaagtacgccgctgctaccggtggtcccccccccacgccacttcccggcctagaaagaatgtcccttcgaacacgcctggctctgctggacgcccccgagcggacactgcccgccggctgtccccgcccactgggcccgagacggggtagcgacgggcctacatacggccacggacatgcaggggcagcaccagcgtttccccacgaggcccccggtggtggcgcaagacgtgcatccgatcctgtgaggcgaccagatgcgctgtcactgccgagggtccagaggttccactctacacataatgttaatccgggccccctacctccttgcgcggaccgccgagggctaaggcttcaaagccacccaagcactgatggcggtttggcgcggggggcttatagccctagaccgcctagcatctctgaaaacgtcgcaatggaggctgtggccgcaggtgtagacggcgccgggcccgaagctgatctgggattgccagaggatgaccttgtgctgccagatgacgtcgtgcagtacatcaaggctcacgccagtggggctttggacgaggggaccggccaggtgtatccaactgaatccacaggtttcagcgacaatccacggctcccatcccctggactccacggtcagcgacgtatggtggccgccgactccaacgtgggaccttcggcacccatgttaggagggtgtcagctaggattcggtgccccttcctcccttaataagaataatatgcccgtacaatggaatgaggcttctgcaacctggctctctgggacatag

SEQ ID NO: 118362 - DNA, 4761 bp, synthetic construct
  misc_feature 1..4761: note = Description of Artificial Sequence: Synthetic coding sequence
  source 1..4761: mol_type = other DNA
atggaaactagtgcgagtgcaacggcatccgaaaaacaggaggctaaatccggtattctggaagccgcaggatttccagaccccggaaagaaggcctctccacttgtggtggccgccgcagcagccgccgctgtagccgcccagggcgtgccacagcatttgttgccaccttttcacgcacctctgccgatcgacatgcgacaccaggaaggtaggtaccactatgagcctcactctgtgcacggcgtgcacggaccacccgccctgtccggctcgcctgtaatatcagacatctccctgatcagactttccccacaccccgccggccccggggaaagcccatttaatgcaccgcatccctatgtcaacccccacatggagcattacctgaggagtgtgcattcatcgccgacactcagtatgattagtgccgcgcgcgggttgtcgcctgccgacgtggctcaggaacacttaaaggaaaggggactctttggattgccagccccgggtaccacaccctctgactactatcaccagatgaccctggtagctggacatccagctccttatggcgacttgttaatgcagtccggaggcgcggctagtgcccctcatctgcatgactatctgaaccccgtggatgtatcaagattctcttcgccgagagtgacaccccgattaagccgtaagcgagcgctgtcaattagcccgctgagcgacgctagcctggacctccagcgcatgatccgtacttccccaaactctctagttgcctatatcaataacagcaggagctcctcagctgcaagtggatcctatgggcacctcagtgctggcgctctgtccccggcgttcaccttcccgcatccaataaaccccgtggcctatcaacaaattctcagtcaacagaggggtctagggtcggcctttgggcataccccccccttgatccaaccatcccctacgttcctggcacagcaacctatggctttaacatctatcaatgctacacctactcagctctcgtcatcatctaattgtctctctgacacaaatcagaacaagcagtcctccgagagcgccgtttcaagcacagtcaatccggtggcaatacataagagaagcaaggtgaaaacggaacccgagggtctgaggcccgctagtccattagctcttactcaaggccaagtgtccggccacggcagttgtggctgcgctctcccactgtctcaggagcagctggcggacttgaaggaagacctagaccgcgacgattgcaaacaagaagcggaggtagtcatctacgaaactaattgccactgggaggattgcacgaaggaatatgatacacaagaacagctggtccaccacatcaacaatgagcatatccacggagaaaaaaaagaattcgtgtgtaggtggcaggcatgtacccgagagcagaaaccctttaaagctcaatacatgcttgtagtacacatgcggcgccacactggagaaaaaccccataagtgtacgttcgaggggtgttctaaggcctactccaggttggagaacctgaagacacatctcagatcccacactggagagaaaccctatgtatgtgagcacgaggggtgcaataaggcattttccaatgcatcggatcgtgctaagcatcagaatcggacacactccaatgagaagccttacatttgcaaaataccgggctgtacaaagcgttataccgacccgtcctcactaaggaaacacgtgaaaacagtgcacggtccagacgcccacgtgacaaaaaaacagagaaacgacgtgcacttacgcacgcccctgctgaaagaaaatggcgattctgaagcaggcactgaacccggggggccggaatccactgaagcgagctcgactagccaagccgtcgaagactgcctgcacgtgcgggcaatcaaaacagagagcagcgggctttgccagtcatctcctggggcccagtcaagctgttcgtcggagccttcccccttgggatccgcacctaataatgacagtggcgtggaaatgccaggaaccgggcctggatcattgggcgatctgactgctctggatgacacgcccccaggtgctgatacctccgcactcgccgcaccttcagccggggggttacaactccggaagcacatgacgactatgcaccgctttgagcagcttaaaaaggagaagctgaaatccttaaaagactcctgtagttgggcaggtcctaccccacacactcggaacaccaagctgccacccctgcctggaagtggtagcatcctcgagaactttagtgggagcgggggcggtggacccgcggggctgctcccaaaccctcgactgtccgagctctcagcgtctgaagtcaccatgctttcccaactgcaagaaagaagagacagttctactagtacagtttcaagtgcctatacagtgtccaggcgttcctcaggcattagcccctattttagtagccgacgaagcagtgaagctagccccttgggggccggcagaccacacaacgccagctccgccgactcatacgatcctatctccacggatgcgtctcggcgatcttcagaggcttcacagtgcagtggcggcagcggcctgctaaacctaacacctgcccagcagtactctctccgggctaagtacgctgctgccacaggcgggcccccccccacaccactgccagggctggagcggatgtctctgagaacacggttagctctgttagacgcacccgagaggaccctgccagcgggctgccctcgccctctaggacccagacgcgggtctgatggaccaacttatggccacgggcacgcaggagccgcgcctgcatttcctcacgaggccccaggggggggagcaagaagggcgagcgatccagtaagacggcctgatgccttatccttaccacgcgtccagaggtttcacagcacacataacgtgaaccccggacctttgcctccttgtgcagaccgccggggactccgcctgcagagccatccctccacggacggcggactggcgcgaggcgcatactcaccacggccgccctcgataagtgagaatgtcgctatggaggccgttgcagccggcgtggatggcgccggccccgaggccgacttgggccttcccgaagacgacctggtgctgcctgatgatgttgtgcagtatataaaagcacatgcatctggcgctctggatgaagggaccggacaggtgtaccccacagaaagcaccggcttctctgacaatccccgactcccatctcccggcctccacggccagcggcgcatggtcgccgcagactcgaatgtggggccttccgcacccatgctgggcggctgtcagctcggctttggtgccccatccagtttaaataagaacaatatgccagtgcagtggaatgaagtgtcatcaggaacagtggatgcactcgcaagccaggtcaagcccccacctttccctcaggggaatctggccgttgtgcagcagaagccggcctttggccagtatcctggttatagcccgcagggtctgcaagcttctcccggtggcctggatagcacccagccacacctacaaccccggtccggggccccctcacagggtattccaagggtgaattatatgcaacagctgagacagcccgtcgctggctctcaatgtccaggcatgaccaccacaatgagtcctcacgcatgttatggacaagtacatccacagctttcccccagcaccatctcgggggctcttaatcagtttcctcaatcgtgtagcaatatgcccgccaagcctggacacctcggacacccccagcagaccgaggtggctcccgatccaaccacaatgggcaatcgccacagagagctcggcgtaccagactccgccctggcgggggtgccccctccacacccagtccagtcttatccccagcaaagtcaccatctcgctgcctcaatgagtcaggaggggtatcatcaggtccctagcctcctgccagctcgacagccagggtttatggaaccccaaaccggtccgatgggcgtcgccaccgccggtttcggcctagttcaaccccgcccccccctggagccatcgccgaccggtcggcacagaggagttagggccgtacagcaacagctggcttacgcgcgggcaacagggcacgctatggctgccatgccttcatcacaggagaccgccgaggccgttcctaagggggcaatgggaaacatgggttccgtcccaccccagcccccccctcaggacgctggtggcgctcctgaccacagtatgctgtactactacggccagatacacatgtacgagcaagatggcgggctggaaaacttgggaagttgtcaggtcatgcgtagccagcccccgcaaccccaggcctgccaagattcgatccagccccagccgctgcccagccccggcgtcaaccaggtcagctcgaccgttgatagccagctgctggaggccccccagatagactttgatgccatcatggatgacggagaccattcctccttatttagcggcgccttgtcacctagtttactgcatagtctttctcagaattcatcgagactcactactcccaggaatagcctgactctgccgtctattccagccggaatctcaaatatggctgtaggcgacatgtcttctatgctgacttctctggctgaggagagcaaattcctgaatatgatgacatag

SEQ ID NO: 118363 - DNA, 249 bp, synthetic construct
  misc_feature 1..249: note = Description of Artificial Sequence: Synthetic coding sequence
  source 1..249: mol_type = other DNA
atggaaacaagcgcatcagcaactgccagcgagaaacaggaggctaaaagcgggattttggaagccgcaggcttccctgatccggggaagaaggcatctcctctggtggtggctgctgccgcagcagccgccgtggccgcccagggggtacctcagcatcttctccctccatttcatgcccccttgcctatcgatatgagacaccaagaaggaaggtaccactacgaacctcactcagttcatggatag

SEQ ID NO: 118364 - DNA, 660 bp, synthetic construct
  misc_feature 1..660: note = Description of Artificial Sequence: Synthetic coding sequence
  source 1..660: mol_type = other DNA
atggaaacctccgctagcgcaaccgccagtgagaagcaggaggccaaaagtggtatcttggaggctgctgggtttcctgacccgggtaagaaggccagccccttggtggtggctgccgctgcagcggccgcagtcgctgcccaaggtgtcccccagcatttgttgcctcccttccacgcaccacttcctattgatatgcgccaccaggagggtcggtaccactacgagcctcactccgtgcatggcgtccatggggttccattcttacaacctgctggagacgccccacctgaaccacaagccggcgccgtccatttgcccacactaaggagacagcctggtccggctgctgacgaccctcatctgacccagctggccagcgggctacaccagcagctgccaaagcagctggggggtcagcgctttttgcgggcctctgtgtccggatgtccacagccatctttgcacctgcctcccccacaccagcctcggggactacctgccgattcggagccggctgaaggatcgggagtgtccttgtggactcacaccacaccagaccccgctctcactcatctgcctgggcctgcagctcacgggccccatctgcaccagtgccacgctcatccagcccagcagcagcagcagttgtctgaatag

SEQ ID NO: 118365 - DNA, 4761 bp, synthetic construct
  misc_feature 1..4761: note = Description of Artificial Sequence: Synthetic coding sequence
  source 1..4761: mol_type = other DNA
atggaaacctctgcaagtgctacggcctcagaaaagcaggaggctaaatctggaatattagaggccgccgggttccctgatcccggaaagaaggcctcaccattggtggtggccgccgccgccgctgccgcagtcgcggcccagggagttccacagcacctgctccctccctttcacgccccactccctatcgacatgcggcaccaagagggaagataccattacgagccccactctgtgcatggtgtacatggcccccctgcactttccggatctcccgttatctctgacataagccttattcgcctctcgccgcatccggcgggtccgggagaatcccctttcaatgcaccacacccttacgtgaatcctcacatggagcactatctgagaagtgtgcactcgtctcctacccttagcatgatctctgccgccagagggttgtctcccgccgacgtggcacaggagcatctcaaggaaaggggattgttcggtctgcctgctcccgggaccactccttctgattattaccaccaaatgacgctagtcgcagggcatcccgcaccttacggggaccttttgatgcagtctggcggagctgcaagtgctccccatctccacgattatctgaatccggtggatgtgtcacgctttagctccccacgagtgactccgaggttgagtcgcaaacgggcactctccatcagccccctgagtgacgcttccttggatctacaacggatgatacggacaagtccgaattcactcgtggcttatataaacaacagcagatcatccagtgcagcaagcggcagctatggccacttgtccgctggggccctgagcccggcctttacgttccctcatcccattaaccccgtggcatatcagcagatcctcagccagcagaggggactaggaagtgccttcggccatactcccccgctgatccagccatcacccacgtttctggcccagcaacccatggccctgaccagcattaatgcaactcctacccagctcagtagctcctccaactgtttgagcgatacgaaccagaataaacagtcctcagaatcagcagtgtcaagcactgtgaatccagtcgcaatccataaaaggtcgaaagtgaagacagagcctgagggcttgcgcccagcatctcccctggccctgacccaagggcaagtgtccgggcatggatcctgcggctgtgcccttcccctctcacaggaacagcttgcagacctgaaagaggatttggacagagatgactgcaaacaggaggcagaggtagtgatttacgagaccaattgccattgggaggattgcaccaaggaatacgacactcaggaacagttggttcaccacatcaacaacgaacatattcacggagaaaagaaggagttcgtatgccggtggcaagcttgcaccagagagcagaagcctttcaaagcacagtatatgctcgtggtccacatgcgacgccacactggagaaaaaccgcataagtgcacatttgaaggctgctctaaagcctactcccggctggagaatctcaaaactcacctgcgaagccataccggcgaaaaaccgtacgtgtgcgaacacgaagggtgtaacaaagctttcagtaatgcttcagatagggccaagcaccaaaatcggacccactcaaacgagaagccttacatttgcaagattcccgggtgtaccaagcggtataccgatccgagcagtttaaggaaacacgtaaagacagtgcacggaccggacgcccacgttacgaaaaaacaacgtaacgacgtacaccttaggactccattgctgaaagagaacggcgacagcgaagctgggacagagccaggaggccccgaaagtacagaagcgtcttccacctcccaggctgtagaagactgcctgcatgtacgggctattaagaccgaaagcagcggactgtgccaatcttcgccaggcgctcagtcgagctgcagctcagagccttcacccctgggatcagctccaaataacgacagtggtgtggagatgccaggcactgggcctggctccctgggggatcttactgccttggatgatactccacctggagccgacacttccgccttagcggcaccgtctgccggaggtttgcagctgagaaaacacatgaccacgatgcaccgcttcgagcaactgaagaaggagaagctgaagtccctgaaggacagctgctcctgggctgggcccacgcctcatacaagaaacaccaagctgcctcccctgcccggctctggctcaatcctcgagaactttagcggcagtggcggtggaggacccgcaggcctattgcctaatccacggctgagtgaactctccgcaagcgaagttactatgctctctcagttgcaggagaggagagacagctctacaagcacagtgtcaagcgcttatactgtatctcggcgctcctctggtatcagtccttatttttcctctcggcgtagctctgaggctagtcccctgggcgctggacgaccgcataacgcttcaagcgcggactcttatgacccaatcagcacagatgcctccagacgctcatctgaagcttctcagtgtagcggtggaagtggcctccttaatctgacccctgcgcagcaatacagcctgagggccaagtacgccgcagccactgggggcccaccacccacccctcttccaggcctcgagaggatgtctctgcggacacgtctcgcgctacttgacgcgccagaaagaacgctgccagccggctgcccccgtccactgggtcctcgcagggggtctgacgggcccacttatggacacggccacgctggggcggctccagctttcccacacgaggcgcctggaggcggggcgagacgggcatctgacccagtcaggcggccagacgccctcagtctaccacgggtgcagaggtttcatagcacgcataatgtgaaccccggtccgctgcctccctgcgccgaccgaagaggcctgcggctccagtcgcatcccagcactgacggtggactggcgaggggtgcctactctcctcgcccacctagcatctctgagaatgtggcaatggaagccgtcgctgccggcgtggatggcgccggtcctgaagccgacctgggattgccggaggatgacttagttctgccagatgatgtggtgcagtatattaaggcacacgcctccggggcactggacgaaggaaccggccaggtctaccccaccgaatctacggggttttcggataacccaaggctgccctcgcctggactccacggacagcgacgaatggtcgcagccgacagcaatgtgggaccatctgctcccatgttgggtgggtgtcagctgggctttggagccccctcttcactgaacaaaaataatatgccagtacaatggaacgaagtctctagtggcaccgtggacgccttagcctcccaggtaaaacccccaccattccctcagggtaacctcgcggtcgtgcagcagaagcctgcctttggccagtatcccggttatagcccacaaggattgcaggcgtcccccggtgggctcgactcgacccagccgcatcttcaaccacggtccggcgcgccttcacagggaatcccccgggtgaattacatgcagcagctgagacaacctgtcgccggatctcagtgtcccggaatgaccacaacaatgagcccccacgcctgctatggccaggttcatccccagttgtctcccagtaccatctcaggagccctcaatcagttcccccaatcctgttcaaatatgcctgccaagccgggccacctgggccacccacaacaaactgaagtggcaccagatcccactacaatgggaaatcgtcaccgggagctgggcgtgccggactcggctttggctggagtgccaccgccccatccggtccaaagctatccacagcagtcccaccatttagctgcttcgatgtctcaggagggataccaccaggtgccatcccttctgcctgccagacagcctggctttatggagcctcaaacgggcccaatgggggttgctacagccggattcggcttggtccagcctcggccacctttagaacccagtccgaccggcagacacagaggcgtcagggccgtccagcagcagctggcatatgcgagggctaccgggcatgcaatggcggcaatgccatcttcacaggaaacggccgaggctgtgcccaagggtgccatgggaaacatgggttcagtccccccccagcctccacctcaggacgccggaggggcacccgatcattcaatgttgtattactatgggcaaatccacatgtacgaacaagacggcggtctcgagaatctgggcagttgccaggttatgcggagccagccaccccagccacaagcctgccaagactccattcagcctcagcccttaccttcccctggcgtgaatcaggtgagcagcaccgtggactcccagctgctggaggcaccccagatcgatttcgatgctataatggacgatggcgaccatagcagcttatttagcggcgctctctccccctccctcttacactctctaagtcaaaacagctctagactcactacacccagaaactctcttacattaccctcgattcccgccgggatcagcaacatggccgtaggcgatatgtcatccatgctgaccagcctggcggaagaaagtaagtttttgaacatgatgacttag

SEQ ID NO: 118366 - DNA, 4743 bp, synthetic construct
  misc_feature 1..4743: note = Description of Artificial Sequence: Synthetic coding sequence
  source 1..4743: mol_type = other DNA
atggaagcccaaagccatagttctaccaccacggagaagaagaaggtggaaaattccatcgttaagtgcagtacgcggactgatgtctctgagaaggctgtcgcttcgtctaccacctctaatgaggatgagagtcccggccagacataccatagagaaaggagaaacgctattaccatgcaaccccagaatgtgcaggggttatcgaaggtcagtgaggagccctcaacaagtagcgacgaacgggccagtttaataaagaaagaaattcatggttccctaccgcacgtggctgaaccctctgtcccctataggggaacagtgttcgctatggatcctagaaacggatacatggagccccattaccaccccccccacctgtttccagccttccacccaccagtacccattgacgctagacaccacgaggggcgctatcactacgatccatcgccaataccaccgctgcatatgaccagcgccttaagttctagcccaacataccccgatctccccttcatacgtattagtcctcacaggaatcctacagccgcttcagaatccccgttttcacctccacatccgtacatcaacccctacatggattatatccggtccctgcattcatccccaagcttgtctatgatctccgccactagaggcttgagccccacagatgccccacacgctggggtgagcccagccgagtattatcatcagatggcactgctgacggggcaaaggtctccctacgccgacatcatcccctcggccgcaactgccggtacaggagccattcatatggagtatttacacgctatggactccacacggtttagcagccccagattgagtgctcggccaagccgaaaacgcacactatctatctcccccctgtcagatcacagcttcgacctccagaccatgatcagaacctcccctaattcactggtgaccattcttaacaactctcgaagctcctcatcagccagtggtagctacgggcatctaagcgcttctgccatcagccccgctctgtcgtttacatattcatcagctccggtctctttgcacatgcatcagcaaatcttgtcccgccagcaatccctggggtctgcattcggccacagcccacccctcattcacccagcccctacctttcccacacagagaccgatcccaggaatccctactgttttgaatcccgtgcaggttagctctggcccatctgagagttctcagaacaagccgacatccgaatccgccgtgtcctctacaggcgacccgatgcacaataaaagaagtaagatcaagccagacgaggatctgccatctccgggggctcgaggccagcaagagcagcctgaaggaacgactctcgtgaaagaagaaggagacaaggacgaatccaagcaggagcctgaagttatttacgaaactaactgccactgggaaggttgcgcaagggaattcgatacacaggagcagctggtccatcatattaataatgaccacatccacggggaaaaaaaggaatttgtctgcagatggctggactgctcacgggaacagaagccattcaaagcccaatacatgctagtagtgcacatgagaagacacaccggggagaaacctcacaaatgtaccttcgaaggctgcacaaaggcctatagtaggcttgagaacctgaagacccacctgcgtagtcacactggcgagaaaccctacgtgtgtgagcacgaaggctgtaacaaagcgttctctaatgcttccgacagggcaaaacaccagaaccgcacccactctaatgagaaaccctatgtgtgcaagattcccggttgtacgaaacggtataccgacccttccagcttaaggaagcacgttaagacagtgcacggccccgaggcccacgtgacgaaaaagcagagaggcgacatccatccacgaccaccgccaccgcgggacagcggtagccattcacaatcaaggagtccaggcagaccaactcagggtgccttgggggagcagcaggacctgtctaacaccactagcaagcgagaagagtgtcttcaggtcaagacagtgaaggccgaaaagcctatgacaagtcagccttctcctgggggtcagtcttcctgttctagtcagcaatctccaatctctaactattccaactccgggctcgagctgcctttgaccgatggaggatcgatcggtgacctgtcagccatcgatgagacgccaatcatggactcgacaatttcgacggcaactacagcgctggctttgcaagcaaggaggaatcctgccggaacaaagtggatggaacacgtgaaattggagcggctgaaacaggtgaatggaatgtttcccaggctaaatccaatccttcctcctaaagcccccgccgtgtcaccacttatcggcaatggaacccaatccaataacacttgcagtctgggagggcccatgacgctgctgcctggtcgctctgacttaagtggggtggatgttactatgctgaatatgctgaaccgacgggatagctccgcctctaccatctcaagtgcatatctgtccagcaggaggagttccggcatcagcccatgctttagctctcgtaggtcttcggaggcatctcaagctgaagggcggccccagaacgtgagcgtagcggatagctatgatccaatctcaacagacgcttctaggcgaagcagtgaggcaagtcagagcgacgggcttccctcgttgctttctctgacacccgcccagcagtacagactcaaggccaaatatgccgcagccaccggggggccgcctcccactcccctgccaaacatggagcgcatgtctctgaagacccgcctggccctcctgggggatgctctggagcccggagtagcactcccacctgtgcatgccccccgcagatgcagcgacgggggggcgcatgggtacggcaggcgccatctgcagccacacgacgcacctggccacggtgtccggagagcaagtgaccccgttcggacggggagtgaggggttagcactgccgcgagttcccaggttcagctcactgagcagttgcaacccaccagcgatggccacctctgcagagaaacgctccctggttcttcagaactacacgcgaccagagggtggccagtctcgaaactttcatagctccccttgcccccctagtataactgaaaatgtaacacttgagtccctcaccatggacgccgatgctaatctgaatgacgaagatttcttgcctgacgacgtggttcagtatctcaattcacaaaaccaggcaggttatgaacaacacttcccttcagccctacccgatgactctaaagtgccgcacggtccaggcgacttcgacgccccagggctgcccgatagtcacgcaggacagcagttccacgcgctggaacagccttgcccagaggggtccaagactgacctaccaatacaatggaacgaggtctcatcaggtagcgcggatttgtcttcctccaagttgaaatgcggtccgcgccctgcagtccctcagacaagagcctttggtttctgtaacgggatggtggttcatccccaaaatcccctccggtcaggaccagccgggggctatcaaacactgggcgaaaactcgaatccgtacggcggaccggagcacctcatgctgcataacagtcctggaagcggaaccagcggcaatgcatttcacgaacagccctgtaaggccccacaatacgggaattgtttaaatcgacaacctgtagctcctggcgccctggacggcgcttgcggagccggtattcaagcatccaagctgaaatccacccctatgcaaggttccggcgggcagttaaacttcggactccccgtggcccctaatgagtccgcgggatcaatggttaacggcatgcagaaccaggatcccgtggggcagggctacttagcccatcagttgttaggcgactctatgcaacaccctggggcagggcgacccggacagcagatgcttggacagatctctgccactagccatattaatatttatcagggacctgagagctgtctccccggagcccatgggatggggtcacaaccaagttccctggctgtggttcgggggtatcagccatgcgcttcatttggcgggagtcggcgacaggctatgccacgggactctctggcactgcagtccgggcaactctctgatacatcacagacatgcagagtaaacggtatcaaaatggagatgaagggccaaccccatcccctctgttctaatctgcaaaactattccgggcagttttatgatcagacagttggcttcagccagcaggatactaaggccggatctttctcgatctcagatgctagctgcctgcttcaaggaacctctgcaaagaatagtgagcttctctctcctggggcaaaccaagtgacttcgaccgtggactccttggattcacatgacctagagggtgtccagatcgatttcgatgcaattatagacgacggagaccactcatccctcatgagtggcgcactttctccttccatcatccagaatttaagccattcttcttcaagactaacgacccctagagcctccttgccttttccagcactgtcgatgtcaaccaccaacatggccatcggagacatgtcaagcttgctgacatccctcgcagaagagtcgaaatttttagcagttatgcagtag

SEQ ID NO: 118367 - DNA, 543 bp, synthetic construct
  misc_feature 1..543: note = Description of Artificial Sequence: Synthetic coding sequence
  source 1..543: mol_type = other DNA
atggaggcccagtcccacagttctaccactaccgaaaaaaaaaaggtggaaaattctatagttaagtgttcgaccaggactgacgtgagtgaaaaagccgtggcttccagcaccaccagtaacgaggatgaatcacccggtcaaacatatcacagggagaggcgtaacgctattacaatgcaaccacagaatgttcagggcctaagcaaggtgtccgaagagccgtctacatcttccgacgagagggcctctctgatcaagaaggagatacatggaagtttgcctcatgtcgccgagccgtcagtgccatacaggggtaccgtttttgctatggacccaagaaatggttacatggaaccacactaccatccaccacacctgtttcccgcgtttcatccacccgttcctattgatgcccgacaccacgaaggcaggtatcactatgatccctcacccatccctccacttcacatgacttcggccctctcatccagcccaacctacccggacttaccatttatacggattagtccacacagatag

SEQ ID NO: 118368 - DNA, 1131 bp, synthetic construct
  misc_feature 1..1131: note = Description of Artificial Sequence: Synthetic coding sequence
  source 1..1131: mol_type = other DNA
atggctgccttgggcgatatccaggagtcaccctcggtgccgtctccagtgtcactgagtagtccagggacgcccgggacacagcaccacgaacctcagctgcacttacatggacaccagcatggatcccctggctcttccccgaaggttttatcccagccttccgatttggaccttcaggacgtagaggaggtcgagatagggagagatactttctggcctgacagcgaaccaaaacctgagcaggccccacgctcgccagggtctcaggcccccgacgaaggggcagggggcgcactcaggtctttactcaggagtctgccaaggcgggcacggtgctctgccggtttcggccctgagtcctccgcggagaggccggccgggcagcctcctggcgctgtcccttgtgcgcagccccgaggcgcatggcgggtgaccttagtgcagcaggcagctgccggccccgagggggctccagagcgtgctgccgaactgggggtaaactttggcagatcaagacagggctctgcacgaggcgctaaaccacacagatgtgaggcatgcgggaagagctttaagtacaacagtctcctactgaaacatcagcgcattcatacaggggaaaagccctacgcctgccacgaatgcgggaagcggttccgcggatggagcggatttatccagcaccaccggattcacacgggcgaaaagccatacgagtgcggacagtgtggacgggctttcagccattcctcccacttcacccagcacctaagaattcataacggagagaaaccctacaaatgtggcgaatgcggacaagccttctcacagtcctctaacctcgtccggcatcagcgcctgcatacaggcgaaaaaccctacgcgtgcagccagtgcggcaaggccttcatatggagttcggtgttaattgagcaccagcggattcatacaggcgaaaaaccttatgaatgttcagactgcgggaaggcgtttaggggaagaagtcatttttttcgacacctgcgcacccatacgggggaaaaaccattcgcgtgcggcgcttgcggcaaagctttcggccagtcatcccaactcatacaacaccaaagggtacactaccgtgagtag

SEQ ID NO: 118369 - DNA, 1131 bp, synthetic construct
  misc_feature 1..1131: note = Description of Artificial Sequence: Synthetic coding sequence
  source 1..1131: mol_type = other DNA
atggctgccctgggggacattcaggagtcccccagcgtgccaagcccagtgagcttgtcctcgcccggtactcccggaacacaacaccatgagccacaactgcacctgcacggccaccagcatgggtctcccgggtcttcacccaaggtgctgtcacagccgtctgatctggacctgcaagatgtggaggaggttgaaatcggtcgggatactttctggccagattcagagcctaagcccgaacaggcaccacgatctccgggatctcaggcacccgatgagggtgctggaggggccctccgctctctgctgaggagtctcccccgtagggctcgctgctcagccggcttcggccccgaaagttcagccgagcgccccgctgggcagcctccaggagcagtgccttgtgcacagccccggggggcctggcgcgtgacactcgtccaacaggcggcagctggaccagagggtgctcccgagcgggcggccgagcttggagtcaactttggtcggtcacggcaaggcagcgcaagaggagcaaagccccataggtgtgaagcatgtggaaagagcttcaagtataatagtcttcttctgaaacaccaaaggatccacacaggggagaagccatacgcctgccacgagtgcggcaagcgatttagagggtggagcgggttcatacaacaccaccgcatccataccggtgagaagccatacgagtgtgggcaatgcggccgggcttttagccacagcagccattttactcagcacctgaggatacacaacggcgagaaaccctataaatgcggcgaatgtggccaggccttctctcagtcttcaaatctggttcggcaccagcggcttcacacaggagaaaagccgtatgcctgttctcagtgtggaaaggctttcatttggtccagcgtcctgatcgaacatcagaggattcataccggtgagaaaccctatgaatgtagtgattgcggcaaagcctttcggggccgctctcatttttttaggcacctcaggactcatacgggggagaagccattcgcatgcggagcatgcgggaaggcctttggccagtcttctcagcttatccagcaccaaagggtgcactaccgagagtag

SEQ ID NO: 118370 - DNA, 801 bp, synthetic construct
  misc_feature 1..801: note = Description of Artificial Sequence: Synthetic coding sequence
  source 1..801: mol_type = other DNA
atgagagtgaccctggccaccatcgcgtggatggtaagcttcgtctcaaactattcgcatacagccaacattctacccgacatcgaaaacgaggactttatcaaggactgcgtcagaatccacaacaagtttcggtccgaggtcaaacctaccgctagcgacatgttatatatgacatgggatcctgctctcgcccagattgcaaaggcctgggctagtaactgtcaattcagccacaacacacgtcttaagccaccccataagttgcaccctaattttacatcacttggggaaaacatatggaccggtagcgtgcccatcttttccgtgtcatccgctatcaccaattggtatgatgaaattcaagactatgactttaagaccaggatttgcaagaaggtctgcggacattacactcaggttgtctgggctgattcttacaaggtcggctgcgccgtccagttctgtcccaaagtcagcgggtttgacgcactatcaaacggcgctcacttcatctgcaactatgggcccggcggtaactacccgacctggccctacaaaagaggcgccacttgtagtgcttgccccaataacgacaagtgcctcgacaatctgtgtgtgaatagacagagggatcaggttaagagatattattctgtggtgtaccccggatggccaatttatccccgtaacagatatacatcactctttctaatcgtaaactccgtgattctgattttaagcgtgatcattactatcttggtgcagcataagtatccaaatctggtgctactggattag

SEQ ID NO: 118371 - DNA, 429 bp, synthetic construct
  misc_feature 1..429: note = Description of Artificial Sequence: Synthetic coding sequence
  source 1..429: mol_type = other DNA
atgagcgacagcctggtggtctgcgaagttgatcctgagttgaccgaaaaactgagaaaatttagatttcggaaggaaacggacaacgccgccattataatgaaagttgacaaagaccgacagatggtcgtcttggaagaggaatttcagaatattagcccagaggaactgaaaatggaattgcccgaacggcaaccaaggttcgtggtgtattcctacaagtatgttcacgacgatggcagggtttcttatcccctgtgctttatcttcagtagtccagtcggatgtaagcccgaacagcaaatgatgtatgccggctccaagaaccgtctggtgcagaccgcagagcttactaaggtcttcgagattcggaccaccgacgacttaacagaggcatggctccaggagaagctctcatttttcagatag

SEQ ID NO: 118372 - DNA, 429 bp, synthetic construct
  misc_feature 1..429: note = Description of Artificial Sequence: Synthetic coding sequence
  source 1..429: mol_type = other DNA
atgtctgacagcctggtcgtctgcgaagtagacccagagctgaccgagaagcttcggaaatttcggtttcgaaaggaaacagataacgctgctattataatgaaagttgataaggaccgtcagatggtggtgctggaggaggaatttcagaatatcagcccagaggaactcaagatggagttgccggaaagacagccacgattcgtggtgtactcctacaaatacgtgcacgatgacgggagggtaagttatcccctctgctttattttttcttctccagttggctgcaaacctgaacagcaaatgatgtatgcgggttcaaagaatcgcctcgttcaaactgccgagctaaccaaagtctttgagatccgtacaacagatgacctaactgaggcatggctgcaagagaaacttagtttcttccgctag

SEQ ID NO: 118373 - DNA, 1299 bp, synthetic construct
  misc_feature 1..1299: note = Description of Artificial Sequence: Synthetic coding sequence
  source 1..1299: mol_type = other DNA
atggaaaggcgcagaatcacgtccgccgcccgcagatcctacgtctcgagtggcgaaatgatggtgggtggcctagcaccaggaagacgactcggcccagggaccaggctcagcctggctcgaatgccacccccattgccaacccgggtggacttcagcctagccggcgctctgaatgctggattcaaagagacgagagcaagcgaaagggctgaaatgatggaacttaacgatcgcttcgcctcctacatagaaaaagtgcgctttctggaacagcagaacaaggcccttgcagccgagctgaaccagctgcgtgccaaagaacccacgaaactcgccgatgtgtaccaagcagagttgcgggaattgcgtctgaggctcgatcagcttaccgccaacagtgccaggctggaggtggaacgggataacctcgcacaagacctcgcaactgtgagacagaaactacaggatgaaactaacttgcgactggaagccgaaaacaacctggcagcctataggcaggaagccgacgaggcaactctggctaggttggacctcgaacgcaaaatcgagtcacttgaagaggaaattcgcttcttacgaaagattcacgaggaagaagtgagagagcttcaggaacagcttgcacggcagcaagtgcatgtagagctggacgttgctaaacccgacctgactgctgctttgaaagagattcgtacacaatatgaggccatggcctcttctaacatgcatgaagccgaagagtggtacaggtctaagttcgccgacttgacagatgctgctgcaagaaatgccgaactcctgcggcaggccaagcatgaggcaaacgattacagacgtcagctacagagtctgacgtgtgaccttgaatcccttcgtggtaccaatgaaagcctcgaacgccaaatgcgtgagcaggaggagaggcacgtcagggaagcagcctcttaccaagaggcgctagcacggctggaagaagaagggcagagtctaaaggacgaaatggcccgccaccttcaggaataccaagatctgctgaatgtgaagctcgccctggacatcgaaattgccacatatcgtaaattgcttgaaggagaggagaaccgaatcactattcccgtccagactttttccaatctccagatccgggagactagtttggacactaaatccgtgagcgagggccaccttaaacggaatatcgtagtaaagaccgtggagatgagggacggtgaggtgatcaaggagtccaagcaggagcataaagacgtcatgtag

SEQ ID NO: 118374 - DNA, 540 bp, synthetic construct
  misc_feature 1..540: note = Description of Artificial Sequence: Synthetic coding sequence
  source 1..540: mol_type = other DNA
atggaacggaggcgaattacttcagctgcccgtagatcctacgtgagctcaggagaaatgatggtggggggtctagcccccggaaggcggttggggcccggtactcgcttaagcttagccagaatgccgcctccactcccaacgcgtgtggatttcagcctggccggggccctgaatgccggatttaaggaaacccgagcctccgaacgcgccgagatgatggagctgaatgatcgcttcgccagttacatcgaaaaggtgcggttcctagagcaacagaacaaggcattggcagcggaactgaaccagttgagggcgaaagaacccacgaagctcgctgatgtttaccaggccgagttgcgagaactccgactgcggctggatcagctgaccgcaaatagcgcacggctggaagtcgagagggataacttggcccaagatctggcgacagtgagacaaaagaagcaaatgaaacccccttggccagtttggatctggcggggccgcctgagccgttggcggcggagaagcggctcctag

SEQ ID NO: 118375 - DNA, 1224 bp, synthetic construct
  misc_feature 1..1224: note = Description of Artificial Sequence: Synthetic coding sequence
  source 1..1224: mol_type = other DNA
atggaaaggcgccggattacttcggccacccgcctgagcctcgcccgcatgcccccaccgctgcccacacgcgtagatttttcactcgccggcgcccttaacgccggattcaaagaaacacgggcgagtgagcgagccgaaatgatggagctgaatgaccggttcgcgtcttacatcgaaaaagttaggttcctcgagcagcagaacaaggcactggccgcagaactcaaccagttgcgggcaaaagagcctacaaagcttgcggacgtgtaccaagcagagctgagagagctcaggctccggctagatcagctcacagcgaacagtgcaaggctggaggttgaacgcgacaacttagcccaagatttagctacagtgagacagaagctgcaggatgaaactaacctcagactggaagcggaaaataacctcgccgcttaccgacaggaagcagacgaagccactctagcccgtctcgatctggagaggaaaatcgaaagtttggaggaggaaattcgttttctgcgcaagattcacgaggaagaggtccgcgagttgcaggagcagctcgctcgccagcaggtgcatgtagagttggacgtggcaaagccagatctcaccgccgctctgaaagagatccgtacacagtacgaggcaatggcgagttccaatatgcacgaggctgaggaatggtaccggtccaaattcgccgacctcaccgatgctgccgcaaggaatgccgagctgctaagacaggcgaaacatgaagccaacgattatagacggcagctccagtctctcacctgtgacctggagtctttgagaggaacaaacgaaagcctggagcggcaaatgagggaacaggaggaaaggcacgtgcgggaagcggccagttaccaggaggcgcttgctcggctcgaggaggaagggcaaagtctgaaggatgagatggcccggcatctccaggagtatcaagacctgctgaatgttaagctggcactggacatcgagatagctacataccggaaacttctggagggtgaagaaaatagaatcactataccagttcaaactttctctaatttacagattcgcgaaaccagtctggatacgaagtccgttagtgaaggtcatttaaaacgcaatattgtggtaaagacagtagagatgagagatggcgaggtaattaaagagtcaaagcaggagcacaaggacgtcatgtag

SEQ ID NO: 118376 - DNA, 1296 bp, synthetic construct
  misc_feature 1..1296: note = Description of Artificial Sequence: Synthetic coding sequence
  source 1..1296: mol_type = other DNA
atggagcgtaggcggatcacctccgcagctcgacggtcttacgtgtcttcaggcgagatgatggtcggcggcctcgctcccgggcggagattggggccaggaacccgcttatctctcgcccgtatgccaccgcccctgcccactagggtggatttcagcctggcaggagcactcaacgcgggttttaaggaaacacgcgcaagcgaacgcgcagagatgatggagctgaacgacaggttcgcatcctacattgaaaaggttagattcctggagcaacagaataaggcccttgctgcggagctgaaccagctccgcgccaaggagcctactaaacttgctgatgtctatcaagccgagttgcgtgagctgagactgagactggatcagctgactgccaatagcgcacgactagaagtagaaagggataatctggctcaggatctggctacggttcggcagaagttgcaggacgaaacaaacctccgactcgaagcagaaaacaaccttgcagcttaccgacaagaggccgatgaggccactttggctaggttagatctggaaaggaagattgaatctttagaagaagagatcaggttcctacggaagatccacgaggaggaggtgcgcgagctccaggagcaattggcccgccagcaggtccatgtggaactcgatgtcgcaaaacccgacctgacagccgccctcaaggagatcagaacgcagtatgaggcaatggctagcagcaatatgcacgaggcagaggagtggtaccgatctaaatttgccgacctgacagacgcagccgcacggaatgctgaacttctgcggcaggcaaagcatgaggctaatgactacagacggcagctccaaagtttaacttgcgacctcgaatcactgaggggtacaaatgagtcattggaacgacaaatgagagagcaggaggagcgccacgtccgggaggccgcatcctaccaggaggccctggcccggttggaggaagagggacagagcctgaaggacgaaatggcccggcatttgcaggagtatcaggatctcttgaatgtaaaactcgctctggacatcgagatcgccacttatcgcaagctcctggagggcgaagagaataggataactatcccggttcagacattttctaacctgcagattcgggggggcaagagcacaaaagatggtgagaaccataaggtcactcggtacctgaagtcactcaccatacgcgtgatccccatccaagcccaccagattgttaacggcacgcccccagcccgaggctag

SEQ ID NO: 118377 - DNA, 1317 bp, synthetic construct
  misc_feature 1..1317: note = Description of Artificial Sequence: Synthetic coding sequence
  source 1..1317: mol_type = other DNA
atggaacggaggcgtattacgagcgctgcacgccgttcctatgtttcttctggagagatgatggtgggtggtctcgcgccaggaagacggctgggccctggcacccgattgagtctggcaaggatgccccctccactgcctactcgggtcgatttctccttggctggggccctaaatgccggctttaaagagacaagggccagcgaaagagcagagatgatggagctcaatgaccgttttgccagctatatcgaaaaggtgcggtttctggagcaacaaaacaaagctcttgccgcagagctcaaccagttgagagccaaagaacctacgaagttggccgatgtgtaccaggcggaactccgagagctgaggctgcgtcttgaccagctcactgccaattccgccaggctggaagtggagcgtgataacttggcccaggacctggctacagtgcgccaaaaattacaggacgaaactaacttgcgtcttgaggccgaaaacaatctggctgcataccggcaagaggccgatgaggctacactggcacggctcgatctcgaaaggaagattgagtccctcgaggaagaaattagatttctgagaaagatacacgaggaagaggttcgggagctccaggaacagttggcccggcaacaggtgcacgtggaactggatgtcgctaagccagatctgacagctgcattgaaagaaatccgaacgcagtacgaggccatggcttccagcaacatgcatgaggccgaggaatggtatcgctcaaagtttgctgatctcactgacgccgctgcccgcaacgccgaactgttgcgacaggccaagcacgaagcaaatgattacaggcgccagttacagagcctcacatgtgacttggaatcccttagggggactaatgagagcctcgagaggcaaatgcgcgaacaggaggagcggcatgtacgagaagcggctagctaccaagaggccttggctcggcttgaggaagaagggcagagcctaaaggacgagatggccagacacttgcaggagtaccaggatctcctgaacgtaaagctggcactggacattgagatcgctacttacaggaagctgctagaaggagaggagaaccgcatcaccatccctgtgcaaacctttagtaatcttcagattcgagggcagtactccagagcctcatgggaagggcactggagtcccgccccaagctctagagcctgtcgtctacttcagacggggactgaagatcaaggcaagggaattcagttgagcctgggggccttcgtgaccctgcagagaagctag

SEQ ID NO: 118378 - DNA, 861 bp, synthetic construct
  misc_feature 1..861: note = Description of Artificial Sequence: Synthetic coding sequence
  source 1..861: mol_type = other DNA
atggccgcgcgggtattaagagcccgcggcgccgcatgggccggcggactgttgcagagggccgccccgtgttccctgctgcctcggctgaggacatggacttctagttcaaaccgaagccgagaagattcctggttgaagtctctgttcgtccgcaaggtcgatccccgaaaggacgcacacagtaatctactcgcaaagaaagagacatccaatctgtacaagctgcagttccacaacgtgaagcccgagtgtctggaggcctacaataaaatttgtcaggaggtgctgccaaagatccatgaggataagcattatccctgtaccctcgtgggcacatggaatacatggtatggggagcaggatcaggcagttcatctctggagatacgagggggggtatcccgcgctcaccgaggttatgaacaagttaagagaaaataaggaattcctcgagttccgaaaggctagaagtgatatgttgctgtctaggaaaaaccagctactgctcgagttctccttctggaacgaacctgtaccgagaagcggaccgaatatttatgagctgcgcagctatcagttgaggccaggaacgatgattgaatggggcaattattgggccagggccattcgctttagacaagatggcaacgaagcagtggggggctttttcagccaaataggccagctttatatggtgcaccatctatgggcttacagagatctacaaaccagggaggacatacgtaatgcagcctggcacaagcatggctgggaggagctggtgtactacacagtccctctgatccaggagatggagtcacggatcatgatacccttgaagacgtctcctcttcaatag

SEQ ID NO: 118379 - DNA, 744 bp, synthetic construct
  misc_feature 1..744: note = Description of Artificial Sequence: Synthetic coding sequence
  source 1..744: mol_type = other DNA
atggccgccagggtgctgagagcccggggggctgcatgggcgggggggttgctgcagagggccgctccttgcagcctcctgcctcgtctcaggacctggacctctagttccaacaggagtcgcgaggattcctggctgaaaagccttttcgttagaaaggtggatcctaggaaagatgcgcatagcaacctcttggccaaaaaagagacctccaatttgtacaagcttcagttcaaaagatgctgtcagcgatttactaaaataaacacaacattggtcctgtggtggggactgggaacccgtgggatggctagcagaactaaactcgagtttctggagtttcggaaggcccgtagcgatatgctgttgtccaggaagaaccagttactcctggaattcagtttttggaatgagccagtgcctcggtcgggccccaatatctatgaacttagatcctatcagctacggcccggaactatgatcgaatggggcaattactgggcccgggctatcaggtttagacaggacggtaatgaggccgtcggcgggtttttttctcagattgggcaactgtatatggtgcatcatttgtgggcctaccgagacctgcaaacgagggaggatatcaggaacgccgcctggcacaagcacggatgggaagaactcgtgtactacaccgtgccactgatacaggagatggagagtcgcataatgattcctctgaagacatcacctctgcagtag

SEQ ID NO: 118380 - DNA, 4683 bp, synthetic construct
  misc_feature 1..4683: note = Description of Artificial Sequence: Synthetic coding sequence
  source 1..4683: mol_type = other DNA
atggacgatgaagatggacggtgtctcttagacgtgatctgtgacccacaggctctcaacgattttctgcacggctctgagaagttggacagtgatgatttgctagacaatcccggggaagcccagtccgccttctatgaagggcctggccttcacgtgcaagaggcctctggcaaccacctgaaccccgagcctaaccagcccgcccccagcgtcgatctcgatttcctggaggatgatatcctcggtagcccagcaacggggggtggggggggcgggagtggaggcgctgaccagccatgcgatatcctacagcagtcactgcaggaagccaatattacggagcagacactggaggctgaggccgagttagacctgggcccatttcagctgcccacactccaaccggcggacgggggggcagggcctactggcgcagggggtgccgccgcagtcgcagccggcccacaggcattgtttcctgggagcactgacttgttgggcctacaggggccccctactgttcttacacatcaagcccttgtgcccccacaggatgtagttaataaagctcttagcgtccagccttttctccagcccgtcggattgggaaatgttacccttcagcccatcccaggcttgcagggccttcccaatggttctccgggcggagccacagcggcaacgctcgggctcgctcccattcaggtcgtgggtcagccagtgatggccctcaataccccaacctcccagctgttggcgaaacaggttcccgtttcagggtacttggcaagcgctgccggtccatctgagcccgtgaccctggcatctgctggggtttcccctcaaggtgccggcttggttatccagaagaacctctcagccgctgttgcaaccaccctgaatggtaactctgtcttcggtggcgccggcgcggcaagtgcgccaaccgggacgccttccgggcagcctctggccgtggcacccggtctcggctcatcaccactggttcccgcgccgaatgttatcctccatcgtacccctaccccaattcagcccaagcctgccggagtcctgccccctaagttatatcagcttactcctaaaccattcgctccagcaggggctactctgacaatccagggcgagccgggtgcattgcctcagcagcccaaggctcctcagaatctgaccttcatggccgcgggaaaggcaggacagaatgtggtgttatctggatttccagccccggccctccaagcaaacgtgtttaaacagcctcctgccacaacgaccggcgcagcgcccccacagccccccggggctttgtccaagcccatgagcgttcacctgctgaaccaggggagctccatcgtgattcccgcccaacatatgctccctggccagaaccagttcctgctgcccggagcaccagcagtgcagcttccccagcaactgagtgctcttcctgccaatgtaggtggccagatattggccgccgccgcaccccacaccggaggacaactgatcgccaacccaatcctaaccaatcagaaccttgcaggtcccctgtccttgggcccggtgctggctccccattccggagctcatagtgcgcacatcctgtctgctgcccctatccaagtcggtcaaccggccctgtttcagatgcccgtgtctcttgccgcaggatccctacccacccagtctcagcccgccccagctggtccggctgctacaacagttctgcagggcgtgacgctcccaccgtcggctgttgctatgctgaacaccccagacgggttagttcaacctgccacacccgccgccgccacaggcgaagccgctcccgtcctcacagtgcagccagcgcctcaggctcctcctgccgtatctacgccgcttcccctggggctccaacagcctcaggcgcaacagccaccgcaggctccgaccccgcaggctgccgctcccccacaggccaccacaccacagccgagcccggggttggcatccagccccgagaagatcgtgctggggcagccaccatctgcaacacccacagcaattctcacgcaggacagcctgcagatgttcttgccgcaggagcgaagccagcaaccactgtccgcggaaggtccacacctaagcgtgcccgctagcgttattgtgtcagcgcctccgccagcccaagacccagctccagccacacccgtagctaaaggtgctggactcggaccccaagcccccgactcccaagcctcaccagccccagcccctcagatcccagccgcagctccattgaagggccctggaccttccagctcgccttccctgccacatcaagcaccactgggagatagcccacacctgccctccccccatcccacaagacctcccagtagaccccccagcaggccccaaagtgtaagccggccaccctctgaaccccccctacatccttgtccccctccacaagcacccccaaccctgcctggaattttcgttatccagaatcagctaggcgtgcctcctcctgcctctaaccccgctccaacagctccaggcccacctcagcctcctcttcggccacagagtcagccccctgaaggccctttgccaccagctccacatctgcctccctcaagcacgtcttctgcagtggcctcctctagcgagactagtagcagactgccagcccctactccttctgactttcagctgcagttccctccgagccagggccctcataaatctcctaccccacctccaactctgcacctggttccagaacccgcggctcctccgcccccgccaccacgcactttccagatggttaccactcctttcccagctttgccacagcccaaagcgcttttagagagattccatcaagtccccagtggcatcatacttcagaacaaggccggcggcgcccccgctgcgcctcagacatcaacttctttgggccccttaacatctcccgcagcaagcgttctggtttctggacaggcaccatctgggacccctacagcaccctcccatgctcccgcacctgctcccatggccgcaacgggcttgccacccctactcccagctgagaacaaagctttcgccagcaacctgccaactctgaacgtggctaaggctgcaagtagcggccccggaaaacctagcgggctgcagtacgaatctaaattgagcggcttgaagaagcccccgacccttcagccctctaaggaggcatgtttcttggaacaccttcataagcatcagggcagcgtgctccatcccgactataagaccgctttcccatccttcgaggacgcactccacaggttgctaccctaccacgtatatcagggggctcttccctccccctctgactaccacaaggtcgacgaggaattcgagacagtgagcacacagctgctaaagcggactcaggcgatgttgaataagtaccgccttcttctgttggaggagagccgacgtgtgagcccaagtgctgagatggttatgatcgatcgaatgtttatacaggaggaaaagacaacacttgcactggataagcaattagctaaggaaaaaccagatgaatacgtgtcaagctccagaagcctggggcttccaattgcggcatcgtcagagggtcaccgactgccgggacacggccctctgagctcttcagctcccggggcaagcacccagcctccaccccatctgccaacaaagctggtcatccgacacgggggcgccggagggtccccttcagtgacctgggctagagcgtcatcttccctgagttccagctcaagttcctcctctgctgccagctccctcgatgccgacgaagatggtcccatgccatcaagaaatcgcccgccaattaaaacttatgaagcaaggtcccgtatcggtctgaaactgaagatcaaacaagaagcgggtctgagcaaggttgtgcacaacacagcactggatccggtgcaccagccaccaccgcctcctgccacccttaaagtggccgagcctcctccaaggccaccgcctcctcctccgccaaccggccagatgaacggaacagtggaccaccccccgccggccgcacccgagaggaaaccactaggcacagcaccccattgtccacgactgccgttgaggaaaacatatcgagagaacgtcggtggtcccggggcgcccgaaggcacacctgctggacgcgctcgcggtgggtcacctgctccgctaccagctaaagttgatgaggctacttccgggttgatcagagagcttgcggcagtggaagatgagctgtatcagagaatgctgaagggcccccctcccgagcccgctgcatccgccgcgcagggcactggcgacccagactgggaggcaccggggttacctcctgcgaagcgcagaaagagcgaaagcccagacgtggaccaggcctcattctcaagcgatagtcctcaggatgacactctaaccgaacatctccagagcgcaattgatagcattctgaacttgcaacaagctcctgggcggacaccggccccctcgtacccccacgccgcctccgcaggaactccagcttccccccctccattgcatcgtcctgaagcctatccaccgtcttcacacaacggtggcttgggcgcccgtactctaacccggtag

SEQ ID NO: 118381 - DNA, 1437 bp, synthetic construct
  misc_feature 1..1437: note = Description of Artificial Sequence: Synthetic coding sequence
  source 1..1437: mol_type = other DNA
atggcagccggggggtccggggtgggaggcaaaaggagttccaaatccgacgcagactccggctttctagggcttagaccgacctcagtggaccctgcactccggcggcggcggagaggacctagaaataagaaacggggatggagaaggctagctcaagaacctctgggactcgaggtggatcaattcttagaggatgtccgtctgcaggagaggaccagtggaggccttctaagcgaagctcctaacgagaaacttttcttcgtggataccgggtccaaagaaaaaggactaaccaagaagagaaccaaagtgcagaagaagagcctccttctaaagaagcccctgcgggtcgatctcattctggagaacaccagcaaggtgcctgcacctaaggatgtactggctcaccaagtccccaacgccaagaagctgcggcgcaaggagcagctgtgggagaagctagcaaagcagggcgagctccctagagaggtaaggcgagcacaggccaggttactgaacccgagcgccacaagagcaaagccgggcccccaagataccgtggagagacccttctatgacctgtgggccagcgacaatcccctggatcgtcctttggttggacaggacgagtttttcctagagcaaaccaaaaagaagggggtcaaacgtcccgctcggctccatacaaagccctctcaggcccccgccgtcgaggttgcccccgccggcgctagctacaacccctcctttgaagaccatcagacactgctcagcgctgcccatgaggtggagctccaaagacagaaggaggccgaaaagttagaacggcagcttgcgcttccggcaacggagcaggctgcaacccaggagagcacatttcaggaactgtgcgaaggcttactggaggagtcggacggcgagggtgaacctggccagggtgagggaccggaagctggcgacgccgaggtttgtccaacccctgccagactcgccaccaccgaaaaaaagacggaacagcagcgacgaagggaaaaggcagtgcatagactgcgggtgcagcaagctgcattgagagccgctcgcctcagacatcaggaattgttccggctgcgcgggatcaaagcacaagtggctctgagattagccgagttggctcgcaggcagcgccggaggcaggccaggcgggaggccgaagctgacaagcctcgtaggctcggaagactcaaatatcaagctcctgacatcgatgtccagctgagctcagagttgacagactcgctcaggaccttaaaacccgaaggaaacatcctgcgcgatagattcaagagctttcagagacgcaacatgatcgaaccgcgagagcgggctaaatttaagcgcaagtacaaggtcaagctggttgagaaaagggcttttagggaaatccagctgtag

SEQ ID NO: 118382 - DNA, 1419 bp, synthetic construct
  misc_feature 1..1419: note = Description of Artificial Sequence: Synthetic coding sequence
  source 1..1419: mol_type = other DNA
atggcagccggcggcagcggcgtaggcggaaagcgaagtagcaagtccgacgccgactctggattcttgggcctgagaccaacatccgtggatccagctctgcgacggaggaggcgtggcccaagaaataagaagcggggctggagaagactggcacaggagccactggggttagaggtggaccagttcttagaggacgtgagactacaggagagaacttcaggcgggttgctgagcgaggcccctaacgagaaactgttcttcgtcgatactggctcaaaagaaaaggggctgacaaaaaagcggactaaagtccagaagaaaagtttgcttcttaagaaacctctcagggtcgacctgatcctggagaacacctcaaaggtgcctgctccgaaggacgtcttagcacatcaagtcccgaatgcgaaaaaactgagacggaaggagcagttatgggagaagctggccaagcagggtgagctgcctcgggaggtgcgcagagctcaggcacgcttgctaaacccctcagcaacccgagcaaagcccggaccccaggacaccgtcgaacgacctttctacgatctgtgggcctccgataacccgttggaccgaccactcgtcggccaagatgaattctttctggagcagacaaagaaaaagggtgtcaaacggccggcaaggctccataccaagccttctcaagcgccagctgttgaagtggcacctgccggcgcttcctacaaccccagttttgaagatcatcagacactgctgtctgccgcgcatgaagttgagttacagaggcagaaggaagccgagaagcttgaacgacagctggcccttcccgcaaccgaacaggccgctactcaggaatccacattccaagagttatgcgaaggactgctcgaggagagcgacggcgagggagaaccaggccagggagagggaccagaggctggcgacgctgaggtctgtccaacaccagcccgccatcacagagaagaggacggagctgccgcggccaggaggctgtgcaccggatgcgggtactctaggcctagatgcggcccaccgggctcgggtactaggtcctgctctgggtgtgctggttcaccaggcggcccggaggcgggcggggcccgacgacagaggcggcgacaggcacgccgagaggcagaggccgacaaaccacggcgtctcggcaggcttaagtaccaagccccagatatagatgtgcagctatcatccgagctgacagactcattacgcacactcaagcccgaagggaacatcctccgagatcgtttcaagtcctttcagcgccgcaatatgattgaacctagggagcgggcaaagttcaaaagaaaatataaggtgaagcttgtcgagaagcgggccttccgcgaaatccagctgtag

SEQ ID NO: 118383 - DNA, 792 bp, synthetic construct
  misc_feature 1..792: note = Description of Artificial Sequence: Synthetic coding sequence
  source 1..792: mol_type = other DNA
atggccgccggggggagtggggtgggcggtaagaggtcctctaaatctgatgctgactccggcttcctaggcttgagacctacgtccgtggacccggcattgaggcggcgacgcagggggcccaggaacaagaagcgcgggtggcgcaggttggctcaggaaccgcttggccttgaggtggatcagtttctcgaggatgtcagactccaggaacgcacatccgggggattgttatccgaggcccctaacgagaagctgttcttcgttgacaccggatccaaggagaaaggactcaccaagaaaagaaccaaagtccagaagaaatctcttctgctgaagaagcctttgagggttgacctgatacttgaaaacacaagcaaggtcccagcacccaaggacgttctggcccatcaagtccccaatgcaaagaaactccggcggaaggagcagctttgggcaagtgataacccccttgatagaccattggtaggccaggatgagtttttccttgaacagaccaagaagaagggggtgaagaggcgggaggccgaggccgataaacctcgtagactgggtcgcctgaagtatcaggcccccgatatcgacgtgcagctcagttctgagttgactgatagtctgaggacactgaagcctgagggtaatatcctgagagaccggttcaagtcatttcagcgacgcaacatgattgagccaagggagagagcaaaattcaaaagaaaatataaggtgaagttggtcgagaaacgcgccttcagggagattcaattatag

SEQ ID NO: 118384 - DNA, 1656 bp, synthetic construct
  misc_feature 1..1656: note = Description of Artificial Sequence: Synthetic coding sequence
  source 1..1656: mol_type = other DNA
atggcaagaggcgctgaagggggcagaggggacgccggctgggggctgagaggtgccctggccgctgtcgctttgctttctgccctgaacgctgccggaacagtattcgccctttgccagtggagaggactgagctcagccctacgggctcttgaagcgcagcggggccgtgaacagcgggaggactccgccctgcggtcctttcttgcggaactctcaagggctccacggggagcctccgcaccgcctcaagaccctgcgagttcagcccgcaataaacggtcacatagcggggagcctgcacctcatatcagagccgaaagtcacgacatgctcatgatgatgacatattcaatggtgccaatcagggttatggtcgacctttgcaactccacgaagggcatatgtctcacgggtccttcaggccctcctgggcctcccggagctggggggctgcccggacacaatgggctggatggtcagccaggacctcaaggcccgaaaggggagaaaggcgctaacgggaagaggggcaagatgggtattcctggggcagccgggaatcctggcgagcgtggggaaaagggcgatcacggcgaattgggcctacagggtaatgaggggccaccaggacagaagggggagaagggtgataagggcgacgtttcgaacgatgtacttctggccggtgcaaaaggggaccagggccccccgggtcctcccggtccccccggtcctcctggtccccctggacctcccggcagccggagggccaaaggcccacgccagccatccatgttcaacggacaatgcccaggggagacctgtgctattccaaatgatgacacactggtcgggaaagcagacgagaaggcatctgaacatcattccccacaggcagagagcatgatcacgtcaatcggcaacccggttcaggtgctgaaagtcaccgagacttttggaacatggatcagggaatcggcgaacaaaagcgacgacaggatttgggtgactgagcatttcagtggcatcatggtcaaggagttcaaggatcagccgagtctactgaacggcagttacacatttattcacttgccctactactttcatggatgtgggcacgtagtctataataatagtttatattatcacaagggaggctcaaacacactggtcaggtttgagttcgggcaggagacaagtcagacacttaagctggaaaatgcgctatattttgatcgaaagtacttgttcgcaaattcaaaaacctatttcaacctcgccgtggatgagaagggcttatggatcatctacgcttccagcgttgatggatccagtatcctggttgcacagctcgatgaaagaactttcagtgtagtccagcatgtgaatactacttaccccaagagcaaagcaggaaacgccttcatcgcccgcggaattctctacgttacggatactaaagacatgagagtcaccttcgcatttgatctactcggagggaagcagattaacgctaactttgacctgaggactagccagtcagtcctggctatgctggcgtataatatgagggaccagcatctctacagctgggaggatgggcatttaatgctttatcccgtgcagttcttgtccactactctcaatcagtag

SEQ ID NO: 118385 - DNA, 1284 bp, synthetic construct
  misc_feature 1..1284: note = Description of Artificial Sequence: Synthetic coding sequence
  source 1..1284: mol_type = other DNA
atggtggacctgtgcaattcaaccaagggtatctgccttacaggcccgtcgggaccgcctgggcctcccggtgccggtggacttccaggccataacggtctggatgggcagccaggtccacaaggtcccaaaggggagaagggagctaatggcaagcgcgggaaaatggggattccgggagccgctggaaaccccggggagagaggagaaaagggggaccacggtgagctgggactacaggggaatgaaggcccccctggacagaagggagagaaaggggacaagggcgacgtgtcaaatgacgtcctgctcgctggagctaaaggcgaccagggaccacccggacctcccggacctcccgggcctcccgggccccctggcccccccggatctcgaagggctaaggggccacgacagccctctatgttcaacgggcagtgcccaggcgaaacctgcgccatcccaaacgacgatacactggtgggcaaggcagatgaaaaagcttcagaacatcatagccctcaggctgagtccatgattactagcattggcaaccctgttcaggtcctgaaggttacggaaactttcggaacctggatccgggaaagcgcgaataagagtgacgatcggatctgggtgacggaacacttcagcggaataatggttaaggagttcaaggatcagccctcactgctgaatgggtcctacacctttatccacctaccctactatttccacggctgcggccatgtggtatacaacaattctctttattatcacaaagggggaagcaatactttagtgcggttcgaatttggacaggagacatcacaaacgctgaagcttgagaatgcactctattttgacagaaaatatttgttcgccaactccaagacatactttaacctcgcggtggatgaaaaaggcctgtggattatttacgccagttccgtggatggatccagtattctggtcgctcagctggatgagcgaacgttctccgtggttcaacatgtcaacactacgtaccccaagtcaaaagctgggaatgctttcatcgcacgggggattctctacgtgacagatacaaaagacatgagggtaacgttcgcgtttgacctcctcggtggcaagcagatcaacgccaactttgaccttagaacctctcagagcgtacttgctatgctggcttacaatatgagagatcaacatctgtattcttgggaggatggccacttaatgctttaccccgtgcagtttctaagcactacccttaaccagtag

SEQ ID NO: 118386 - DNA, 1284 bp, synthetic construct
  misc_feature 1..1284: note = Description of Artificial Sequence: Synthetic coding sequence
  source 1..1284: mol_type = other DNA
atggtggacctctgtaattcaaccaaagggatttgcttaacagggccaagtggtccccccggccctcctggcgccggaggcctaccgggccataacggcctggatggtcaaccgggccctcagggtcccaagggcgaaaaaggcgccaatggaaaacggggcaagatgggaatacccggcgccgccggcaaccccggggaacgaggcgagaagggtgaccatggggagttgggtttgcaggggaatgagggacctcccgggcagaaaggcgagaaaggagacaagggagacgtgagtaatgatgtactactcgctggagcaaagggcgatcagggcccccctgggccacccggcccccccgggcctcccggtccccctggacctcccggaagcagacgggcaaagggtccccggcagccatctatgttcaatggccagtgtccgggggaaacctgtgcgatccccaatgatgatacccttgtggggaaggctgatgagaaggcatctgaacaccactcacctcaggcagagtccatgattacaagcattgggaaccctgtacaggtgctcaaagttaccgagacctttgggacatggatacgggagtcagccaacaagtcagacgacagaatttgggtgacggaacatttctcaggtatcatggtaaaggaattcaaggaccagccctctttacttaacggttcatacacattcatccatctcccatactatttccatgggtgcggccatgtggtctataacaattccttatattatcacaagggaggaagtaatactctcgtgaggttcgaattcggtcaggagacgtcccaaactcttaaactggagaatgctttgtactttgataggaagtatttgtttgccaactcaaagacctattttaatctcgctgtagacgaaaaaggtttgtggataatttatgcctcctcagtggacggcagttccatcctggtcgcacagctcgacgagcgcaccttttctgttgttcagcacgtgaataccacatatcctaagagtaaggccggcaacgctttcatcgctagaggaatcctatacgtcacagatacaaaggatatgcgagtcaccttcgcttttgacctgctgggaggaaagcagatcaatgccaactttgacctgcggacctctcagtctgtcttagcaatgttagcatacaacatgagggaccagcatctgtacagctgggaagatgggcacctaatgctgtacccggtacaatttctgagcactacgctgaatcagtag

SEQ ID NO: 118387 - DNA, 1575 bp, synthetic construct
  misc_feature 1..1575: note = Description of Artificial Sequence: Synthetic coding sequence
  source 1..1575: mol_type = other DNA
atgcattctttagacgagcccctggacctaaagttaagcattacaaagcttcgtgccgccagggagaaaagggaacgcacattgggggtagtgcgcccgagggcactgcaccgggaactcggcctggttgacgacagccctaccccaggaagccccggttcccccccaagtggttttctgctaaattcaaaattccccgagaaggtcgagggaagattctcagctgcccctctggtggatctttctcttagcccaccctcaggcctcgattccccaaatggtagcagctcactcagccctgagcgccagggaaatggggacctacccccggtgccctccgcctcggacttccagccactgcgatatctggacggagtgccttcctccttccagttctttctcccactgggctctggcggtgctttacatctccccgcatctagcttccttacaccacctaaggacaagtgcctaagccccgatctgcctcttcctaagcagctcgtgtgccgttgggctaaatgcaaccagctcttcgaattgctgcaagatctcgtggatcacgtgaatgattatcacgtgaagcctgaaaaagatgccgggtattgctgccactgggaaggctgcgcacgccacggccgcggctttaatgctagatataaaatgctcattcatatcagaacacacacaaacgaaaaaccacatcggtgccccacgtgttccaaatccttcagccgcctcgaaaatctaaagattcacaaccggagccacactggcgaaaagccctacgtatgcccgtacgaaggttgcaacaagagatatagtaattcgtcggaccggttcaagcataccaggacacactatgttgataagccatattactgcaagatgccggggtgccacaagcggtataccgatccgagctccctgcgcaaacatattaaggcccatggccacttcgtatcccacgaacagcaagagctgttgcagctacgccctccacctaagcccccactccccgcaccagatgggggcccctatgtgtcaggagcgcagatcataatacctaatccagccgcgttgtttgggggccctggcctgcccggactacccctgcctctagctcccggaccgctggatctcagcgccttagcatgtggcaatggcgggggctcaggtggaggcggagggatgggaccgggactgcctgggcctgtattacctttaaatctggccaaaaatccccttctgccttctccattcggcgccgggggtctaggtctcccggtcgtcagcttgttagcgggtgccgctggcggcaaagcagagggagagaagggcagaggcagcgtgcccacacgcgctctcggaatggaaggccacaaaacacccctggagcgcacggaatccagttgctctagacccagtcccgacggactgcctttgcttcccgggactgtgctggacttgtctacaggagtcaactccgcagcctcatctcctgaggcactggctcctggatgggtggtgattccccccggatccgtgttgctgaagcctgcagtggtgaattag

SEQ ID NO: 118388 - DNA, 1575 bp, synthetic construct
  misc_feature 1..1575: note = Description of Artificial Sequence: Synthetic coding sequence
  source 1..1575: mol_type = other DNA
atgcacagccttgacgagccgttggaccttaagctgtccatcacaaaactacgggccgccagggagaagagggagcgcactctgggagtcgtacggccaagggccctccatcgggagctcggcctggtcgacgattctccgacacctggttcccccggttctcctccttcaggtttccttttaaatagtaagtttcctgagaaggtcgaaggaaggttcagcgctgcacctctggtcgatctctctctatccccccccagcgggttggattcacctaatggctcgtcctccttgtccccagagagacagggcaacggagatctcccccctgttccttctgcgtctgacttccaacccttgagatacctcgacggggttccgtcgtcatttcagttttttttgccattgggctcaggcggcgcacttcatctgcctgcgtcctcatttctgacccctcctaaggataagtgtctcagtcctgatctgccgttgcccaagcagttagtatgtaggtgggctaaatgcaatcagctgttcgaactcctacaagatctggtagatcatgtgaacgactaccatgtgaaacctgaaaaggatgcagggtactgctgccattgggaaggatgtgcaaggcacggacggggctttaatgcccgatacaagatgctgatacacattcgcacccatacaaatgagaagccacaccggtgtcctacttgctccaaaagcttcagcagactggaaaatctcaagatccacaatcggtcccacactggagagaagccctatgtgtgtccatatgagggttgcaacaagcggtatagcaatagctcggacaggtttaagcatactcgaacccactacgtcgataaaccatactattgcaaaatgcctgggtgccataaacggtatactgacccctcttccctgcgaaagcatataaaagctcacggacacttcgtttctcacgagcagcaggagctccttcagctccggccgccccctaaaccacctctgcctgcccctgatggagggccttatgtgagcggagctcagataatcatccctaacccagcggctctgttcgggggccccggcctgccaggtctgcctctccccttggcaccaggtcccctggacttgagcgcattagcttgcggcaatggaggaggatcgggtggaggaggcggcatgggtcccggtctaccagggccagttttgcccctgaatctggctaagaacccactgttgccaagtccgttcggtgcaggcggtctggggcttcccgtcgtaagtctgctggcgggtgccgcaggtggcaaggccgagggtgaaaagggacgagggtccgtgcctaccagagctctgggaatggaggggcacaagacacctctggaacgtactgaaagtagctgctcccgacccagccccgacggcctgccactgctgccggggaccgtactggacctatcaacaggagtgaactcagcggcgagctcacctgaggccttagcacccgggtgggttgtgatcccccccggatctgtcttgctgaagcccgccgtggtgaattag

SEQ ID NO: 118389 - DNA, 2328 bp, synthetic construct
  misc_feature 1..2328: note = Description of Artificial Sequence: Synthetic coding sequence
  source 1..2328: mol_type = other DNA
atgatggttcaacgattgggtctgattagtccgcccgcatctcaggtttctaccgcctgcaatcagatcagcccgtccctccagcgtgccatgaatgccgctaacctgaacattccaccttcggacacacgcagccttatctctagggaatcattagcatccactaccttatctttgactgagtcccaatctgccagtagtatgaaacaggagtggtcccaaggataccgagcacttcccagtctgtcaaatcatggctctcagaatggcctcgacctgggcgacctgttgtcccttccaccaggcacctcaatgtccagcaattccgtgagcaattccttaccttcttatctgttcggcacagaatcctctcacagtccatatcccagtccaagacatagtagtacgcgctcacactccgcacgaagcaagaagcgtgccctgagcctgtcccctctgtccgatgggattggcattgatttcaatacgattattaggacttcacctacctcccttgttgcttacattaacgggtcgcgggccagtccagccaacctgtctcctcagcctgaggtatacggccactttctgggcgtacggggatcttgcattccacagccccgacccgtccctggatcacagaaaggggttctcgtcgcaccaggagggctggccctcccagcctatggggaggacggggccttggaacatgaacggatgcaacagttggaacacgggggtttgcagccgggattggtaaaccacatggtagtacagcatggtctccccggccctgattcacaatcagccgggctcttcaaaacagagagactcgaggagttcccaggaagtacagtggatctccctcctgccccacctctcccaccactccccccccctcctggaccaccacctccctatcatgcacatgcccatctccaccaccctgagctgggtcctcacgcgcagcaactggctctgcctcaagctacactggatgacgatggggaaatggacggcatagggggaaagcactgctgcaggtggatagactgcagcgccctttacgaccagcaggaggaactggtgcgacacatcgagaaggttcatatcgaccagaggaagggcgaggacttcacttgcttctgggctggctgcccaagacggtacaaaccttttaacgctagatataagcttctgatccacatgcgggttcacagtggggagaaacccaataagtgtacttttgaagggtgcgagaaggcattctccagactggagaatcttaagattcacctgcgcagccacactggtgagaagccctatctgtgccagcatccaggctgtcagaaggcattttcaaactccagtgatcgcgcgaagcaccagagaacccacttagacacaaaaccctacgcctgtcagattccagggtgtactaagcgctacaccgatccctcctcactgcgaaagcatgtaaaggcccacagctctaaagagcagcaagcgcgcaaaaaacttagaagtagcacagaactgcatcctgatctcctgacagactgtctcaccgtgcagtccctccaaccagcgacctcaccaagagatgctgctgctgaaggtacagtaggtcgatctcccggcccggggccagatctgtatagtgccccaatttttagctccaattacagttctagatcaggcacagccgcgggcgcagtaccgccccctcacccagtgtctcaccctagccccgggcacaacgtccagggctctccacacaacccctccagccagctgcccccactcactgccgtagatgccggcgcagagagatttgccccatctgctccctctcctcatcatattagtcctagacgggttccagccccgtccagcatactgcaaaggacgcagcctccatacacacaacaaccatcaggaagccatctcaaatcctatcagcccgagacaaattctagtttccaacctaatggaatacatgtccacggtttttacggccagctccagaagttttgtcctcctcactatcccgacagccagcggatcgttccccccgtgtcctcctgctcggtggttccctccttcgaggattgtttggtccctaccagcatgggccaggccagcttcgacgtgtttcatagagcattctctacacacagcggaattactgtctacgatttgccttcatcatctagttccctttttggagaatccctcaggtcgggtgcagaggacgccacattcttacagatctccaccgtcgatcgatgcccaagtcagcttagttcagtgtatacggagggatag

SEQ ID NO: 118390 - DNA, 2793 bp, synthetic construct
  misc_feature 1..2793: note = Description of Artificial Sequence: Synthetic coding sequence
  source 1..2793: mol_type = other DNA
atgaacggacggtcttgcagcatgagccttcaccgtacatccggcaccccccaggggccccgtatggtgtccggccaccatattcctgcgattcgggcgcacagtggcactccaggaccctcgccatgcgggtccacctcatcacctaccatggctagcctagcgaataacctgcacctgaagatgccgagtggtggggggatggccccccagaataacgtcgcagagagtaggattcacctccctgccttatctcccaggcggcagatgttaaccaatggtaagccccggtttcaggtgactcaggccgggggtatgagcgggagccacactctcaagccgaaacaacaagaattcggcagcccattccctccaaacccggggaagggcgcattgggattcggtccacagtgtaagtcaatagggaagggatcatgcaacaacctggtggttacttcatcaccaatgatggttcagcggttgggcctcataagccccccagcatcacaagtgagcacagcatgcaatcagatctcaccctctctacaacgagccatgaacgctgccaatctcaacatccctccatctgacactcgttcattgatttcgcgagaatctttggctagcacaacgcttagtttaaccgaatctcagagcgcaagcagtatgaaacaggaatggtcgcaggggtatcgagcactgccttccctgtcaaatcacggtagtcagaatggtctggacctgggggacctgctgtctctgccccccggcacaagtatgtccagtaattcagtgtccaattcattaccctcttaccttttcggtacggaatcttcccattccccttatccgtcccccaggcactcaagcacacgcagccattcagcacgcagtaagaaacgggccctctctctgagtccgttgtctgatggcattggcatagactttaacaccatcataaggacttcacctacatcgctcgtcgcctatattaacggaagtagagccagccccgcgaaccttagccctcagcccgaagtgtacggacactttctgggggttcgagggtcatgtatcccacagcctcgccccgtacccggatctcaaaagggtgtgttagtggcccccggtgggctggctctgccggcctacggcgaggatggcgccctggagcatgaaaggatgcaacagctggaacacggaggcctacagcctgggctcgtgaaccacatggtggtgcagcacggtttgcctgggccggatagccagtctgccggcctgtttaaaacggaaagattggaagagtttcctggctctaccgtcgacctacccccagctcctccccttccgccactgccccctccccccggacctcccccaccctatcacgcccatgctcacctgcaccaccctgagttgggtccccatgctcagcaactggccctgccacaagcgacattagatgacgacggagaaatggacgggattgggggcaagcactgttgtcgctggatcgactgcagcgccctgtacgaccagcaggaggagctggtgcgacacatcgagaaggttcacattgatcaacgtaaaggcgaagattttacctgtttttgggccgggtgcccacgccgctataagcccttcaacgcgcgatacaaacttctcattcatatgcgcgtccactctggtgaaaaaccaaacaagtgcactttcgagggatgtgagaaagccttctcccgacttgagaacctgaaaatacatctgcgctcccacacaggcgaaaagccatatctttgccagcaccctggctgccagaaggcttttagcaactcatctgatagagctaagcaccagcgaacacatctggacaccaaaccttacgcctgtcagatcccaggatgcaccaagcgctacacagacccttcgtctttgcggaaacacgtcaaggctcactcaagtaaggaacagcaggcaagaaagaaactccgctcctccaccgagctgcaccccgacctgttaactgactgccttacggtccagtccttgcagcctgcaactagccctagagatgctgctgccgaagggactgtcgggcgctccccaggtcctggaccggatctctattctgctcctattttttcctcgaactactcttccagatcagggaccgccgctggagcagtccccccccctcacccagtctctcacccttctccaggccataatgtgcagggcagcccccataatccctcaagccagcttccacctttgactgccgtggatgccggagccgagagatttgccccctctgcaccgtccccccatcatatcagtcctagacgggtgccggcaccaagcagcattttacagcgaacccagcccccctatacacagcaacctagtggttctcacttaaagtcataccagccggaaaccaactctagtttccagccaaacgggatccacgtgcacggattctatggccagctgcagaagttttgccctccccattatcccgacagtcagagaatcgttccaccggtcagcagctgttcggtggtgccgtctttcgaggactgtctggtccccactagtatgggacaggcatcctttgacgtgtttcatcgcgctttcagcacccattctgggatcactgtgtatgatctgccttcatcatcctctagtctctttggggagtccctccggtccggcgccgaagacgcaacctttctgcagatttcgaccgtggatcgctgtccatcccagctgtcctccgtctacacagagggctag

SEQ ID NO: 118391 - DNA, 270 bp, synthetic construct
  misc_feature 1..270: note = Description of Artificial Sequence: Synthetic coding sequence
  source 1..270: mol_type = other DNA
atgatggttcagagactagggttaatttcgccacccgcctcccaggtaagtactgcatgtaatcagatctcacccagtctgcaacgggccatgaacgctgcaaatctaaacatacccccctctgacacccgctctttaatatcccgtgaatctcttgcctcgactactctgtctctgaccgagtcccagagcgcatcaagtatgaagcaggaatggtcacaaggatacagagccctgccttctctgtcgaatcacgggtcgcagaattag

SEQ ID NO: 118392 - DNA, 735 bp, synthetic construct
  misc_feature 1..735: note = Description of Artificial Sequence: Synthetic coding sequence
  source 1..735: mol_type = other DNA
atgaacgggagaagttgttctatgtcattgcataggacaagtgggaccccccagggaccaaggatggtttctggacatcacattcctgccatccgggcccatagcggaacccctggccctagcccctgcggtagcacctcgagtcccactatggcgagcttagccaacaaccttcacctgaagatgcctagtgggggcggaatggctccgcaaaataatgtcgctgagtctagaattcatttgccggccctttctccccgacgccagatgctgactaatggcaaaccacgatttcaagtcactcaagcagggggcatgagtggtagccacacgctgaagcccaaacaacaggagttcggaagccctttcccccctaacccaggcaagggagcactgggcttcgggcctcagtgcaaatccattgggaaaggctcttgtaataacctggtggtgacctcttctcccatgatggtccagcggttgggattgatcagtcctcctgcttcgcaggtttctactgcctgcaatcagatttcgccaagccttcagagagccatgaatgccgccaatctcaatattcccccgtccgacacgcggtccctaatcagcagagaaagcctcgcgtcaactacactatcactgaccgagtcacagagtgccagtagcatgaaacaggagtggtctcagggttatcgagccttgccttccctgagcaatcacgggagccagaattag

SEQ ID NO: 118393 - DNA, 270 bp, synthetic construct
  misc_feature 1..270: note = Description of Artificial Sequence: Synthetic coding sequence
  source 1..270: mol_type = other DNA
atgatggtccagcggctggggctgataagccctccagcttctcaggttagcaccgcctgtaatcagatttctccgagtctgcagagagccatgaatgccgccaacctaaatatccctccaagtgatactaggtcactcattagcagagagtcactcgcttccactaccctctctcttactgaaagccagtcagcctcttccatgaagcaggagtggtctcaagggtaccgcgcccttccatctctgagtaatcatggttcacagaactag

SEQ ID NO: 118394 - DNA, 270 bp, synthetic construct
  misc_feature 1..270: note = Description of Artificial Sequence: Synthetic coding sequence
  source 1..270: mol_type = other DNA
atgatggtgcaaagactgggactcatctcacccccagcctcacaagtgtcaacagcttgtaaccagataagtccttccctgcagcgtgctatgaatgcagccaacctgaatatccctccatctgacaccaggagtcttatctcaagggagtccctggcatctaccacattgtctctgaccgagtctcagtctgcttctagcatgaagcaggagtggtcacagggatacagagccctgccatctctatccaatcatggctcacagaattag

SEQ ID NO: 118395 - DNA, 735 bp, synthetic construct
  misc_feature 1..735: note = Description of Artificial Sequence: Synthetic coding sequence
  source 1..735: mol_type = other DNA
atgaacgggcgcagctgctccatgagcttgcaccgaaccagtggcaccccccagggaccaagaatggtgtcaggccaccacatccccgcaatacgggcccatagcggcacgcctggaccttcgccgtgtggtagtacaagttcgccaactatggcctcattagccaataatttgcacctcaaaatgccatccggagggggtatggctccacagaacaatgtggcagagagccggatccacctgcctgcgctatccccgaggaggcaaatgctgactaatggcaagccacgcttccaggttactcaggccggggggatgtccgggtcccacacgttgaagcccaagcaacaggagtttggctctcctttccctccaaatcccgggaagggcgcccttgggttcgggcctcaatgcaagagcatcgggaagggatcctgtaacaacttagtcgtgacatccagcccaatgatggtgcaacgactgggcctgatttccccacctgcttcccaggtgtcgacggcctgcaatcagatatcccctagcttgcaaagagccatgaatgccgctaacctaaatattcccccttccgatacaaggagcctgatctccagggagtctcttgcgagtactacgttgagcttgaccgagtctcagagcgcctcctctatgaaacaggaatggtcccagggttatcgggccttaccatccttgtccaaccacggcagccaaaactag

SEQ ID NO: 118396 - DNA, 219 bp, synthetic construct
  misc_feature 1..219: note = Description of Artificial Sequence: Synthetic coding sequence
  source 1..219: mol_type = other DNA
atgcaccgcaggcgtctagcattgggacttggcttctgtttgctcgcaggtaccagcctctccgtgctctgggtgtatttagaaaattggctgccagtatcctacgtgccttactatttgccctgtcctgagattctcctcgagtataggggtgtgatatctgctcactgtaacctgcacctaccaggctctagcaattgtcatgcttcagccacctag

SEQ ID NO: 118397 - DNA, 483 bp, synthetic construct
  misc_feature 1..483: note = Description of Artificial Sequence: Synthetic coding sequence
  source 1..483: mol_type = other DNA
atgcaccggcgcaggctcgcactgggattagggttctgtttgttggcaggcacgtccctgtccgtgctgtgggtatatctcgagaactggctccccgtgagctacgtcccgtactatctcccgtgcccagaaattctgcccatgatgatggctctaagctgtctgtgccaccagcagcatgaagcggccttgcaggaaggcgaggcaacacccgcacgtggtatggtgacagtcccctctgcacaggccgcaggcgctcaggcccatacggccgcggacactcacacactcgtcggggctcacaggctgagaggtaacttacagcctagagcctctgcagcgcacttgccggcaactgaaccagatcactggggccatggggtctgccgaggggaggtgcattcctttcatccagtcctgcccggcgtctcccggggcgtgcttcatgcttgggtgcccggtgcactcctgcatttgcactag

SEQ ID NO: 118398 - DNA, 1044 bp, synthetic construct
  misc_feature 1..1044: note = Description of Artificial Sequence: Synthetic coding sequence
  source 1..1044: mol_type = other DNA
atgcacagacggagactggccctcggactagggttctgtcttctagccgggacgagtctttcagtattatgggtctatctggaaaactggctgccagtttcatatgtgccatattatctgccatgcccagaaatattcaacatgaagcttcattataagcgcgagaagcctcttcaaccagtcgtctggagccaatatcctcagcctaaactgctcgaacaccggcctacccagttgctgaccctgacgccttggctggctcccatcgtctctgagggcacctttaatcctgaactcctgcagcatatctatcagcccctcaaccttacaataggagtcaccgtctttgcagtcggaaaatatacccatttcatccagagttttctagaatctgccgaggagttcttcatgcgcggatacagggttcactattacatttttaccgacaaccctgccgctgtgccgggggtgcccctgggccctcacaggctgctgtcctccattccaatccaaggccactcccactgggaggagacatccatgcggcgaatggagacgattagtcagcacattgcaaagcgagctcatcgggaagttgattacctcttttgcctcgatgttgatatggtgttccgaaatccatggggccctgagaccctcggtgacctggtggcggcaatccatcctagctattacgctgtacctcggcagcagttcccttatgagaggcgtagggtcagcactgccttcgtcgccgatagtgagggcgatttttattatgggggcgctgtgtttggaggccaggtggcccgcgtgtatgagttcactagaggttgccatatggcgatactcgcggataaagcgaacggcattatggcggcttggagggaggagtcccatctcaaccggcatttcattagcaataagccaagtaaggttctttccccagagtacctatgggacgaccggaagccgcaacctcccagtctcaagctgattcgctttagcacactggacaaagatatttcctgcctacgctcgtag

SEQ ID NO: 118399 - DNA, 885 bp, synthetic construct
  misc_feature 1..885: note = Description of Artificial Sequence: Synthetic coding sequence
  source 1..885: mol_type = other DNA
atgcacagaagacgactagctttagggctgggattctgcctgcttgctgggacatccctctcagtgctctgggtgtacttagagaattggctgcctgtgtcttatgtgccatattatttaccctgtcctgagattttcaacatgaaactgcactacaaacgcgaaaagcccctacagccagttgtttggtcccagtatccgcagccaaaacttctggaacataggcccacccagctcctgaccctgactccctggcttgcaccaatagtcagcgagggcactttcaatcctgaacttttgcagcatatctatcaacccctgaaccttaccatcggcgtgactgtttttgccgtcggtaacccctcttggtcgcagcccagatcatcctcctgcgtgggaactggctgtacgactacatcctccctaacgacgttacaaccatttcctgggtccaggtgggttcccacggggttctccgccccatccccttctagggttacacctacggggcgccgacacccatgtgctggttggagaccttccgcttccacattgctcagggggttgacaggacggtggacaactagtagtgccctcatgtggacatggtgcttcgggactcgaggagcattgcggccctgggaaacttggtggctcccctttacccaggcaacgacaccttttcccgcttcatcctcaccaatgtcggcaggtgtctttccactaccgctgtggcagacagccaaaggaactagcataatggtgggtcagagctctggaggtaggtggccagggtacatgtcgctgctgggggcagcaacgtggcctagctggaggactcgtcctatggcctcgtggctacccggagggaggaaagcaacctag

SEQ ID NO: 118400 - DNA, 993 bp, synthetic construct
  misc_feature 1..993: note = Description of Artificial Sequence: Synthetic coding sequence
  source 1..993: mol_type = other DNA
atgcaccgaaggagattggctctcggacttgggttctgcctcctggccgggaccagcctctctgtgctgtgggtctacctcgaaaattggctgcccgtgtcgtacgtgccttactatctaccttgcccggagattctgagccagtatccccaacccaaattgttggaacatcgtcccacgcagctgcttacattgacaccttggttggcccccatcgtgagcgaagggactttcaacccagaactgttacagcatatctaccagccgcttaatttgactattggcgtgacagttttcgccgtgggtaagtacacgcacttcattcagtcttttttagagtcagcagaagaattctttatgcgaggatatcgagtacactactatatcttcaccgacaatccggctgctgtcccgggcgtccccctgggaccacatcgtctcctgtcttctatccctatccaaggacacagtcattgggaagagacatccatgcgcagaatggaaacgatttcacaacacattgccaagcgcgcacatagggaagtcgactacctgttttgtctcgacgtggatatggtctttagaaacccctgggggcctgagaccctcggcgatctggtcgccgccatacatccctcatactatgcagtgcctagacagcagttcccttacgaaagacggagagtgagcactgccttcgttgctgattcagagggagacttttattatggtggggccgtgtttggcggccaggtcgctcgagtgtacgagttcacacgcggatgccacatggccatcctggcagacaaggccaatgggattatggcggcctggagagaagaaagtcacctgaaccgccatttcatttccaacaaaccctcgaaggtgctgtctcctgagtacctctgggatgaccgtaaaccccaacctccttctttgaagctcattagattcagtacacttgataaggatattagttgcctgcgcagttag

SEQ ID NO: 118401 - DNA, 1434 bp, synthetic construct
  misc_feature 1..1434: note = Description of Artificial Sequence: Synthetic coding sequence
  source 1..1434: mol_type = other DNA
atgcctccatgccagcctcagagaccactgctgctactgttactgttacttgcttgccaaccgcaggtgcctagcgctcaggttatggatttcctgttcgagaaatggaaactctacggtgatcagtgccatcacaatctgtctctgttacctccacctaccgaacttgtgtgtaaccggacattcgacaagtatagctgctggcccgacactccagcaaacacaactgccaacatttcatgtccctggtacttgccctggcaccacaaggtgcagcacaggtttgttttcaaaagatgtggccccgacggacagtgggtcaggggaccacgcgggcaaccgtggcgggatgcttcacagtgtcagatggatggagaggaaatcgaggtccagaaagaggtggctaagatgtattcatctttccaggttatgtacacagtaggctactcattgtccctgggggcactgcttctggccctggccattctgggtggactgtctaagctacactgtacccgtaacgccatccacgcgaacttgttcgcctccttcgtgctgaaggccagttctgtcctggttatcgacggactgctgcgtacccggtactcccagaagatcggcgacgacctttccgtatccacttggctttcagatggtgcggttgccggctgcagagtggctgccgtgtttatgcagtacggcatcgtggctaactattgttggctgcttgtagaggggctctatctgcacaacctcctggggctggcaacgttgcccgagcgctcatttttcagcctgtatctgggtattgggtggggggcaccgatgttgttcgtcgtgccctgggccgtggtcaaatgcctgttcgagaacgtgcagtgctggacatccaatgacaatatgggtttttggtggatcctgagatttcctgtctttctggctatactgatcaatttcttcatctttgtgcggatcgtgcagttactagtggccaagctgagagcccggcagatgcaccacactgactacaagtttcgcctggccaagtcaactctgacgctcatccccttgttaggggtacacgaggtggtctttgccttcgtgaccgacgagcacgcccaagggaccctgcgatccgctaaactgttcttcgacctgttcctaagctcctttcaggggctgctcgtggccgtgctgtactgctttcttaacaaagaagtccagagcgagttgcgccggcgatggcaccggtggagactaggtaaagtgttatgggaggagagaaacacgtctaaccaccgagcctcctcctccccaggtcacggaccaccatcgaaggagttgcagtttggcagagggggaggttctcaggattcctcggcagagacccccttagctggcggcctgcctagactggctgagagccctttctag

SEQ ID NO: 118402 - DNA, 1392 bp, synthetic construct
  misc_feature 1..1392: note = Description of Artificial Sequence: Synthetic coding sequence
  source 1..1392: mol_type = other DNA
atggctggggcacccggacctctccggttagccctgctcctactcggcatggtcgggcgcgctggcccgaggcctcagggagcaactgtctcactgtgggagactgtgcagaagtggcgagaataccgtcggcagtgtcaaagatcattgactgaagacccacctcctgcaactgacctattttgtaatcgcacttttgatgagtatgcgtgttggcctgacggggaaccagggagtttcgtcaacgtctcctgtccgtggtatctcccctgggccagttcagtccctcaaggacatgtctaccgcttctgtaccgcagaggggttatggctccagaaggacaactcaagccttccctggcgagatctttccgagtgtgaggagtccaagagaggagaaagatctagcccagaagaacagttgctattcctctacataatatacacagtaggctatgcccttagcttctcagcactagtgatcgcatctgctatcctcctcggattccgacaccttcattgtaccaggaattacatacacttaaatttgttcgcttcttttatactcagagctttgtcagtgttcattaaggacgccgccctgaagtggatgtactctaccgctgcccagcagcaccagtgggacggattattgtcctatcaggacagccttagctgcaggctcgtatttctgctcatgcagtactgtgtggcagcaaattattattggctgctcgtggaaggagtgtacctttatacccttcttgccttttcagtgctctccgaacagtggatatttcggttgtacgtgagcatcggatggggagtacctttactgttcgtggtcccttggggtattgtgaaatacctttacgaggacgagggatgctggacacggaacagcaacatgaattattggctgataataagactccccatactctttgccatcggcgttaatttcctgatttttgtgagagtgatttgcattgtggtgagcaagctcaaagcaaacctgatgtgcaaaacagacatcaagtgccgcctcgcaaagtctacacttaccttaattcctctcctgggcacacacgaagtgatttttgctttcgtgatggatgagcatgcccgaggcacactgcgttttatcaagctcttcacagagctcagcttcacaagcttccagggcctgatggtggctattctctactgcttcgttaataacgaggttcagttggagtttagaaaatcctgggaacggtggagactcgagcacctgcacatccaaagggacagcagtatgaagccactgaaatgtcctacctccagtttatctagcggtgctactgccggaagtagcatgtataccgcaacgtgccaggcttcatgttcctag

SEQ ID NO: 118403 - DNA, 1662 bp, synthetic construct
  misc_feature 1..1662: note = Description of Artificial Sequence: Synthetic coding sequence
  source 1..1662: mol_type = other DNA
atgaaattgggttcctctcgggccggtccaggacgaggtagcgctggattgctcccaggcgtgcacgagctgcccatgggcatacctgccccctggggaacaagcccactgagcttccaccgcaaatgttcactgtgggctccgggtcgaccatttctcacactggtccttctggtgagcataaagcaggtgactggctccctgctcgaagaaacaacgcgcaaatgggcccagtacaagcaggcttgccttcgcgatctcctgaaagagccctcaggaatcttctgcaatgggactttcgatcagtacgtatgttggccacatagcagtcctggaaacgtctctgtgccctgtccatcttatctcccatggtggtctgaggaaagcagcggaagggcataccgccactgtctggcccaggggacctggcaaactatcgaaaacgcaactgacatttggcaggacgattcagagtgttccgaaaatcacagctttaaacagaacgtggacaggtacgcactcctgagtaccctccagctgatgtacacagtgggctatagcttttccctgataagccttttccttgcactcaccttattacttttcctgcgaaagctccattgcacgcgcaattacattcacatgaatctcttcgctagtttcatcctgcggaccctggctgtgctggttaaggacgttgtcttctataattcatacagcaaaagaccggacaacgagaatggctggatgagttatctaagcgaaatgtccacatcctgccggtcagtgcaggtgctgctccattatttcgtgggggctaattacctctggctcctggtggaaggactgtacctgcataccctgctggaacccacagtgttgccagagcggcggctgtggcccaggtatctgctgttgggatgggcctttccagtgctattcgttgtgccctggggctttgctcgcgcccatctggaaaacaccggatgttggacaactaatggcaacaaaaagatctggtggattatccggggcccaatgatgctgtgcgtgacagtaaacttttttatctttctaaaaattttgaagctgcttatttccaagttgaaagctcatcagatgtgtttccgcgattataagtaccggcttgcgaagagcacacttgttctcattcccttactcggagtgcatgagatcctgttttctttcatcactgacgaccaagtggagggcttcgccaagctgatacggctcttcattcagcttaccctttcaagctttcacggttttttagtggctctgcagtacggatttgctaatggcgaagtcaaggctgaactcaggaaatattgggtccgcttcttgctggcaaggcatagcgggtgccgggcttgcgtactggggaaggattttcgcttcctgggcaagtgccccaagaaactttcagaaggcgatggagctgagaagctccgaaaactgcagccaagtctcaattctggaagactgcttcatctggccatgcggggcctcggggaactgggagctcaacctcaacaggaccacgctagatggccccggggctcttccctttcagaatgtagtgaaggggatgtgacaatggccaacactatggaggagattctggaagagtcagaaatttag

SEQ ID NO: 118404 - DNA, 1053 bp, synthetic construct
  misc_feature 1..1053: note = Description of Artificial Sequence: Synthetic coding sequence
  source 1..1053: mol_type = other DNA
atgggcattcctgccccatgggggacctccccacttagctttcatagaaagtgctccttgtgggctccaggacgccccttcctgacactggtgctgctggtgtccatcaagcaggtaacgggctctctgttggaggagaccacacggaagtgggctcagtataagcaagcctgcttgcgcgatctgctgaaggagccctcaggcatattctgcaacggaaccttcgaccaatatgtttgttggcctcacagcagccctggaaatgtaagcgtgccatgtccttcctacctcccctggtggagcgaggagagctctgggcgggcttataggcactgcttggcccaggggacctggcagaccatcgagaatgcgaccgacatctggcaagacgatagtgagtgctccgagaatcacagttttaagcaaaacgtggaccggtatgctctgttgtccaccctgcagttgatgtatactgtagggtatagtttctcgctgattagcctgtttctagcactgacactgctcctcttccttaggaaactccattgtactcgcaattatattcacatgaacttgtttgcctccttcatccttaggacattagcggtattggtcaaagacgtggtattctacaattcgtacagtaaaagacctgataacgaaaatggctggatgagctacttatcagagatgtcaacaagttgccgatcggttcaggtactattgcactactttgtgggcgccaattacctatggctcttagtggaagggctctatctgcacaccctactagagccgaccgtgctccctgaacgacgtctgtggcccaggtatttattgttgggttgggccttcccagtgctctttgttgtgccttggggtttcgccagggcacacctagagaacaccgggtgctggacaactaacggcaacaagaagatctggtggatcatccggggacctatgatgttgtgcgtcacagccctcgggctggaagaaacgggcctgaagaggaatggcagcattccctttgggcataaggaggatatatag

SEQ ID NO: 118405 - DNA, 1665 bp, synthetic construct
  misc_feature 1..1665: note = Description of Artificial Sequence: Synthetic coding sequence
  source 1..1665: mol_type = other DNA
atgaaactgggatcctctagagcagggccgggcagaggaagcgccggcctgctccctggtgttcacgaactgcccatgggcatacctgctccatggggtacttcaccgctgagtttccataggaaatgttccctgtgggcccctggccgcccattcctgactctcgtcttactggtctcaatcaagcaggttacaggctcacttctagaggaaacaacacgaaagtgggctcagtataagcaggcctgcctgcgggacctgctgaaggaacccagtgggattttctgcaacggtactttcgaccagtacgtttgctggccacattcatctcccgggaatgtgtccgtgccctgtccttcctatctgccttggtggtctgaggagtcaagcggcagggcatacagacactgtctggcccaagggacatggcagactatcgagaatgccaccgacatttggcaagatgactctgagtgctctgaaaaccattcattcaagcaaaacgtggataggtatgccctgctgagtacactgcaattaatgtacaccgttggttatagtttttctctcattagcctcttcctggctctcactctcctgttgttcctgcggaagctgcactgcacacggaattacatccacatgaatctgttcgcatcatttattctcaggaccctggccgttctggtgaaggacgttgtgttttacaactcctacagcaagagacccgacaatgaaaacggctggatgtcatacctctcagagatgtctacgtcatgtcggagcgtccaggtcctcttacattacttcgtgggagccaactatttatggctgttagtggaagggctctatctgcataccctgctggagcccacagtcctccctgagaggagattatggccgaggtacctgctgctgggatgggctttcccggtgctgtttgttgtcccctgggggttcgctagggcacacctcgaaaacactggttgttggacaacgaacggcaacaaaaaaatttggtggataatcaggggccctatgatgctttgcgtgactgtgaactttttcattttccttaaaatccttaagttattgataagcaagctaaaagctcatcagatgtgcttcagggattacaaataccgccttgccaagtcaaccctggttctcatccccctccttggggtccacgagattttgttctcattcattaccgatgatcaagtggaaggatttgcaaagttgatacgactgttcatccagctaactctgagctcctttcatggattcctggtcgccctgcagtacggtttcgccaatggggaggttaaggccgagctgcggaagtactgggtgcgttttctcttagcgcgccattcaggttgcagggcctgtgtgcttggcaaagattttaggttcctcggaaagtgcccaaaaaaactgtccgaaggtgatggagccgaaaaacttagaaaactgcagccaagtctcaactcaggccggctgctgcacctcgctatgagggggctgggcgagctcggcgcccaacctcagcaggatcatgcacgatggccccggggctcatctctgtctgagtgttccgaaggtgatgtcactatggcaaatacaatggaagaaatcctggaagaaaagcgttcccaatag

SEQ ID NO: 118406 - DNA, 687 bp, synthetic construct
  misc_feature 1..687: note = Description of Artificial Sequence: Synthetic coding sequence
  source 1..687: mol_type = other DNA
taggccacagatatctggcaggatgactccgagtgtagtgagaaccattcatttaaacaaaatgtcgatcgatatgccctccttagtacactacagctgatgtacaccgtaggctacagttttagtttgatatccctgtttttagccttgactcttctcctcttccttagaaagttgcattgcaccagaaattacattcacatgaacctgtttgcatcctttattctgcgaacgctggcagtgttagttaaggacgtggtgttttataattcttacagcaaaagaccagacaatgaaaatggctggatgagttatctgtccgagatgagcacatcatgccggtctgtgcaggtgttgctgcactatttcgtgggcgcaaactatctgtggctgctggtggagggcctgtacctgcacacactgttagagcctaccgtcctgcccgaacggcggctatggcctaggtatctgctgcttggctgggccttccccgttctgttcgtggtgccatgggggttcgcaagagcccatttggagaacacaggctgctggacgacgaacgggaacaaaaagatttggtggatcatacgtggaccaatgatgctgtgtgttactgccctcggcctagaggaaactgggcttaagagaaatgggtctataccattcggccacaaggaggatatctag

SEQ ID NO: 118407 - DNA, 1725 bp, synthetic construct
  misc_feature 1..1725: note = Description of Artificial Sequence: Synthetic coding sequence
  source 1..1725: mol_type = other DNA
atggagcccacagaaaacccttgccagggtccactgggccagaaggccggtgaaaagccgctcgctgcaggacctggcgaagaggagctgcttagagggtccgctccccacgcccaagatacacaatccgaagagctgccgccgtcatgtacaatcagcggggaaaagaaaccaccggccgtgtcaggcgaagccaccggtgcagacgcaggacgtctttgtcctcccccgcggtctcgtgccccacacaaagataggacgctcgcaaggtcacgcccacagacccaaggcgaggactgttccctgcccgtcggagaggtcaaaatcgggaagcgctcctactcccctgcgcccggcaagcagaagaagcccaacgctatgggactcgcccctacaagctctccgggggcccctaacagcgcaagagccacacacaaccccgtcccctgtggatccgggagaggaccatgccacttagccaatctcctgtcaactctggcacagagcaatcagaatagagaccacaaacaaggcccccccgaggtgacctgtcagattcggaaaaagactagaacgttgtataggtctgaccagctggaagagctggagaaaatctttcaggaggatcattatcccgactcagacaaaaggagggaaattgctcagaccgtcggcgtaacaccacagaggataatggtgtggtttcagaataggagagccaagtggaggaagatggaaaaattgaatggtaaagagagtaaagacaacccagcagcaccgggaccagcctcatcacagtgcagttcagccgctgaaatcctcccagccgtgcccatggagccaaagccggacccgtttccccaggaaagcccattggacaccttcccggaacctcctatgcttttgacctccgatcagactcttgctcctacacagcccagcgaaggcgctcaaagagtggtgactccccccctgttcagcccaccaccagttagaagagcagatctgccgttcccattagggcccgtgcatacccctcaactgatgccactgctgatggacgtagcaggatctgattcctcacataaagatggcccatgtgggagctgggggacaagtattaccctgcctccaccatgtagctaccttgaagagctggagccacaggattaccaacagtccaatcagccaggacctttccagtttagccaggcccctcagcccccgctgttccagtctccccagcccaaactcccttatctgccaacattccctttttccatgccatcctctctcaccttgcccccacccgaagactcacttttcatgtttccctgtgggccctccggcggcacttcccagggctattgtcctggcgccagctcaggccagattctcatgcagccccccgccggaaatataggcactgcaagctggtccgacccttgtcttccagaattgccatttccaggcccattttgccctcaggcactcggccatcctcccggaggtgacggttattttccagacctgtttcctaccccctgtccccaggcactgggcaggcagccgagttcagctctgagctggatgcccgaaggagctcgccccggcaccggcccactcctgtccaaagcaaaggaagaacccccggccgcttcactggatcagcctagcgcactagaagaggctcggggcgacgataagaattctcacgttccgtag

SEQ ID NO: 118408 - DNA, 1722 bp, synthetic construct
  misc_feature 1..1722: note = Description of Artificial Sequence: Synthetic coding sequence
  source 1..1722: mol_type = other DNA
atggcgaacgccgaagtgtccgtgcccgtcggcgacgtggtggtggttccaaccgaaggcaacgagggcgagaaccctgaagatacaaagacgcaagtgatcctgcagttgcaacccgtccagcagggtctctttatcgacggacatttttacaaccgcatttacgaggcgggttcagagaataacaccgcagtggtggcagtggagactcatacaatccacaagatagaagaaggcatcgacaccggaaccatcgaagcgaatgaggacatggaaatcgcgtatccaatcacctgcggggagtcaaaagctatcctgctttggaaaaaatttgtctgcccgggaattaacgtgaagtgcgttaagttcaatgatcagctgattagtcctaagcatttcgtacatctggccgggaaatccaccttgaaagattggaaacgcgctatccggctaggagggatcatgctcaggaagatgatggattccggtcagatcgacttttaccagcatgacaaagtctgttccaacacttgtcgctccaccaagtttgacttgctgatctcatctgcaagggcgcctgtccccggccagcaaaccagtgtggtgcagacccccacgtcagctgatggcagtatcacgcagattgccatttctgaggaaagtatggaagaggctggactcgaatggaattccgccctgacggccgccgtcacaatggccacagaagaaggagtgaagaaagactccgaggagatcagtgaggacacgctgatgttctggaagggaatcgctgatgttggattaatggaagaggtagtctgcaacattcagaaggaaatcgaagagctcttacgcggagtacagcagcgcttgatccaggcccccttccaggtgaccgacgctgccgtgctgaataacgtcgcccatacattcggtctgatggacactgtaaaaaaagtgttagataacagacgaaatcaggtggagcagggggaggaacagttcctttacacactgaccgaccttgagcgtcagcttgaggaacaaaagaagcagggccaagaccaccggctgaagtctcagactgtgcagaacgtggtgcttatgcctgtcagcacacccaagccgcctaagaggcctaggctgcaacgtccagcatcaactacagtgctttccccgagtccaccagtccagcagcctcagtttactgtgatcagtcctatcaccatcacacccgttggacagagcttcagtatggggaacatacccgtggcaacgctgtcacagggtagctcgcctgtcaccgtgcatacccttcccagtggacctcaactgttccgctacgccaccgtggtcagctcggccaagagttcctcccctgacaccgtgaccatccacccctcctcctctctcgctctcctgtctagcaccgcaatgcaggatggatccacactgggcaatatgaccacaatggtttctcccgtggagctggtggccatggaatctgggctcacgtctgctatccaggctgtcgagtctaccagtgaggacggccaaaccattatagaaattgacccagcacctgatcccgaggcagaggacaccgagggaaaagctgtgatcctggagaccgaactgcgaaccgaggagaaagtcgtggccgagatggaggagcatcagcaccaggtccacaatgtagagatcgtagtgctcgaagactag

SEQ ID NO: 118409 - DNA, 1692 bp, synthetic construct
  misc_feature 1..1692: note = Description of Artificial Sequence: Synthetic coding sequence
  source 1..1692: mol_type = other DNA
atggccaacgctgaggtgtccgtgccagtaggggatgttgtcgtggttccaaccgaagggaacgagggggagaaccccgaggacacaaaaacacaggttatactgcagttacagccagttcagcaggggatatacgaggctgggtctgaaaataatactgccgtggtcgctgtcgaaacacacacgattcacaagattgaggagggcatcgacactggaaccatcgaagctaatgaagacatggagatcgcataccccattacatgtggggaatccaaagccatcctcctgtggaaaaaattcgtatgtccgggaatcaacgtgaagtgcgttaaatttaatgaccagctgattagccctaagcacttcgtgcatttagcaggaaaaagtaccctgaaagactggaaaagggccattcgactaggaggaattatgctgcgtaaaatgatggacagtggacagatcgacttctatcagcacgacaaggtgtgctccaatacctgccggtccaccaagttcgacctgttgataagcagcgccagagctccagtacccggccagcagacaagcgtggttcagacccccaccagtgccgatgggtcaatcacacagatagctattagtgaagagtctatggaagaggcggggctagagtggaacagcgcattgacagccgccgttactatggcaaccgaggaaggggtgaaaaaagactccgaagagatctccgaggacacacttatgttttggaaaggcatcgcagacgtgggactcatggaggaggtcgtgtgcaatattcagaaggaaattgaggagctcttaagaggtgtgcagcagaggttaatccaggccccattccaagtcacagacgccgctgtattgaataacgtggctcatacctttggattaatggacacagtgaaaaaggtccttgacaacagacgcaatcaagtggagcagggggaggagcaattcctttacacactgactgatcttgagcggcagttggaagagcagaagaagcaagggcaggatcacagactaaaatcacagacagtgcaaaacgttgttttgatgccagtgagcacacccaaaccaccaaagcgaccgcggctccaacgtcctgcatccaccaccgtgttgagcccgtcccccccggttcagcagccgcaattcaccgtaatcagtccaatcacgatcacaccagtgggccagtctttctcaatggggaatatccccgttgcaactttatcccaggggtcctcccccgttaccgttcacacacttccctccggccctcagttgtttcggtacgccactgtagtctcatctgccaagagttcatctccagatacagttactatccatccttcatcatccctggctttgcttagctcaacagccatgcaagacgggtctaccctcggcaatatgacaacaatggtgagcccagttgaactcgtagccatggagtcgggcttaacttcagcgattcaggccgtcgaatcaacatccgaagatggccaaaccataatcgaaattgacccagccccagaccctgaggccgaggacacagaaggaaaagcggtgattttggaaacagaattgagaacagaggagaaagttgtcgctgagatggaagaacatcaacaccaggtgcataatgttgagattgttgtcctagaagattag

SEQ ID NO: 118410 - DNA, 1692 bp, synthetic construct
  misc_feature 1..1692: note = Description of Artificial Sequence: Synthetic coding sequence
  source 1..1692: mol_type = other DNA
atggctaacgccgaggtatcggtacctgtgggagatgtcgtcgtagtgcccactgagggcaacgagggcgagaaccccgaagacactaaaactcaagtgattcttcagcttcagcccgtgcagcagggcatctacgaggccgggagcgaaaacaataccgcggtggtggcagtggagacccacacaatccataagattgaggagggcatagataccggcaccatcgaagcaaacgaggacatggaaatcgcatatcccatcacctgcggcgagtctaaagcaatcttgctatggaagaagtttgtgtgccccggcattaacgtcaagtgcgtgaaattcaatgaccagctcatctctccaaaacacttcgttcacctggcgggcaaatcgacattaaaagactggaaaagagctatccggttgggtggaataatgcttaggaaaatgatggatagcgggcaaattgatttctatcaacatgacaaggtctgtagcaatacctgcaggagcaccaagtttgatcttctgatcagctcggcaagggcccctgtgcctggccagcaaacttccgtcgtgcaaactccgacgtcagcggatggaagcatcactcaaattgccattagcgaagagtctatggaggaggcgggattagaatggaattcagcactcacagctgctgtgactatggccacagaggagggagtcaaaaaggactcagaggaaatctctgaagatactcttatgttctggaagggtatcgcggatgtgggactgatggaggaagtggtgtgtaatattcaaaaagagattgaagaactgttgcgtggcgtgcagcagagactgatccaagccccctttcaggtgactgacgccgcggtgctgaacaatgttgcacatacgtttgggcttatggataccgtcaaaaaggtgctcgacaaccgacggaaccaggtggagcagggtgaggaacagttcctgtatacgttaacagatttagaacgccagctggaggaacagaagaaacaaggacaggaccaccgtctcaagagccagaccgttcagaacgtggtattaatgccagtctcaacgcctaaaccccccaagaggccacggcttcagagaccagcaagcactactgtgctgtccccctccccccctgttcagcagccccaattcaccgtgatatcccccatcacaataacacctgtgggacagagcttctccatgggaaacatccccgtcgccacactatcccaggggagcagccctgtcactgtccatactctgccctctggaccccagttattccggtacgctaccgttgtcagctctgccaaatccagttcccccgataccgtgaccatccacccaagcagcagtttggccttactgagcagcaccgcgatgcaggacgggtccacgctgggtaacatgacaactatggtgagccccgttgagttggttgcgatggagtcgggactcacttcagcgatacaggcggtggagtcgacttctgaggatggtcagaccataatcgagattgatcccgcgccggacccagaggccgaggatacagaagggaaagcagtgattttggaaactgagctgaggaccgaagagaaagtggtggccgaaatggaggaacaccagcatcaggtgcacaatgtggagattgttgtactggaagactag

SEQ ID NO: 118411 - DNA, 1083 bp, synthetic construct
  misc_feature 1..1083: note = Description of Artificial Sequence: Synthetic coding sequence
  source 1..1083: mol_type = other DNA
atgctccgaagactccccgcccttgccgcaaggcgacctcctgcccgcagacggcgaatctatgaggctggctcagaaaacaatacagcagtagtggctgttgagactcacaccatccataagatcgaggagggaatcgacaccgggactattgaggccaacgaagatatggagattgcctatcctatcacctgtggagagagtaaagccatcctgttgtggaagaagttcgtttgcccggggattaacgtaaagtgcgtgaagttcaatgaccagttgatttcccctaaacatttcgtgcacctagctggcaagtccacgctaaaagactggaagcgggctatacgtctgggaggcataatgctccggaagatgatggactcgggtcaaatagacttttaccagcatgacaaagtttgttcgaacacatgccgaagcaccaagttcgatctgttgattagctcagcccgtgccccagtccctggacagcagaccagtgttgtccagacccccacatctgccgatgggtcaattacacaaattgctatatccgaggaatcaatggaagaagccgggcttgagtggaacagcgctctgactgccgcagtaaccatggcaaccgaagaaggcgtaaaaaaagattctgaagaaatctctgaagacacgcttatgttttggaaaggcattgccgatgtaggcctcatggaggaagtggtgtgcaacattcaaaaggagattgaagagctgctgaggggggtccagcagcggctgattcaggctcccttccaagtgaccgacgcagcggtcctaaataacgtcgctcacacgtttgggctgatggacacagtgaagaaggtcctggataatcgcagaaaccaggttgaacaaggggaggagcagttcttgtatacgctgaccgacctagagcgccagctcgaggagcaaaaaaaacagggccaggatcaccgcctgaaatctcaaacagtccaaaacgttgttctgatgccagtctccactcccaagccccctaaacggccccggctacaacgtcctgcttctacaactgtgctcagccctagctag

SEQ ID NO: 118412 - DNA, 1593 bp, synthetic construct
  misc_feature 1..1593: note = Description of Artificial Sequence: Synthetic coding sequence
  source 1..1593: mol_type = other DNA
atggcaaccccagacgtgtctgtccacatggaggaagttgttgtcgtgaccacacccgataccgcagtggatggttccggggtcgaaggtgtcaagaccgttttggtgactaccaatttggctccccatggaggcgacctgacggaggacaacatggagaccgaaaacgctgcagctgctgctgcagccgcttttacagctagttctcagctcaaggaggccgtgctcgttaagatggctgaggagggagagaatctggaggcggaaatcgtctaccctattacctgtggggacagcagggccaatctaatatggcggaaattcgtgtgccctggaattaatgtgaaatgcgttcagtacgacgagcacgttatcagcccgaaggagtttgtccacttggcaggtaaatctacactgaaggactggaaaagggctattcgcatgaacgggattatgttaagaaaaatcatggactccggggagcttgacttttaccagcacgataaagtttgcagcaacacctgtagatcaacaaaaattgatttatctggagctcgcgtctcattgtcttcaccaacttccgcggagtatatccccctcacaccggcagccgccgacgtgaacgggtctcccgccactattacaatcgaaacttgcgaggacccaggggattggacggccgccataggagatgacacctttaccttttggagggggttgaaagacgctgggctgttagacgaagtgatccaggagttccaccaggagttggtcgaaactatgcgaggactccagcagagagtgcaggaccctccactacagctgcgcgacgctgtgctactgaacaacattgtgcagaatttcggcatgctagatctggttaagaaagtccttgcttcacacaaatgtcagatggatcggagccgagagcagtacgcccgcgacctggctgccctcgaacagcaatgtgacgagcatagacgcagggctaaggagttaaaacacaagtcacaacatctgtctaatgttctaatgactctgacaccagtgagcttgccaccacctgtaaagcggcctcgactcgctagagcaaccagcggccctgccgcgatggcaagccaagtgctcactcaatccgcccaactggcccttggtccaggagtccccgtgccacagttgactagtgtacctttggggaaagtggttagtacactgccctcgaccgtcttggggaaaggttcgcttcaggctccaccagccagtagccctgcatccccgctgcttggtggatatactgttctcgcctcaagcggaagcacttacccatctaccgtcgagatccaccccgacgcgagcagccttaccgttctgtccaccgccgcagtgcaggacggttctacggtgtttaaggttgtgtcgccactgcagttgcttactctccccgggctagggcctaccctccaaaacgttgctcaggcttcaccggggtcctccacgatcgtgacagtgcccgcgggggcagccccgggccccgaggagcacacagctactattgaggttgcagctatggccgaagaccatgagcggaaatag

SEQ ID NO: 118413 - DNA, 1440 bp, synthetic construct
  misc_feature 1..1440: note = Description of Artificial Sequence: Synthetic coding sequence
  source 1..1440: mol_type = other DNA
atggaaaccgagaatgctgcagctgccgcagcggctgcgtttactgccagttcgcagttgaaagaagccgtgcttgtaaagatggccgaagagggtgagaaccttgaggctgagatcgtgtatcccattacttgtggcgactcccgtgccaatcttatttggaggaagttcgtctgtccaggtatcaatgtgaagtgtgtccagtatgacgaacatgttatatccccgaaggaattcgttcaccttgccggcaagtctacactgaaagattggaagcgagccatcaggatgaacggcattatgttgcgcaaaatcatggactctggagaactggacttctatcagcacgacaaggtttgctccaatacatgcaggagcaccaaaattgatctcagcggtgcccgcgtgtccctttcttctccgacatctgcagagtacattcccctgacgcctgcagctgctgatgtaaatgggagtccagcgactatcacaattgaaacatgcgaagaccctggagattggaccgccgcaattggagatgacactttcacattttggcgcggactgaaggatgctggcctcttggacgaagttattcaggagttccatcaggagcttgttgaaaccatgcggggactgcagcagcgcgtacaagatccccctctccagctgcgggatgcagtcctcctcaataacatagtccagaacttcgggatgttggacctggtgaaaaaggtgctggctagtcacaaatgccaaatggatcggagccgcgagcaatatgcccgggaccttgcagcactcgaacaacaatgcgatgaacatcggagaagggcgaaagaattgaagcacaaaagtcagcatctgagtaacgtgctgatgacattaacaccggtcagcctgccgcccccagtcaagagaccgagactggcccgggcgacatcagggcctgctgctatggcctcccaggtactcacccagtcagcccaacttgccctgggtcccggagtgccagtccctcaactaaccagcgtacctctggggaaagttgtgtccacactgcctagcactgtgctcggcaagggaagcctgcaggccccacccgcatcatctcccgcgagcccactgcttggagggtatactgttctcgcctcaagcggatcgacatacccctccacagtggagattcaccccgacgccagttccctgacagtactgtcaaccgcagcagtgcaggacggtagcaccgtgttcaaagtggtgagtccgctgcaactcctgacgctccccggattaggtcctactctgcagaacgtggcacaagcaagcccagggagctccaccattgtcacggtaccggccggagctgctccagggcctgaggagcacacggcaactatcgaagtggccgccatggccgaagatcatgagcgcaagtag

SEQ ID NO: 118414 - DNA, 1593 bp, synthetic construct
  misc_feature 1..1593: note = Description of Artificial Sequence: Synthetic coding sequence
  source 1..1593: mol_type = other DNA
atggcaacgcccgacgtcagcgtgcacatggaggaagtggtcgtggtcaccacacctgataccgctgtggacggctctggggtggagggcgttaagaccgtgcttgtgaccaccaacctcgccccacacggaggcgacctaacagaagataacatggagaccgagaacgccgcagccgccgctgcagcggccttcacggcctcctcacagctgaaggaagccgtgctggtcaagatggccgaggagggggaaaacctggaagccgagatcgtgtaccctattacctgcggggactctagagctaatctgatttggcggaagtttgtatgcccaggaattaatgttaaatgcgtccaatatgatgaacacgtgattagtcctaaagaattcgtgcacttggcggggaaatctaccctgaaggattggaaacgcgccatccgcatgaacggtataatgctgcgcaagatcatggattctggagagttggatttttatcagcacgacaaagtatgctcaaatacttgtcgctcaaccaagatagacctaagcggcgcgagagtctccttaagttcccctacctccgccgagtacattcccctgaccccagctgctgctgatgtaaacggcagtccagcgaccatcactattgagacttgcgaagaccccggggattggactgcagccattggtgatgatacatttaccttctggcgggggttaaaggacgcaggtctcctcgatgaggtgatacaggagttccaccaagaattggtggagaccatgcgaggacttcagcagagggtgcaggacccaccattacagctgagggacgcagtgctactgaataacatcgtgcagaatttcgggatgctggatctggttaagaaagttctggctagtcacaaatgccagatggaccgctcgcgagagcaatacgcgagggacctggctgccttggaacagcagtgtgatgaacataggaggcgagcgaaagaacttaaacacaaatctcaacatctttctaatgtgctcatgaccctcaccccagtgagcttgcctcccccggtgaagaggccccgccttgcccgagccacaagcggtcccgctgccatggcttctcaggttctgacccagagcgcacagttagctttggggccaggtgtgcccgtccctcagctgacgagcgttcccttaggtaaagttgtgtcaaccttaccatccacagtcctgggaaagggctcattacaggctcctccagccagcagccctgcatctccacttctcggtgggtacacagtgcttgccagcagtgggtcgacgtacccctcaacagtcgagattcatcccgacgcgtcgtcgcttactgttcttagtactgctgccgtgcaggatgggtctaccgtcttcaaggtggtttcccccctgcagctgctcaccctccccggattgggacctacactccagaacgtagctcaggcctcacctgggagctcaactatcgtgacagtccctgccggggctgctccagggcccgaggagcatacagcgactatagaagtggcagctatggcggaggatcacgagcggaaatag

SEQ ID NO: 118415 - DNA, 1401 bp, synthetic construct
  misc_feature 1..1401: note = Description of Artificial Sequence: Synthetic coding sequence
  source 1..1401: mol_type = other DNA
atggccatggacgtgaccagaagccaggcccagacagccctcactctggtggaacaaatcctggcggaatttcagttacaagaggaggatctgaagaaggtgatgcgcaggatgcagaaggagatggacagagggttacgcctggaaacccacgaggaggcctccgtgaagatgcttcctacatacgtccgaagcacaccggaggggtctgaggtcggtgatttcctctcccttgatctcggtggcaccaatttccgggttatgctcgtaaaagtcggagagggagaagagggtcagtggtctgtcaaaactaagcaccagatgtacagcattccggaggatgccatgaccggcacggccgagatgctgtttgattatatatccgaatgcatcagtgactttctcgacaaacaccagatgaaacacaagaagttgccactcggatttactttttctttcccggtgcgtcacgaagacattgacaagggtattctgctcaattggacaaaggggtttaaggcttctggagccgaaggaaataacgtggtgggcctgctgcgagacgcgattaagcgccgcggcgacttcgaaatggacgtcgtcgcgatggtgaatgacacagtagcgaccatgatttcctgctattatgaggaccatcagtgtgaagtgggaatgatcgtgggaaccggctgcaatgcctgttacatggaggagatgcagaacgtggaactggtggaaggcgacgagggacgcatgtgcgtgaataccgagtggggcgcttttggggatagtggggagttggacgaattcctgcttgagtatgataggttagtcgatgagagttctgccaatccggggcagcagttgtacgaaaagctgatcggcggtaagtacatgggagagctcgtacgattggtgctcctgcgcctggtcgacgagaaccttcttttccatggcgaagcttccgagcagctgcggacccggggggcgtttgaaacacgatttgtttctcaggtagagtcggacacaggcgataggaaacagatctataatattctttcgaccctcggactgagacctagcaccaccgattgtgatatagtgcggagggcttgcgaatctgtgagcacccgtgcagcccacatgtgctcggccggactggccggcgtgattaatagaatgagggagtcacgctccgaagacgtgatgagaataacagttggcgtggatgggtccgtgtacaaactgcatcctagcttcaaggaacggttccatgcatcagtgcgtagactaacaccaagctgcgaaatcactttcatcgaatctgaggaggggagcggtaggggggctgctctggtttctgcagtggcctgcaagaaagcttgcatgttaggacagtag

SEQ ID NO: 118416 - DNA, 1395 bp, synthetic construct
  misc_feature 1..1395: note = Description of Artificial Sequence: Synthetic coding sequence
  source 1..1395: mol_type = other DNA
atgccgcggccacggagccagctgccccagccgaattcgcaggtggaacagattctcgccgagttccagctgcaagaggaggacctgaagaaggtgatgaggagaatgcagaaggagatggaccggggcctgcgacttgagacgcatgaggaggccagcgttaagatgttacccacatatgttaggagcacccccgaagggagtgaagtcggagactttttgtctctcgacctcgggggcactaatttccgggtgatgctagtcaaagtgggcgagggcgaggagggtcagtggagcgtcaaaacaaagcaccagatgtactccattcccgaggatgccatgacgggaaccgcagagatgctgttcgattacattagtgagtgcatcagcgattttctcgataagcaccagatgaagcataagaaactccccctaggctttacgtttagtttccccgtccgacacgaggacattgataaaggcattctgctgaattggacaaaaggattcaaagccagcggagccgaaggtaacaacgtcgtggggctgctgagggacgcgattaaacggagaggcgattttgagatggatgtggtggcaatggttaacgacaccgtagcaacgatgatctcatgctactatgaagaccaccagtgtgaagtcggcatgattgtcggtaccgggtgtaatgcctgctacatggaagaaatgcagaacgttgaactggtcgaaggtgacgagggcaggatgtgcgtaaacactgagtggggggcatttggggactctggagagctggatgaatttctgttagaatatgatcggttggttgatgagtcttcagccaacccaggccagcagctctacgagaaactcattggaggaaagtatatgggcgagttagtgagactggttcttctccgcctggtggatgaaaatttactcttccacggcgaagcaagcgagcagctaagaactagaggtgccttcgaaacaaggttcgtctcccaagtcgaatctgataccggcgaccgtaagcaaatttataatattctctcaacccttgggctgcgtcctagcacaaccgactgtgacattgtcaggcgagcatgcgaaagcgtgtctactagggcagcccacatgtgctccgctggtctcgccggtgttatcaatagaatgagggaatctaggagcgaggatgtaatgagaatcacagtaggcgttgacggaagcgtgtacaagctgcatccttcatttaaagaaaggtttcatgctagtgttagacgactgacacctagctgcgaaatcacattcatcgagtccgaggaagggtcaggacgcggcgctgcgctggtgtcagccgtcgcgtgtaaaaaggcctgtatgctgggccagtag

SEQ ID NO: 118417 - DNA, 1398 bp, synthetic construct
  misc_feature 1..1398: note = Description of Artificial Sequence: Synthetic coding sequence
  source 1..1398: mol_type = other DNA
atgctagacgacagagcccgtatggaggccgcaaaaaaggaaaaagtagaacaaattttggctgagtttcagctacaggaggaagacctaaagaaagtgatgcgtagaatgcaaaaagaaatggatcgtggcctgcggctcgagacacacgaagaagcctccgtgaaaatgctgccgacctatgtccgatctacgcccgagggctccgaggtgggcgactttctgagcctggacctgggaggaactaattttcgagtcatgctggtgaaagtgggtgagggagaggagggacagtggagcgtaaaaacaaaacaccagatgtattcaattccggaggatgccatgaccgggacagccgagatgttgttcgactatatttccgagtgcataagcgacttccttgacaaacatcagatgaaacacaagaaactgccccttggctttaccttctctttcccagtaagacacgaagacattgacaaaggaatcctgctgaattggactaaagggttcaaagcaagcggagctgagggcaacaatgtcgtagggctccttcgagatgcaataaaaaggcgcggtgatttcgaaatggacgtggtcgccatggtcaatgacacagtcgctactatgattagctgctactacgaggatcaccaatgcgaggtgggcatgatagtggggaccggatgtaacgcatgttacatggaggaaatgcaaaatgttgaactggtagagggtgacgaaggccgtatgtgcgttaataccgaatggggggccttcggagatagcggagaactcgacgagttcctgctggagtatgacaggctcgttgacgaatcatcagcaaaccccggccagcagctttatgaaaaactgataggcggaaagtatatgggcgagcttgtgcgcttggtactcctgagattagtggacgaaaacctcctgtttcacggcgaggcaagtgaacaactgagaacccgtggtgcatttgagacccggtttgtaagccaggttgaaagtgataccggggatcgcaaacaaatatataatattttgtcgaccttgggcctccgacccagcacaacggattgcgatatagtcagaagggcctgtgaaagcgtctctactcgcgccgctcacatgtgttccgcggggctggcaggagttatcaacagaatgcgggaatctcgaagcgaggacgtgatgcggattacggtcggcgtggacggcagtgtctacaagctacatccatcctttaaggagcggttccacgccagtgtccggcggttaaccccttcctgcgaaatcactttcattgagagcgaggaaggtagtggacgcggagctgctttggtgtcggccgtggcgtgcaaaaaggcttgcatgctggggcagtag

SEQ ID NO: 118418 - DNA, 1878 bp, synthetic construct
  misc_feature 1..1878: note = Description of Artificial Sequence: Synthetic coding sequence
  source 1..1878: mol_type = other DNA
atgcctggtaccaaacggttccagcacgttatcgagacccctgaaccagggaaatgggaactttccggctacgaagctgccgtgccgatcaccgagaagtcaaatccgctcactcaggatctggataaagcagacgccgagaatatcgtgaggctgctgggccagtgtgatgcggagatcttccaggaagagggtcaggccttgagcacctatcagaggctatactccgagagtattttgaccacgatggtccaggtcgcaggcaaggtccaggaagtcctgaaagagcccgacggcggcttagtcgttcttagcggaggcgggacgtctggacgcatggctttcctgatgtcagtaagctttaaccagcttatgaaggggctggggcaaaaaccattgtatacctatctcatagccgggggcgacagaagtgttgtcgcaagccgagagggtacagaggactctgccctgcacggcattgaagagttgaagaaagtggccgcgggcaaaaagcgggtgatagtgatcggcatttcagtgggactgagcgccccatttgtagccggccaaatggattgctgcatgaataataccgcagtctttctccctgtgctggtcggttttaacccagtctctatggctaggaacgaccctatcgaagattggtcgtctacctttcggcaggtggccgagagaatgcaaaagatgcaagagaagcagaaggccttcgtgcttaaccccgcgattggacctgagggactgtctgggtccagcagaatgaaaggaggttctgctactaagattctgctcgagacactgctgctggccgcgcacaaaacagttgaccagggtatcgccgcgtcgcagcgctgcctactcgaaatccttaggactttcgagcgcgcccatcaggtgacctactctcaatctcccaagatagctaccctcatgaagagtgttagcacaagcctcgaaaaaaagggccacgtctatctcgtgggatggcaaacgctagggataattgcgattatggatggggtggagtgtatccatacatttggggccgattttcgggatgtgcggggctttttaataggcgaccattcagacatgttcaaccagaaggccgagttgactaaccagggcccacagtttacatttagccaggaggatttccttacctctatcttgccatccctgactgagatcgacaccgtggtgtttatcttcacgctggatgacaatcttacagaggttcagactattgttgaacaagtcaaagagaagactaaccacatccaagctttggctcacagcaccgtggggcagactctgttgattcctctcaagaaactcttcccttctatcatctccattacttggcctctgctgttcttcgaatacgagggcaattttatacagaagttccaacgtgaactaagtaccaaatgggtcttgaacaccgtcagcactggagcgcacgtgctactcggtaagatactgcagaaccacatgctcgacctcaggatatccaattccaagctcttctggagagctctcgctatgttgcagagattctccggtcagagtaaggctcgttgcatcgagtcactgttgagagccattcacttcccacagcctctctctgacgacattcgggccgcccctattagctgccatgttcaagtggcacacgagaaagagcaggtgatccctatcgccctgctcagcctgcttttccggtgcagcatcacagaagcacaagcccatctggccgcggccccgtcagtgtgcgaagccgttcgcagcgccctggctggccccggacagaaacggacagcagaccctctggagattctggaacctgacgtacagtag

SEQ ID NO: 118419 - DNA, 1308 bp, synthetic construct
  misc_feature 1..1308: note = Description of Artificial Sequence: Synthetic coding sequence
  source 1..1308: mol_type = other DNA
atggattgctgcatgaataataccgcagtgttcctgcctgtgcttgttgggtttaatccagtgtcaatggcccgcaacgatcccatcgaagattggtccagtacattccgccaggtggccgagagaatgcagaaaatgcaggaaaaacagaaggccttcgtgctgaacccggcaataggacccgagggcttgtcagggagcagccggatgaaaggaggcagcgcgacaaagattttgctggaaacactgctcttggctgcacacaagactgtagatcaaggcatcgcagctagccaacgttgcctgctagagatcctccgcacgtttgagagggcccatcaagtgacttattcccagagccctaagattgccacactaatgaagagcgtttcaacctcactcgagaaaaagggccacgtgtaccttgtggggtggcagacactgggcattatcgccataatggatggagtggaatgcatccacacatttggggctgactttcgtgatgtccgcggttttctcatcggcgaccacagcgatatgtttaatcagaaggcggaactgaccaatcaggggccccagttcaccttctcccaggaggattttttaacatctatcctgccgagtctgactgaaattgataccgtcgtgttcatttttacactcgacgataatcttacagaggtgcagaccatagtggagcaagtgaaagaaaagacgaaccatatccaggccctggcacattcaaccgtggggcagacgcttctgattccactcaaaaagttattcccaagtatcattagtattacctggcctttgttattctttgagtacgagggcaactttatccagaagttccagagagaactgagtacaaaatgggtgcttaatacagtctcaacaggggcgcacgtgttgctgggcaaaatcctgcagaaccacatgcttgatctgcgcatttctaactcaaaactgttctggagggccctagccatgctgcaaaggttcagcggtcagagcaaagccaggtgtattgagtccctgctgagagccatccacttccctcagcccctgtctgacgacatacgggcggctccaatttcctgtcacgtccaagtggcacacgagaaggaacaggtgataccgatagcactactgtcgctactctttcggtgttctatcacagaggcccaggcccatctggccgccgccccatctgtgtgtgaagctgtgcgatcagccctcgcgggtcctggtcagaagcggacggctgaccctctcgagatcctggagcctgatgttcagtag

SEQ ID NO: 118420 - DNA, 1659 bp, synthetic construct
  misc_feature 1..1659: note = Description of Artificial Sequence: Synthetic coding sequence
  source 1..1659: mol_type = other DNA
atgcgccttcttcccctcgcgccaggtaggctgcgcagaggatcaccaaggcatctccctagttgctcgccagccttgttgcttctggttctgggagggtgtctaggcgtgtttggcgtagctgccggcacaagaaggcccaatgtcgtattattactaactgacgaccaagatgaggtcctgggtggcatgaccccccttaagaaaacaaaggctctgatcggagagatgggtatgactttttcttcagcttacgtgccgtccgctctgtgttgcccttcccgggcttcaattcttacaggaaagtatccacacaaccatcacgtggtaaataatactctggagggaaactgtagctccaaaagttggcagaagatccaggaacccaatacatttcccgccatcctgcgctccatgtgcggctaccaaacgttcttcgcagggaaatacctgaacgaatacggggcaccagatgccggtggtcttgaacatgttcccctgggatggtcgtattggtatgctctggagaagaactcaaagtactacaattatactctgagtataaacggtaaggcgcgaaaacacggggaaaactactccgtggattacctgaccgacgtgttagccaacgtatcgttggattttttggactacaagtcaaactttgaaccctttttcatgatgatcgcgactcctgccccccacagcccatggactgccgcgccacagtatcagaaggccttccagaacgtcttcgcccctaggaacaaaaacttcaatattcacggtaccaataaacactggcttattagacaggccaagaccccgatgaccaactcaagcatacagtttctggacaacgcattcaggaaacgttggcagacgctgctatccgtggacgatcttgtggagaaacttgtaaaaaggcttgagtttactggagagctgaataacacatatatcttctacacttctgataacggctaccatactggccagttttccctgccaatagataagaggcaactttacgaattcgatatcaaggtgcctctcctggtgcggggccccggaatcaagcccaaccagacctctaagatgctggtggccaacatcgatttaggaccaaccatcctcgatatcgctgggtacgatctcaataaaactcaaatggacgggatgtcactcctgccgatcctgagaggagcctcaaacctgacctggcggagtgacgttctggtcgaataccagggcgaaggccgcaatgtgacagatcctacgtgccctagcctgtcacccggtgtctctcaatgctttccagattgtgtctgcgaggatgcttacaacaacacctacgcttgcgtacggacgatgagtgctctgtggaatctacaatattgtgagtttgacgaccaggaggtctttgtcgaggtttacaatctgaccgctgaccctgaccagattacaaatatcgccaagacaattgacccagagctgctgggaaaaatgaactacaggctgatgatgttgcagtcgtgttccggccccacatgcagaacgcctggcgtgtttgatccgggatatcgttttgacccccggctgatgttcagtaatcgaggctcagtcaggacgagacggtttagcaaacacttattatag

SEQ ID NO: 118421 - DNA, 1410 bp, synthetic construct
  misc_feature 1..1410: note = Description of Artificial Sequence: Synthetic coding sequence
  source 1..1410: mol_type = other DNA
atgtacgtcccatctgccttgtgttgtccctcacgggcttcaatcctaactgggaagtatccgcacaaccatcacgtcgtaaataacacactcgaaggcaactgcagctccaaatcttggcagaagatacaagaacccaatactttcccagccatcctacgctcgatgtgtggataccagactttttttgcggggaagtatctgaatgagtacggggctcctgacgctggagggctggagcacgtccccctgggttggtcctactggtacgccttggagaagaacagtaagtattataactacactctcagtatcaatggaaaagcaagaaagcatggcgaaaattattccgtggactacctgacagacgtcctggccaacgtctcactggatttcctcgattataaaagtaatttcgagcctttctttatgatgattgccacccccgcaccgcacagcccctggaccgcagcccctcagtaccaaaaggcattccagaacgtgtttgcacccagaaacaaaaacttcaacatccatggcacaaataaacactggctgatccggcaagctaagaccccaatgactaattcttccatccaatttttggacaatgcattccggaagcgctggcagacattgctgtctgtggatgacctggtcgaaaaactggtcaaacgactggagtttacaggagagttgaataacacatacatcttttacacaagtgataatggatatcacacaggtcagtttagtctgccaattgataaacggcagttgtacgagttcgatatcaaggtgccacttctggtccgtgggcccggtatcaaacctaaccagacgagcaagatgctagtcgccaacattgatctgggcccaacaatcctggacattgcgggctacgatcttaataaaacccaaatggacggaatgagtcttctgccaattctgcgcggggccagcaaccttacatggcgcagtgatgtcctggtcgagtaccagggagagggaagaaatgttacagatcctacttgtccgtcactctcacctggtgtgtctcaatgctttcccgactgcgtgtgcgaggatgcatacaataatacatacgcctgtgtgcgtacaatgtcggccctgtggaacctgcagtattgcgaatttgacgaccaagaggtcttcgtggaggtgtataacttaacagccgatcctgatcagatcactaacatcgccaagaccattgaccctgaactcctgggcaaaatgaactatagattgatgatgctgcagtcttgcagcggaccaacctgccgcactccaggggtttttgaccccggatatcggtttgatcctaggctgatgttcagcaacaggggctcagtccgcacgcggcgattctcaaagcatctgctgtag

SEQ ID NO: 118422 - DNA, 1599 bp, synthetic construct
  misc_feature 1..1599: note = Description of Artificial Sequence: Synthetic coding sequence
  source 1..1599: mol_type = other DNA
atgcgactgttacccttggccccaggacgattgcgacggggtagcccccgccacctgccttcctgcagccccgccttattgctgctggtcctcggaggctgcctgggtgtctttggcgtggcggctggaaccagacgacctaacgtggtcctactgctgactgatgatcaggatgaggtgctcggcggaatgtacgtgccctctgccctgtgctgtccttccagagccagtatccttaccgggaagtatccccataaccatcatgtagtgaacaacacactggagggtaactgctcttcaaagtcttggcaaaagatccaggagcccaataccttcccagctattttacggagcatgtgtgggtatcaaacattcttcgcaggcaaatacctcaacgaatacggcgcccccgatgcaggtgggctcgagcacgtgcctctcggctggagctattggtacgcattggaaaaaaacagcaaatattacaactatactctctccatcaacggcaaagccagaaaacacggggagaactactcagtcgactacctaactgatgtcctggccaatgtgtccttggacttcctggactacaagagcaactttgagccattttttatgatgatagcgacacccgccccccatagcccttggaccgctgctccgcagtaccagaaagccttccagaacgtcttcgcaccacgcaataagaatttcaatattcacgggacaaacaaacactggctgattcggcaagcaaaaacccccatgaccaatagcagtattcaatttctggataatgcattcagaaagcgctggcaaacccttctctcagtggacgacctggtcgagaaattggttaagagactggagtttacaggcgaactgaacaatacctacattttctatacctccgacaacggataccacactggtcagttctcccttccaattgataaaagacaactgtacgaatttgatatcaaggtgcccttgctggttaggggtccaggcattaaacccaatcagacatccaaaatgctggtcgctaacattgaccttggcccgactattcttgacatcgccggatacgacttaaataagacacaaatggacggtatgtctctgctgcctattctccggggggcttccaatctgacatggagaagcgatgtgctggtggagtatcagggcgagggccgcaacgtgaccgacccaacgtgcccatccctgtctccaggtgtctcacagtgctttcctgactgcgtgtgtgaagatgcgtataacaacacctacgcctgtgtgcgtaccatgagcgcactgtggaatctgcagtactgcgagtttgatgatcaggaagtgttcgttgaggtctataacctaacagccgatccggaccagattacaaacattgcaaaaaccatcgacccagaattgctcggaaaaatgaactatcgcttaatgatgttacaatcctgttctggaccgacatgccggactcctggcgtgttcgacccagggtataggtttgaccctaggctcatgttcagcaaccgtggcagcgtgcggacccgtcgttttagcaagcatctgctgtag

SEQ ID NO: 118423 - DNA, 2154 bp, synthetic construct
  misc_feature 1..2154: note = Description of Artificial Sequence: Synthetic coding sequence
  source 1..2154: mol_type = other DNA
atgcccatcggcgattgctccgttgcggccaaacctcgtaaacaactcctgtgcagtctctttcagaccactctcggctatcgagcacgggcctctggctggaaaccaatggtaatatgccggggctcccacgccttcaaagacctgatcaatacttaccgaatgattgagcaagatgacttcgacatcaacactagactgcatactatcgttagaggtgaggatgaggccgccatggtggagagcgtcggcttggcgttagtgaaactacccgatgtgctcaacaggctaaagccggatataatgatagtgcacggcgataggttcgatgctttggcgctggccaccagcgcggcactgatgaatatcagaatcctgcatatagaggggggggaagtgtctggcacaattgacgactccatccggcatgcgatcaccaaactggcacattatcacgtctgctgtacaaggagtgcggagcagcacctgatctccatgtgcgaagatcacgatcgcatattactcgcgggctgtccaagctacgacaagctgctgtcggccaaaaataaagattacatgagcattattcgcatgtggttgggtgacgacgtgaagtctaaggactacatcgttgccctgcagcaccccgtgacaaccgatatcaagcactccatcaaaatgttcgaactgacactcgacgcgctgatatctttcaacaagcgaactctagtgctattcccaaacattgatgctgggtccaaagaaatggtgcgggtcatgagaaagaaaggaatagaacaccaccccaattttcgggctgtgaagcacgtgcccttcgatcaattcattcagctggttgcccacgcaggctgtatgattggcaatagttcatgtggcgtgcgagaggtgggcgcttttggcacacccgtcatcaatcttggaacaaggcagatcgggagggaaacaggcgagaatgtgttgcatgtgagagacgccgacactcaggacaagattctgcaggccctgcatctgcaatttggcaaacagtacccctgctcaaagatctacggcgacgggaacgccgtcccgaggatcctgaaatttcttaaaagtattgacctgcaagaaccgctgcagaaaaagttttgcttcccaccagtgaaagagaatattagccaggatattgaccacattctcgagactctaagtgccctggccgtggatttaggcgggacaaaccttagagttgctatcgtctctatgaagggtgagatcgtcaaaaagtacactcagttcaaccccaagacatacgaggaaaggatcaacctcattcttcagatgtgcgtggaggccgcagccgaggcagtcaagctgaactgtcgaatacttggagttggcatttctaccggcggacgggtgaatcctagggagggcatcgtgctacactctaccaagctcattcaggaatggaattctgtggatctaaggacccccttgagcgacactctccacctaccagtgtgggtggataacgatggcaactgtgccgcactggccgaacgcaaatttggccagggtaaagggctggagaattttgtgacccttatcacaggaaccggcattgggggagggatcatccatcagcacgagctgatccatggcagcagcttctgcgccgctgagctcggccatttggttgtctctctggacggtcccgactgttcttgcggatctcatggatgtatagaagcttacgcttcgggaatggcgctgcaaagggaggcaaagaagctccatgatgaggatctcctactcgtggagggtatgtctgtgcctaaggacgaagcagtgggggccttgcacctgatccaggccgctaagttaggaaacgccaaggcacaaagtattttaaggaccgccggaacggccctcggactgggcgtcgtgaatattttgcatactatgaatccaagcctcgtgattctgtctggcgtcctggcgagccactatatccacatcgttaaagacgtgatcagacagcaagccttatcgtccgttcaggatgttgacgttgtcgtgagcgacttggttgacccagccttactaggcgccgcctccatggtgctcgactatacaaccaggcgcatatactag

SEQ ID NO: 118424 - DNA, 2169 bp, synthetic construct
  misc_feature 1..2169: note = Description of Artificial Sequence: Synthetic coding sequence
  source 1..2169: mol_type = other DNA
atggagaaaaatgggaacaatcggaagctgagagtgtgtgtggctacatgcaaccgagctgattactcaaaactggcccccataatgttcggcatcaagaccgagcccgagttcttcgaactggacgtcgttgtactgggctcacatctgatcgatgactacgggaatacttaccgcatgattgaacaggacgattttgacattaacacgaggctgcataccattgtgaggggcgaggatgaagcagcaatggtggaaagcgttggccttgctctcgtgaagctgcctgacgttcttaaccgtctgaaacctgatataatgatcgtgcatggcgaccgttttgacgccttggctctcgccacaagtgcagcgctgatgaatatcagaatcctgcacattgagggaggtgaagtgagtgggaccattgatgatagcatacggcacgccattacaaagctggctcactaccacgtgtgttgtacacgcagcgctgaacagcatctgatcagtatgtgcgaagaccatgaccgcatcctgcttgcaggatgtccatcctatgataagttgctgagtgcaaagaacaaggactacatgtccatcatcagaatgtggctaggcgatgacgtgaagtccaaggattatattgtcgctctgcaacaccctgtgaccacagatatcaaacacagcattaaaatgttcgagcttaccctggatgctctgatctcttttaacaagcgtacgctagtcctgtttcccaacattgacgcaggatcaaaagaaatggtgagagtgatgagaaaaaaagggatcgagcatcacccgaatttccgagcagtgaaacatgtgccattcgaccagttcatccagctcgtcgcacatgctggttgtatgattgggaattcgagttgtggcgtgagggaagtgggtgcatttggaaccccggtgatcaatctgggaaccagacaaatcggcagggaaaccggagaaaatgtgctgcacgtgcgggatgccgacacacaggacaagatcctacaggctctgcacctgcagttcggaaaacagtacccttgcagcaagatctatggggacgggaacgccgtaccacgaattctcaagttcctgaaatcaatcgatctgcaggaaccactgcagaaaaaattctgtttcccacctgtcaaggagaacatcagccaggatatcgaccacatcctggagactttaagtgccctggcagtagatttgggcggaaccaacctgcgggtggccatcgtgtctatgaaaggggaaatcgtcaagaagtacacacagttcaatcccaaaacctatgaggaaaggattaacctgatcctacagatgtgcgtggaagcggccgccgaggcagtcaaactcaattgcaggatcctgggtgtgggaatctcaacagggggtcgcgtcaatccaagagaaggtatagtgctgcattcgactaagctgatccaggagtggaattccgtcgatctacgcaccccactcagcgacaccctacacctgcccgtgtgggtggacaatgatgggaactgtgctgctctcgccgaaagaaaattcggtcagggaaagggtttggaaaactttgtcacactgatcaccggtaccgggattggaggcgggattatccatcagcacgagctgattcacggcagctctttctgtgcagcggagctgggacacctcgtggtctctctcgacgggcctgattgcagctgtggaagtcacgggtgcatagaagcttatgccagtggaatggcattgcagcgggaggcaaaaaaacttcatgatgaggacctcctgctggtggagggaatgagtgttccgaaagacgaggctgtgggtgccctacacctgatccaggctgctaagcttgggaacgcaaaagcgcagagtatcctcagaactgctgggacagcgctggggctgggtgtggtcaatatcttgcatactatgaatccaagtctggttatcctatccggggttctcgcatcacattatatccatatagtaaaagatgtcatccgccagcaagctctgagttcggttcaggatgtggacgttgtggttagcgacctggtggaccctgctttactgggagctgcttccatggtgttggattacacaacacggaggatctactag

SEQ ID NO: 118425 - DNA, 2262 bp, synthetic construct
  misc_feature 1..2262: note = Description of Artificial Sequence: Synthetic coding sequence
  source 1..2262: mol_type = other DNA
atggagacctatgggtatcttcaacgtgaatcctgtttccaggggccacacgagctctatttcaaaaacctgagcaagcgtaacaaacagataatggagaagaacggcaacaatagaaaattaagagtgtgcgtcgcgacttgcaacagagcagattacagtaaactcgcgccgatcatgtttggcatcaagactgagcctgaattctttgagctcgacgtggtcgttctaggttcacatctaatcgatgactacgggaatacttatcggatgatcgagcaggacgacttcgacatcaatacaagactccacactatcgtgaggggtgaagatgaagccgccatggtcgagtcagttggccttgcactggtgaagctgcccgatgttctgaatcggctcaagcccgacatcatgatcgttcatggcgaccgctttgatgcgctggcgctggcaacctccgccgcgcttatgaacattcggatcctgcacatagaaggcggtgaggtttccggcacgatcgacgactccatccgccacgctatcacaaaactcgcgcactaccacgtctgctgcacaagaagtgccgagcagcacctgatcagtatgtgcgaggatcatgatcgtatcctgctcgccggctgcccatcttatgataaactcctgagcgcgaaaaataaggactatatgagcataatcagaatgtggttgggagacgatgtgaagagtaaagattatatcgtcgccctgcaacatcccgtgacaacggacataaagcactccatcaaaatgtttgagttgaccctcgatgccctgatcagcttcaataagaggacgttggtgctctttcccaatatcgacgccggcagcaaagagatggtcagggtgatgcgtaagaagggcatagaacatcatcccaatttcagggctgtgaaacatgtccccttcgatcagtttatacaattagtggctcacgcagggtgcatgatcggcaatagttcctgtggagtccgggaggtgggggcattcggcacacccgtgattaaccttggaacgcgccagatcggacgagagaccggagagaatgtacttcacgttagagacgccgacacgcaagataagattttacaggccctccacctccaattcggcaagcagtacccatgttcaaaaatctatggggacgggaatgccgtgcctagaatactgaagttcctcaagtccatcgacctgcaagaaccgctgcagaagaaattctgttttccacctgttaaagagaacatctcccaggatattgatcacatcctcgaaacattgagcgcactggctgtggatttgggggggacgaacttacgagtggcaatcgtctctatgaagggggagatagtaaagaaatatacccaattcaatcctaagacctatgaggaaaggataaatctgatcctgcagatgtgtgttgaggcagctgccgaagctgtcaaactgaattgccggatactgggagtcggaatcagcactgggggtagagtgaacccccgtgagggcattgttttgcacagtactaaattgatccaggagtggaactccgtggatcttagaactcctctttctgacacacttcatctccctgtttgggtagacaacgatggcaactgtgctgctctggccgagcgaaaattcgggcaaggcaaagggctcgagaactttgtgacacttattactggcacaggcataggtggagggatcattcaccaacatgaattaatccacgggagctcattctgcgcggccgagctaggccatctggtagtaagcctcgatgggcctgattgcagttgtggctcgcatgggtgtatcgaggcgtacgcctcaggcatggctctgcagagggaagcgaagaaactgcacgacgaagatctgctgttggtggaaggaatgtccgttcccaaagacgaggctgtgggagcattacacctgatccaggcggccaagctgggcaatgctaaagcacaatcgatcttgcggacggcgggtaccgccctgggccttggggtggtaaatatcctgcacacaatgaatcctagcctagtgatcctgtccggcgtccttgccagtcactacatccatatcgtcaaggatgtaatccggcaacaggccctaagctctgtgcaggatgtagatgttgtggtctccgatctggtggaccctgctttgctgggagcagctagcatggtgctagattatacgaccagacgtatctactag

SEQ ID NO: 118426 - DNA, 399 bp, synthetic construct
  misc_feature 1..399: note = Description of Artificial Sequence: Synthetic coding sequence
  source 1..399: mol_type = other DNA
atgttcgagctcaccctcgatgcacttattagtttcaataaaagaaccctggtcctgttccctaacatcgacgcgggatcgaaggagatggtgagagtgatgcggaaaaaaggcatcgagcaccatcccaacttccgtgccgtgaagcacgttcctttcgaccagtttatccagctagtcgcacacgccggttgtatgattggaaattcatcctgcggcgtacgcgaagttggtgctctgactaggttatacacgtacgtctcttgttataaacacacacacacccacacacatacgcacccctccagttctaatcccaaactgagatctcagaaagtgatccagtcagagaataggggcaaatcctaccaggaaggacttaagtacacctttttttag

SEQ ID NO: 118427 - DNA, 2169 bp, synthetic construct
  misc_feature 1..2169: note = Description of Artificial Sequence: Synthetic coding sequence
  source 1..2169: mol_type = other DNA
atggaaaaaaatggcaacaatcgtaaactgagagtctgtgtagcaacttgtaatagagccgactactctaaactggcaccaatcatgtttggcataaagaccgagccagagttctttgaactggacgtggtcgtgctgggaagccatctgatagacgattatggcaacacgtatcgcatgatcgagcaagacgactttgatattaacaccagactccacacaatcgtcaggggggaggacgaagcagcgatggtcgagtccgtcggactcgcactggtgaaactgcctgatgttctcaacagactgaaacccgatatcatgatagtgcatggagatcgattcgacgctctggcgctggcaacttccgcagccttgatgaatattagaatcttgcatattgagggaggcgaggtatccgggaccatcgatgattccattcgccacgccattacgaagctggctcactaccacgtgtgctgcaccaggtccgctgagcaacacctgatttctatgtgcgaggatcacgacaggatccttttggcgggatgcccgtcttacgataaattgctaagcgctaaaaacaaggactacatgagcattatacggatgtggctgggggacgacgtcaagtccaaggactacattgtggccctgcaacacccagttacaactgatatcaaacacagcataaagatgtttgaattgacactggacgcattaatatccttcaataagaggaccctggtcttgttcccgaatatcgatgcaggatccaaggaaatggtaagggttatgcgcaagaaaggaatcgagcatcatccaaattttcgggccgtgaaacatgttccctttgaccagttcatccaactggtagcgcatgccggatgcatgatcggaaatagtagctgcggtgtgagggaagtgggcgcttttggaaccccagtgataaatttgggaactcggcaaatcgggagagagacaggggagaatgtgctccatgtgcgcgacgccgacacacaggacaagattctacaggcgttgcatctacagttcgggaaacagtatccctgctctaaaatctacggcgatgggaatgccgtgccccggatattgaaattcctcaagtctatcgatctacaggagccactccagaagaaattctgtttcccgccggtcaaggagaatatttcacaggatatcgaccatattctggagaccctcagcgctctagccgtggatttaggcggcacaaacctgagagtagccatcgtatctatgaagggtgagattgtgaagaaatatacacaatttaatcctaagacttacgaggagagaattaatctcattttgcaaatgtgcgttgaagcggccgccgaggccgtgaagctcaactgtcgtatattgggtgttggaatttccaccggggggcgagttaaccctcgggagggcatagtgctccatagtacgaagctgatccaggaatggaattccgtggatttgcggacaccactgtccgatacactccacctgccggtatgggtcgacaatgatggcaattgtgcagccctggcagaaaggaaatttggccagggaaaagggttggagaacttcgtcaccctcataactggtaccgggatcggcgggggcatcattcaccagcatgagctgattcatggctccagcttctgcgcagccgagttgggacaccttgtggtttcgcttgatggccctgattgcagctgcggctcccatggatgcattgaagcctacgcgtctggcatggccctacagagggaagcaaagaagcttcacgatgaagatctcttgctcgtcgaagggatgagcgtgcctaaagacgaggcagtgggtgcgctgcatctgatccaggctgcgaagctcggcaacgctaaggctcaaagtattctgaggacagctgggactgctctgggtctgggagtagtcaatatcctgcacacaatgaaccccagtctggttattctctctggggttctcgcatctcattacatccacatcgtgaaagatgttattcgccaacaagctctcagctcagtccaagatgtagacgtcgtcgtgtctgaccttgttgaccccgcactactgggcgccgctagtatggtcctggattatactacaaggcgcatctattag

SEQ ID NO: 118428 - DNA, 1947 bp, synthetic construct
  misc_feature 1..1947: note = Description of Artificial Sequence: Synthetic coding sequence
  source 1..1947: mol_type = other DNA
atggagaagaatgggaacaaccggaagctgcgcgtatgcgtggcgacctgtaatcgggcagattactccaagctggctcctatcatgttcgggattaaaacggagccagaatttttcgaactagacgtggttgtgctaggctcccacctgattgacgactatgggaatacgtatagaatgatcgaacaagatgactttgacatcaatactcggcttcacacaatagtgcgcggcgaagacgaggccgcaatggtggagtcagttgggttagctttggtgaaattgccagacgtgctaaatcggctcaagcccgacataatgattgttcacggcgataggttcgatgccttggccctggctacatcagctgcgctgatgaacattagaatactgcacatcgagggcggcgaagtaagcggcactatcgatgattctatcagacacgccataaccaaactggcccattatcacgtgtgctgcacacgatccgccgagcaacacttaatttctatgtgtgaggatcacgacagaatactgctggcaggttgcccaagttacgataagctcctgagcgcgaagaataaggactatatgtcgataattagaatgtggctcggggatgacgtgaagagcaaggattacatcgtggcactccaacatccggtgacaacggatataaaacattcaattaagatgtttgagttaaccctggacgcgctgatatcattcaacaagcgcacacttgttctgtttccgaatatcgacgcagggagcaaggagatggtgcgagtcatgagaaaaaaggggatagaacatcaccccaatttccgggccgttaaacacgtgcctttcgaccagttcatacagctggtcgcccatgccggctgcatgatcggcaactcttcttgcggggtgcgcgaggttggagcctttggcacacccgtgattaatctgggaactcgacagattgggagggaaaccggcgagaatgtcctccacgtccgcgatgcggacacacaggacaagatattacaggcactgcatctccaatttgggaagcagtacccctgttctaaaatctatggtgacgggaatgccgtgccgagaatcctgaagtttctcaagtccatcgatttgcaggagcctctgcaaaagaaattttgctttccccctgtgaaggaaaatatttctcaagacatagaccacattctggagactttgtcggccctcgctgtagacctaggaggcaccaaccttcgggtcgcgatagtttccatgaagggggagattgtcaagaaatacacccagttcaaccctaaaacctacgaagagcggatcaatttaattctgcagatgtgtgtggaagccgcagctgaggctgtgaagcttaactgtagaattctgggtgtgggcattggcggcggaattattcatcagcacgagctgatacatggttcgagtttttgtgcagccgagctcggtcacctggtagtgtccctggatgggcctgactgttcttgtggtagccatggatgcatcgaggcctatgctagtggcatggcactgcagcgcgaggctaaaaagctgcacgacgaagacctcttacttgtggagggtatgagcgttcccaaagacgaggcagtgggggccctgcacttgatacaggcagccaaactgggcaacgcaaaagcccaaagcatcctgaggacagccggtaccgcgttaggtctcggagtggtgaacatactccacaccatgaacccttctctggtgatactgtcaggcgtgctagcaagccactatattcatatcgtaaaggacgtgataagacaacaagccttatcttcggtgcaggatgttgacgttgtagttagcgatctcgtggaccctgccctccttggggccgcatctatggtgctagactacactaccaggagaatatactag

SEQ ID NO: 118429 - DNA, 1839 bp, synthetic construct
  misc_feature 1..1839: note = Description of Artificial Sequence: Synthetic coding sequence
  source 1..1839: mol_type = other DNA
atgatcgagcaagacgatttcgatattaacacaagactgcacaccattgtaaggggtgaagacgaggctgcaatggtggagtccgtgggtttggccctggtgaagctccccgatgttctgaacaggctgaagccagacatcatgatagtccatggggatcgttttgatgcacttgccttggccacgtctgccgctcttatgaatattaggatcctccacatagaaggcggcgaggtcagcggaaccatcgacgatagtatacggcatgcaattactaagctcgctcactaccatgtttgttgcacacgttctgcggagcagcacctcatttccatgtgtgaggaccacgaccgtatccttctcgcaggatgtccgagctacgataaattactgtctgccaagaacaaagattatatgtcaatcattcggatgtggctgggctccaaggagatggtcagggtgatgagaaaaaaagggattgaacatcaccccaattttagagctgtgaagcatgttccttttgaccagtttatacagttggtggctcacgccgggtgcatgattggaaactccagctgcggcgtccgagaggtaggagcctttggaacacctgtcataaacctgggaacacgccagatcgggcgagagaccggcgaaaatgtgctccatgtgcgagatgcagatacacaagataagatattgcaggccctacacctccagtttgggaagcaatatccatgttcaaagatttatggcgacgggaacgccgttccacgcattctgaaatttcttaagtccatagacttgcaagagccactgcagaagaagttttgcttccctcccgttaaagaaaacatttcccaggatatcgaccatatactggagactctgtccgctctcgccgtggatttgggaggaactaatttgagagttgcaatcgtgtccatgaagggtgagatcgtcaaaaaatatacccagttcaatccgaagacatacgaagaacgcatcaatctaatacttcagatgtgcgttgaggccgctgctgaggcggtgaagttaaattgtaggattctgggtgttgggattagcacgggagggagagtcaatccaagggagggcatcgtgttacattcgacaaagcttatacaggaatggaattctgtcgacctgcgcacaccattgtcggataccctccatctgccagtgtgggtggacaacgacggcaactgcgcagctctcgcagaacgaaagttcgggcagggaaagggcctcgaaaactttgtgacattgatcactggcacaggaatcggtggaggcatcatccatcaacacgaacttatccatggtagcagcttctgcgccgccgagctgggtcacctggtggtatctctggacggccctgactgttcctgcggcagtcacggctgtatcgaggcctatgcttctggcatggccctgcagagagaggccaaaaagttgcacgatgaggacttgctgctagttgaggggatgtccgttccgaaagatgaggccgtgggtgccctgcacctcatccaggccgctaaactgggcaacgccaaggctcagtccatcctgagaacagctgggaccgctctggggttgggcgtggtgaacatattgcatactatgaaccctagtttggttattctttccggggtcctcgcgagccactacatacacatcgtgaaagacgtgattaggcagcaagctctgagtagtgtacaagatgtagacgtggtggtgagcgatcttgtggacccagctcttctgggggcggcatcaatggttctggattataccacccgtaggatatattag

SEQ ID NO: 118430 - DNA, 870 bp, synthetic construct
  misc_feature 1..870: note = Description of Artificial Sequence: Synthetic coding sequence
  source 1..870: mol_type = other DNA
atgaaactaatcatactcgaacattatagccaggcttcggaatgggctgcgaagtatatcaggaacaggatcattcagtttaaccctggccccgaaaagtactttaccctgggcctacctaccggctccacccctctggggtgctacaagaagctcatcgaatattacaaaaacggcgatctctcctttaagtacgttaagaccttcaatatggatgagtacgtcggacttccgcgtgaccatcctgagagctatcacagttttatgtggaacaatttctttaagcacattgatatccaccccgagaacacccatatattggacgggaatgccgtagaccttcaggccgagtgcgacgcattcgaggaaaaaatcaaagccgccggtggcattgaactgttcgtaggaggtataggaccagacggccacatagcattcaatgaacctgggtctagtctggtgtctcggactagagtgaagacactggccatggatacaattctggccaacgcgcgcttcttcgatggtgaactgacaaaggtgccgacgatggctctgacagttggagtgggtactgtcatggatgctcgggaggtcatgattctgatcaccggagctcacaaggctttcgctctgtacaaggcgatcgaggaaggcgtgaaccacatgtggacggtcagcgcctttcagcagcaccctcgaacagtgttcgtatgcgatgaagacgccacattggagctgaaagtaaagaccgtgaagtactttaagggcctcatgctcgtgcataacaaactggtggacccgctctactcaatcaaggagaaggagacagaaaagagccagtccagtaaaaaaccatacagcgattag

SEQ ID NO: 118431 - DNA, 768 bp, synthetic construct
  misc_feature 1..768: note = Description of Artificial Sequence: Synthetic coding sequence
  source 1..768: mol_type = other DNA
atgaagcttattatcctggaacactattctcaggccagcgaatgggccgctaaatacatcaggaatagaatcattcagttcaaccctggtccagaaaagtatttcaccctgggcctgcctaccggtctgccacgagaccacccagagtcttaccactccttcatgtggaataacttcttcaaacacatagatattcatcctgagaacacacacattttggacggtaatgcagtagatctgcaagcagagtgcgatgcttttgaagagaaaataaaggccgctggaggcatagagctgttcgtcggcgggatcggtcccgacggtcacattgcatttaatgagcccggatcgtctttggtgtctcggacgagggtgaagacccttgcgatggacaccattttagccaatgcccggttttttgatggggagttaacaaaagtcccaaccatggctttgaccgtcggagttggcacagtcatggatgctagggaagttatgatactgattaccggagcgcacaaggccttcgcgttatataaggcaattgaggaaggtgttaaccatatgtggacagtctctgcattccaacagcacccccggactgtcttcgtgtgtgacgaggacgcgacgctggagctcaaagtaaagacggttaagtactttaagggtctcatgttagtgcataacaagctggttgacccactctattcgattaaggagaaggaaaccgaaaaatcccaaagtagcaagaaaccatactcagactag

SEQ ID NO: 118432 - DNA, 870 bp, synthetic construct
  misc_feature 1..870: note = Description of Artificial Sequence: Synthetic coding sequence
  source 1..870: mol_type = other DNA
atgaaactgataatccttgaacattattcccaggcctctgagtgggcagccaagtacatacggaatcgaattattcagttcaatcctggaccggagaagtactttactctaggactgcctacaggaagcacacctctcgggtgctataagaaactgatcgaatattacaagaacggcgacctctcattcaagtatgtaaaaacgttcaacatggacgaatacgtcggcctgccgcgcgatcatcccgagtcgtaccattcctttatgtggaataactttttcaaacatatcgacatccaccctgagaatacacacattctcgacggcaacgcagtcgaccttcaagcagagtgcgacgctttcgaggagaaaatcaaggctgccggaggtattgaactgttcgtagggggtatcggacctgacggtcacattgccttcaatgagccaggatcctccctggtgtccaggaccagggtaaagacccttgccatggacacaattctggctaacgcccgcttttttgatggtgagttgacgaaagtgcctactatggctctgaccgtgggagtggggacagtcatggacgcccgcgaggtaatgatattgatcactggagcccacaaggcttttgccttatacaaagcgatcgaagaaggggtaaaccatatgtggaccgtttctgccttccaacagcatccccgcacagtgtttgtctgcgatgaagacgccacgttagagcttaaggtgaaaacagtgaagtacttcaaaggtctaatgctggtgcacaataaactcgtggaccctttatactcaatcaaagagaaagagaccgaaaaaagtcaatctagcaaaaagccctattccgactag

SEQ ID NO: 118433 - DNA, 417 bp, synthetic construct
  misc_feature 1..417: note = Description of Artificial Sequence: Synthetic coding sequence
  source 1..417: mol_type = other DNA
atgaaactgataatcttggagcactacagccaagcatcagaatgggccgccaaatatattcgcaaccgtatcatccagtttaatcctggccccgagaagtacttcaccctgggtctgccaaccggatctacccctctggggtgctacaaaaagctgatcgagtattataaaaatggagacttgtcgtttaagtacgtaaaaacattcaacatggatgaatacgtcggattaccccgagatcatcccgaaagttaccatagcttcatgtggaataatttttttaagcatatcgacatccaccccgaaaatactcacatactagacgggaacgctgtcgacttgcaggccgagtgtgacgctttcgaggaaaagattaaagccgctggaggaattgagttgtttgtgggagggatatag

SEQ ID NO: 118434 - DNA, 870 bp, synthetic construct
  misc_feature 1..870: note = Description of Artificial Sequence: Synthetic coding sequence
  source 1..870: mol_type = other DNA
atgaaattgattattttggaacattactcccaggcgtccgagtgggcagccaaatacatccgcaatcggattatccaatttaacccaggccctgagaaatattttactttgggactgcccactgggagcactcctcttggctgttacaaaaaactcatagagtactacaagaacggagatctttcattcaaatatgtcaaaactttcaatatggacgaatacgtgggcctgcctagagaccacccggagagttatcactctttcatgtggaataacttctttaagcacatcgacattcacccagagaacacacacatccttgatggcaatgctgtggatttacaggctgaatgcgatgcgtttgaggagaaaattaaagctgcaggtggcatcgaattgttcgtgggagggattggccctgacggtcacattgcctttaatgagccgggtagttcactggtgagcagaacccgagtaaaaaccctggcaatggacactatcctggccaacgccaggttctttgatggcgagctgactaaagtgcccactatggccctcaccgtcggagtgggcacagtgatggatgccagagaagtgatgatcttgatcactggagcccacaaagcgttcgccctctacaaggcaattgaggagggggtgaaccatatgtggacagtatctgcctttcaacagcatccccggacggtattcgtttgtgacgaggacgcaacattagagctgaaggtgaagactgtaaaatactttaagggcctcatgctggtgcataataagcttgtagatcccttgtacagcatcaaagagaaggagacagagaaatcccagtcttcgaagaagccttacagcgactag

SEQ ID NO: 118435 - DNA, 90 bp, synthetic construct
  misc_feature 1..90: note = Description of Artificial Sequence: Synthetic coding sequence
  source 1..90: mol_type = other DNA
atgaagctgataattttagagcactactcccaagccagtgagtgggccgctaaatacattcgcaatcgaattatccagttcaatccctag

SEQ ID NO: 118436 - DNA, 870 bp, synthetic construct
  misc_feature 1..870: note = Description of Artificial Sequence: Synthetic coding sequence
  source 1..870: mol_type = other DNA
atgaaactgataattctagaacattacagccaggcgagcgagtgggccgcgaaatacatccgaaaccggatcattcaattcaacccaggccctgagaagtacttcactctcgggctcccaacaggttcgactccattaggatgctataagaagctcattgaatattataaaaacggggacttaagcttcaagtatgtgaaaacctttaatatggatgagtacgtgggcttaccccgagaccaccccgaatcgtatcactccttcatgtggaataacttctttaagcacatcgatattcaccccgagaatacacacatactggacgggaacgctgttgacctgcaggctgaatgtgatgctttcgaggaaaaaatcaaagctgccgggggaatcgagttgttcgtcggcggcatcgggcccgatggtcacatcgcttttaatgagccgggttcatccctcgtgagcagaactagagttaagacgttggcaatggatacgatcctggctaatgcaagattttttgatggcgaactgaccaaggtccccactatggccctaaccgtcggggtgggtacagtgatggacgctagagaggttatgattttgattaccggagcacataaagcctttgctctatacaaagctatcgaggagggcgttaaccacatgtggaccgtgagcgccttccagcagcacccccggacagttttcgtgtgtgacgaggacgcgaccctggagctgaaggtaaagacggttaagtattttaagggcttaatgttggtgcataataagcttgtggatcctctttattctatcaaggagaaggagacagaaaagtcccagagtagcaaaaagccttacagcgactag

SEQ ID NO: 118437 - DNA, 486 bp, synthetic construct
  misc_feature 1..486: note = Description of Artificial Sequence: Synthetic coding sequence
  source 1..486: mol_type = other DNA
atgaaactgatcatccttgaacactatagccaggccagtgaatgggcagctaagtatatccggaatagaatcattcaatttaaccctggcccagagaaatattttacgttaggcctgccaacaggcagcacccctctaggctgctataaaaagctgatcgaatactacaagaacggcgatctctcctttaaatacgtcaaaacatttaatatggacgaatacgtcgggctgccccgcgaccatccagagagttatcactcttttatgtggaataatttttttaagcacattgacattcatcccgagaatacccacattctggatggaaacgccgtggacctccaggccgagtgtgatgccttcgaagaaaaaattaaagccgctggcggcattgaattatttgtgggcggtattggcccggatggccacattgcgtttaacgagcctgggagctctttagtttcacgtacgcgagtgaaaacatag

SEQ ID NO: 118438 - DNA, 639 bp, synthetic construct
  misc_feature 1..639: note = Description of Artificial Sequence: Synthetic coding sequence
  source 1..639: mol_type = other DNA
atgaagttaattatactggaacattacagccaggcttctgaatgggctgcgaagtatatccggaaccggatcatccagtttaatccaggaccagagaagtattttactctgggtcttccaaccgggtccacgccactcggctgctacaagaagttgatcgaatactacaagaacggagacctctcattcaagtatgtgaagactttcaatgaacctgggagttccttggtgtctagaactagggtcaaaacattggctatggataccatcctagccaacgcgagattctttgatggggagttgacaaaggtgccaaccatggctctcacagttggggttggtacagttatggatgcgagagaagtgatgatcctcatcaccggggcccacaaagccttcgccctatataaagccatcgaggagggagtgaaccacatgtggacagtgtctgcctttcaacagcatccccggactgttttcgtctgcgatgaagacgcgacactcgagctgaaagtcaaaaccgtgaaatattttaagggactcatgctggtccacaacaagctggtggacccactgtactccatcaaggagaaggagaccgaaaagagccaatcttctaaaaagccttacagcgattag

SEQ ID NO: 118439 - DNA, 831 bp, synthetic construct
  misc_feature 1..831: note = Description of Artificial Sequence: Synthetic coding sequence
  source 1..831: mol_type = other DNA
atgcgcctcgtgatcttggataactacgatctcgccagcgaatgggccgccaaatatatatgtaatcgcattatccagttcaagcccggccaagacagatacttcacgctggggctgcccacaggaagcacgcccctcggatgttacaaaaaattaattgagtaccataagaatggccacctcagtttcaaatatgttaagaccttcaacatggacgagtacgttggactccccagaaaccatcctgagtcctaccattcctacatgtggaacaatttcttcaagcacattgacatcgacccgaataacgcgcatattctcgacggcaacgccgccgatctgcaagcagaatgtgatgcattcgaaaacaaaatcaaagaagcaggcggcatcgatctgttcgtaggtggaataggccctgatggacatattgcattcaacgaacctgggtctagcctcgtttctcgaacccgattgaagaccctggcgatggacacaatcctggccaatgcgaagtattttgacggcgacctgtctaaagtacccactatggccttgaccgttggcgtggggaccgtgatggacgcccgggaggtgatgatcctgatcactggtgcacataaagcctttgcgttgtataaagccatcgaggagggggttaaccatatgtggaccgttagcgcatttcagcaacacccgcggaccatcttcgtgtgcgacgaggacgccacactggaactcagggtaaagaccgtgaagtactttaaaggcctgatgcacgttcacaacaagctggtcgatcctctgttcagtatgaaagatggaaattag

SEQ ID NO: 118440 - DNA, 780 bp, synthetic construct
  misc_feature 1..780: note = Description of Artificial Sequence: Synthetic coding sequence
  source 1..780: mol_type = other DNA
atgcgtctagttattttagataattatgacctcgcctccgagtgggcggccaagtacatttgtaacagaataattcagttcaaacctggacaagaccggtattttaccttgggcctgccaacaggctctactccccttgggtgttacaaaaagctgatagaataccacaaaaatgggcacttgtcctttaaatacgtaaagaccttcaacatggacgagtatgttgggctgccccgtaaccatccagaatcataccatagttacatgtggaataatttcttcaaacacattgatatcgatcctaacaacgcacatattcttgatggcaacgctgcagatctgcaggccgagtgcgatgcatttgagaataagatcaaggaggctggaggtattgacctcttcgtggggggaataggtcctgatgggcatattgcctttaatgagccaggcagcagcctggtgtcacggacgcggttgaaaactctggctatggacacaattctcgcaaacgccaaatacttcgatggtgatctgagtaaggtgcccaccatggcccttacagtaggggttggaacagtgatggacgcacgtgaggtgatgattctgattaccggtgcacacaaggcttttgcattgtataaggcaatcgaagagggagtcaatcacatgtggacagtaagcgcgtttcagcagcaccctagaacaatcttcgtgtgtgacgaggatgctactcttgagttgcgggttaagactgtgaaatattttaagggggaacactag

SEQ ID NO: 118441 - DNA, 729 bp, synthetic construct
  misc_feature 1..729: note = Description of Artificial Sequence: Synthetic coding sequence
  source 1..729: mol_type = other DNA
atgcgtcttgtgattcttgataactatgaccttgcaagtgagtgggcagcaaagtatatctgcaatcggatcatccaatttaagccgggccaggacagatatttcacactgggattgcctaccggccttcctagaaaccaccctgagagttaccattcctatatgtggaataacttttttaaacacatcgacatagatcccaacaatgcccacatcctggatggtaatgctgccgacctgcaagcagagtgtgacgcctttgagaacaagatcaaggaggccgggggcatcgaccttttcgttggcgggatagggcctgatggtcacatcgccttcaatgaacctgggtccagccttgtatcacgcaccaggctgaagacgttagcaatggacactatcctggcaaacgcgaagtattttgacggagatctgagcaaagtgccaactatggccctgaccgttggtgtgggcacagttatggatgcacgcgaggtaatgatactgattacaggagcccacaaagcatttgcactgtacaaggccattgaggagggcgtgaaccacatgtggactgtgtcggcctttcagcagcacccacgcactatctttgtgtgtgatgaggacgcaactctggagctgagggtgaaaactgtgaagtactttaaagggctgatgcatgtgcataacaagctagtggatccactgtttagtatgaaagatggtaactag

SEQ ID NO: 118442 - DNA, 1287 bp, synthetic construct
  misc_feature 1..1287: note = Description of Artificial Sequence: Synthetic coding sequence
  source 1..1287: mol_type = other DNA
atgctgaggaccctcctgagacggcgcttattttcttatcccaccaaatactactttatggtacttgtgctctccttgataacattctctgtgctgaggattcaccagaagccagagttcgtctccgtgcgccatctcgagctggctggcgagaatccttcttccgacatcaactgtactaaggtcctgcagggggacgtaaacgaaatccaaaaagtgaaactagaaattctgaccgtaaagttcaaaaagcgtcctcgctggacaccagatgattatatcaacatgacatccgactgctcgagttttataaagaggagaaagtacattgtcgagccactctccaaggaagaggctgaatttccaatcgcctattctattgtggtgcaccataagatcgagatgctggatcgtctcctcagagcaatttatatgcctcaaaatttctactgtattcacgtggatactaaatcagaggattcctatctcgcagctgttatgggaatagcaagctgtttttctaatgtgttcgtggcttctcgccttgagtctgtggtctatgcgtcttggtctcgggtccaggcagatcttaactgtatgaaagacctgtatgcaatgtctgcgaattggaagtatctgattaatctatgtggtatggacttccctattaagactaatctcgaaattgtccgaaagctgaagctgctaatgggcgaaaacaacttggaaaccgagcgtatgccttcacacaaggaagagagatggaagaaaaggtatgaggttgtcaacggcaaactcactaacaccggcaccgttaagatgctgcccccgctggaaacgcctctgtttagcggctccgcatatttcgttgtaagcagggagtatgttggctatgttttgcagaatgagaagatccagaaactgatggaatgggcacaggacacatactccccagatgaatacctgtgggcaacaattcagaggatcccagaagtacccggttcacttccagcatcccacaagtacgaccttagcgacatgcaagcagtagctaggttcgttaaatggcagtactttgagggggatgtgtccaaaggtgctccttaccccccctgtgatggcgtccatgtgcggagcgtatgtatcttcggcgccggggatctgaattggatgctaagaaagcatcacttatttgctaataaatttgacgtggatgtagacctgtttgctatacaatgcctggacgaacacctcaggcacaaagccctggagacactaaaacactag

SEQ ID NO: 118443 - DNA, 1287 bp, synthetic construct
  misc_feature 1..1287: note = Description of Artificial Sequence: Synthetic coding sequence
  source 1..1287: mol_type = other DNA
atgttgaggacactgctgagacgccgcctcttcagttatcctacaaagtattacttcatggtgctggtgctgtctcttatcacattttccgtcctcaggatccatcagaagcccgagttcgtttctgtgagacatctggagctcgctggcgagaaccctagctctgacattaattgtaccaaagttctgcagggagatgtaaacgagattcagaaggtcaagctggaaattctcaccgtgaagttcaaaaaaaggcccagatggacaccagacgactatatcaacatgacttcggactgtagctcatttatcaaaagaaggaaatacatcgtggagccgctaagcaaggaagaggcagagttcccaatcgcctactccattgtagtgcaccataagatcgagatgttggaccgcctgttaagggccatctacatgccacagaacttctactgtattcatgtggacaccaaatccgaggactcttacttagctgcagttatgggtatcgcctcttgttttagcaacgtgtttgtagcgtcccggctcgagagcgttgtctatgcatcttggagccgcgtccaggcagatcttaactgtatgaaagatctctatgcgatgagcgctaattggaagtatttaattaacctttgtggtatggattttccaatcaaaacaaatctggaaattgtgagaaagctcaaactgctgatgggcgagaacaacttggaaacagaacgaatgccatctcacaaggaagaacgttggaagaagcgctacgaagtagttaacggaaaacttaccaatacgggcacagtgaaaatgctgcctcctctggagacgccactgtttagcggatctgcgtacttcgtggtttcacgcgagtacgtgggttacgtccttcaaaatgagaagatacagaaactgatggaatgggctcaggatacgtatagtccggatgaatacctgtgggcaaccatccagcggattccagaagtgcccggcagtctccccgcctcacacaagtacgacctgagtgacatgcaagctgtggcaaggtttgttaagtggcagtatttcgaaggggatgtgtcaaagggggcgccatatccaccctgcgacggagtgcatgtacggtctgtctgcatattcggtgccggtgatcttaactggatgctgcgcaaacatcacctcttcgccaataagttcgacgtggatgtggacctgtttgcaattcagtgcctggatgagcacttgcgacacaaagcccttgaaaccctgaagcattag

SEQ ID NO: 118444 - DNA, 1287 bp, synthetic construct
  misc_feature 1..1287: note = Description of Artificial Sequence: Synthetic coding sequence
  source 1..1287: mol_type = other DNA
atgttgcgcacgctcctgcgacgccgcctgttctcctacccaaccaagtactacttcatggtgcttgtgctcagtttgattacctttagcgttctgcgcatacaccagaagcctgagttcgtctccgttcgccatctcgagctcgccggagaaaatccgtcttctgacatcaactgtactaaagtcttacagggggacgtcaatgaaattcagaaagtaaagcttgagatcctcacagtgaaattcaagaagcggcctaggtggacgcccgacgactatatcaatatgacctcggactgttcttcatttattaaacgccgcaagtatatagttgaaccgctcagcaaagaggaagccgagtttccaattgcgtactccatagtagtccatcataaaatcgaaatgctggatcgtctgttgcgggctatttatatgccgcagaacttttattgtatccacgtcgacacaaaatctgaagattcctatctcgctgctgttatgggaatagcttcttgtttctcaaatgtgttcgttgcctccaggctcgaaagtgttgtgtatgcatcatggtcacgcgtgcaggccgacctgaactgtatgaaggacttatatgctatgtccgctaattggaaataccttataaatctctgcggcatggacttccctattaagactaatctggaaatcgtgcgcaagctcaagctgctcatgggggagaataatctggagacagagcgcatgccttctcacaaagaagagaggtggaagaaaagatatgaggtggttaatggtaaacttacaaataccggtactgtcaagatgctgcctcccctggagacacctcttttctccggctctgcctatttcgtggtgtcacgggaatacgttggctatgtactgcagaacgagaagattcagaaactgatggagtgggcccaagacacttactcacccgacgagtatctgtgggctacaatacagcggatcccggaagtccctgggtccctgccggcatcacacaaatatgatttatccgatatgcaagctgtcgctcggttcgtgaagtggcagtatttcgaaggtgatgtttctaaaggagccccatatcctccgtgtgacggggtgcatgttaggagtgtgtgtatatttggcgccggagacctgaactggatgttacgcaaacatcatctttttgcaaataagttcgacgtcgacgtggatctgttcgccattcaatgcttggatgagcacctcaggcacaaagcactcgagaccctgaagcattag

SEQ ID NO: 118445 - DNA, 1287 bp, synthetic construct
  misc_feature 1..1287: note = Description of Artificial Sequence: Synthetic coding sequence
  source 1..1287: mol_type = other DNA
atgttgaggacccttttgcgccggaggctatttagctaccctacaaagtattactttatggtcctagttctaagccttatcaccttcagtgtacttagaatccatcagaagcccgaattcgttagtgtcaggcatctagaactggctggggagaatccctcatccgatattaattgcactaaggtgttgcagggagatgtaaacgagattcaaaaggtgaagttggagatcctgaccgtgaagtttaaaaaaagacccaggtggacacctgacgactatatcaatatgacttcagactgcagctcttttatcaagcggcgcaaatatatcgtggaacccctgtccaaggaggaagcagagttccccattgcttatagcattgtggttcaccataaaatcgagatgcttgacagattgctgcgcgccatctacatgccccagaatttttactgtattcatgttgatacaaaaagcgaggatagctacttggcagctgtgatggggatcgccagctgtttcagcaacgtgtttgtggcaagtcgtttagagtctgtcgtttatgcttcttggtcgagggtgcaggcggacctgaattgcatgaaggacttgtacgctatgagtgctaactggaagtatttaataaacttgtgcgggatggatttccccataaagacaaacctggagatagttcggaagctaaaacttctgatgggagagaacaacttggagactgagcggatgccttcccataaagaggagcgatggaagaaaaggtacgaggtggtgaacggcaagctcaccaacacaggcaccgtaaagatgcttcccccactagagacacccctgttctccggtagtgcatattttgtggtctctcgggaatatgtcgggtacgtgctccagaatgaaaaaatacagaaactaatggagtgggcacaggacacttattcccccgacgagtacctttgggccacgatacagcggatccctgaggtacctggctcgttgcccgcctcccataagtacgatttgtctgacatgcaggcagttgcacgattcgtaaaatggcaatatttcgagggagatgtgtccaagggcgccccttacccaccttgtgatggagtgcatgtgcgctcggtgtgcatctttggtgccggcgacctgaactggatgcttaggaagcaccatttattcgcaaataagtttgatgtggacgtggacctgtttgccatacagtgcctggacgaacatctgcgccataaggccctcgaaactctcaaacattag

SEQ ID NO: 118446 - DNA, 1209 bp, synthetic construct
  misc_feature 1..1209: note = Description of Artificial Sequence: Synthetic coding sequence
  source 1..1209: mol_type = other DNA
atgaacttttggcggtactgctttttcgcctttaccctgctgagcgtggttattttcgtgaggttttactcctctcaattgagtccccccaaatcatatgaaaagctgaactcgagtagtgaacgatactttcggaagaccgcttgtaatcatgcactggagaaaatgcctgtctttctctgggagaacatattaccttctcctctgcgaagtgtgccttgtaaggactacctgactcaaaatcactatattacctcgcctttgagtgaagaggaagcagctttcccgcttgcttatgtcatggtgatccataaagacttcgatacctttgagcgcttatttagagccatctacatgcctcagaatgtatactgtgtgcacgtggatgaaaaggcgcccgccgagtacaaagagtcagtcagacaacttttgtcttgctttcagaacgcttttatcgcttctaaaacagagtcggtggtatacgcgggcatcagcaggctacaggctgatctgaactgtctgaaagatctcgtggcctccgaagtgccgtggaaatatgtgattaatacgtgcggtcaagactttccactgaaaacaaatagggaaattgttcagcatctgaagggattcaagggcaagaatataaccccgggggttctccctcccgaccatgcaattaaaagaaccaaatatgtacaccaggaacacaccgacaaaggcgggttctttgtgaaaaacactaatatcctgaaaacatcacccccccatcagcttaccatctatttcgggacagcttacgtcgcccttaccagagacttcgtcgactttgtgctccgggatcagcgcgccatcgatttgctgcagtggtccaaagacacctactcaccagacgaacacttttgggttacactcaatcgggtgtcaggcgtgccgggttcaatgcctaacgcatcttggacgggcaatctgagagccatcaaatggtccgatatggaagacaggcatggtggttgccatggtcattacgtgcatggaatctgtatttacggtaatggcgatctcaagtggctggttaattcgccatctctcttcgccaacaaattcgaactgaacacttatccactgactgttgaatgcctggagctgaggcatcgagaaaggactttaaaccagtccgaaaccgcgattcagccctcatggtatttttag

SEQ ID NO: 118447 - DNA, 1203 bp, synthetic construct
  misc_feature 1..1203: note = Description of Artificial Sequence: Synthetic coding sequence
  source 1..1203: mol_type = other DNA
atgcctctctccatgcgttacttattcatcattagtgtctcgagcgtgattatctttatcgtattctcagtgtttaactttggcggggacccttccttccagcggctaaatatatcggacccactgcggctgacgcaggtgtgtacgtcctttatcaacgggaagacacgatttctttggaagaacaagctgatgattcacgaaaagtcaagttgtaaagagtaccttactcaaagccattatatcactgctcccctgtctaaggaggaggccgacttcccactggcctatattatggtcatccaccaccacttcgacaccttcgcccgcctatttagagcaatctacatgccacagaacatttattgcgttcacgtggatgagaaggcgaccaccgaatttaaggatgctgtggagcagcttcttagttgcttcccgaatgcctttttagctagcaagatggaaccggttgtctatggaggaatttctcgtctgcaggcggaccttaactgtatcagggacctcagcgccttcgaggtgagctggaaatacgtgattaatacatgcggacaggatttccccttgaagactaataaggaaatcgttcagtatctaaagggattcaaagggaaaaacataacacccggggtgcttccaccagcgcatgccattggacgaacgaagtatgtgcaccaggagcatcttggcaaagaactcagctatgtgatccgaacgaccgcactcaagccccctcctccccataatctaacgatttatttcggcagcgcttacgtcgcccttagccgagagtttgctaattttgtgcttcatgaccctcgggccgtggacctgctgcagtggagtaaggataccttttccccggacgagcatttttgggtcactctgaataggatcccaggagtgccaggtagcatgccgaatgccagctggactggtaatcttagagcaattaagtggagcgatatggaggatagacatggggggtgtcatggccactatgtacacggaatatgcatttatggtaacggcgacttaaaatggctggtgaacagcccctcgctgttcgccaacaagttcgagctgaatacctacccgctgacagttgagtgtctggagttgagacatcgggagcgaactctgaatcagagtgagaccgccatccaaccctcatggtacttctag

SEQ ID NO: 118448 - DNA, 1209 bp, synthetic construct
  misc_feature 1..1209: note = Description of Artificial Sequence: Synthetic coding sequence
  source 1..1209: mol_type = other DNA
atgatgggatcatggaaacattgtctcttctcagcgtccctgatctctgctctgatattcgtgttcgtgtacaatactgagctttgggagaacaaaaggtttttgcgggcagccctgtcaaatgctagtcttctggccgaggcctgccatcagatcttcgaagggaaggtgttctaccctaccgagaacgcattgaaaaccaccctggatgaagctacttgttacgagtatatggttcggtctcattacgtgaccgagactctgtcagaggaggaggctggatttccactggcgtatactgtgacaattcacaaagacttcggtacattcgaacgtctgttccgcgccatttatatgccacaaaatgtgtactgtgtgcacctcgaccagaaagccacggatgccttcaagggggccgtgaaacagctgttatcgtgttttccaaatgcattcttggcatctaaaaaagagtcagtggtgtacggaggcatctccaggctccaagccgacctcaattgtttggaggatcttgttgcttcggaggtgccatggaaatatgtgattaatacatgtggacaggacttccccctgaaaactaacagggagatcgtgcaatacctcaagggcttcaagggtaagaacatcactccaggggtactgcccccagatcacgcggtgggaaggactaaatatgttcatcaggaactcctgaatcacaagaatagctacgtcatcaagactacaaaactgaagactccccctccccatgacatggtcatttacttcggtaccgcctatgtggcacttacccgagattttgccaacttcgtgctgcaggaccagctggcacttgacctgctgtcatggagcaaagacacatacagcccagatgagcatttctgggtgaccttgaaccgtattccaggcgtccctggatccatgcctaatgcatcctggaccggcaacctccgggctatcaagtggagtgatatggaggacaggcacggcggttgtcacggccactatgtccatggcatttgtatctacggaaatggcgatctgaaatggctggtcaactcaccatccctttttgcgaataaatttgagctaaacacataccccctgaccgtagaatgtctggaactccgccatcgggaacggacgctcaatcagtccgaaacagccattcagccatcctggtacttctag

SEQ ID NO: 118449 - DNA, 1209 bp, synthetic construct
  misc_feature 1..1209: note = Description of Artificial Sequence: Synthetic coding sequence
  source 1..1209: mol_type = other DNA
atgatggggagctggaagcactgtctgttttctgcatccctcatctccgcgctgatattcgtgtttgtctacaacaccgaactatgggagaacaaaagattccttagagccgccctgtccaatgcctcactgctggctgaggcctgtcaccagatcttcgaggggaaagttttttacccgacagagaacgcattaaaaaccacactcgatgaagctacctgttatgaatacatggtccggagccattatgtcactgaaacactgtcagaggaggaagcaggttttcccctggcgtataccgtcaccatccacaaggactttggaacctttgaaaggttgttcagggccatctacatgccgcaaaacgtttattgtgtccacctcgatcagaaagccactgacgcctttaaaggggccgtgaagcagctgctgtcatgctttcccaacgcatttctcgcatcaaaaaaagagtcagtggtttacggcgggatttcccgattgcaggctgaccttaattgcctggaggacctagttgcctccgaggtgccctggaagtatgtgattaacacttgcggccaggacttccctctcaagacaaacagggagattgtacagtatctcaaggggtttaaagggaaaaacattacccccggcgtgctccctcctgatcacgctgtcggccgcacaaaatatgtgcaccaagaactactcaaccacaagaactcctatgtcatcaaaactaccaagttgaaaacacctccaccacacgacatggtaatttatttcggaacagcttacgtagccttgacaagggatttcgccaatttcgttctccaagaccagctagccctggacttactgtcttggtccaaggatacctactcaccagacgagcatttctgggtgaccctcaacagaatcccgggagttcccggctcaatgcccaacgcctcatggacaggtaatttacgggcgattaagtggagtgatatggaggacagacacggggggtgccatggccattatgttcacggaatttgcatttatggcaacggagacctgaagtggctcgtaaatagcccaagcctgttcgccaataagttcgagcttaacacatatccccttaccgtggagtgcctggaactcaggcatcgggagcgcactctaaatcagagcgagactgccatccagccatcttggtatttttag

SEQ ID NO: 118450 - DNA, 1317 bp, synthetic construct
  misc_feature 1..1317: note = Description of Artificial Sequence: Synthetic coding sequence
  source 1..1317: mol_type = other DNA
atggttcagtggaagcgcttatgtcagcttcactacttgtgggcactcgggtgctatatgctgttggcgacagtcgcgctgaaactctctttcagactgaagtgcgactctgaccatctcggcttagagagtcgagagtcccagtcccaatactgccgcaacattctgtacaacttccttaagttacccgcgaagaggtcaataaactgctccggggtgacacgtggcgaccaggaagctgtcctgcaagccatcctgaataatctagaggtgaagaagaagagagagccatttactgatactcactacttatctctcaccagagactgtgagcacttcaaggccgagcggaagtttatccaattcccactttctaaggaggaggtggagttcccgatcgcctactcgatggtgattcatgagaaaattgaaaactttgaaaggctcttgcgagctgtgtatgcgccgcagaacatctactgtgtccacgttgatgagaagtctccagagacctttaaagaggccgtgaaggccatcattagctgtttcccaaatgtattcattgcttccaaactcgtgcgagtggtgtatgcctcctggagcagggtccaggccgacttgaactgtatggaggacctgctgcagtcatccgttccatggaaatattttctgaatacctgcggcactgatttccctattaaatctaatgcagagatggttcaggcgttgaaaatgctgaatggaagaaacagcatggagagtgaggtcccaccgaagcataaggaaacccgttggaagtaccattttgaagtcgtacgggacacactgcatctgacaaataagaaaaaggacccacctccgtacaacctcactatgtttactggcaacgcttatatcgtggcttcaagagactttgtgcaacacgtgctgaaaaacccgaaaagccagcaattgatcgagtgggtgaaggacacatattcacctgatgagcacctctgggccacgctccagcgagccagatggatgcccgggtcagtacccaaccatccaaagtacgacattagcgacatgacttctatcgcacggctagtcaagtggcaggggcatgaaggggatattgacaaaggagcaccctatgcgccttgctctggtatccaccagcgggctatctgcgtgtatggcgcaggggacctcaactggatgttacagaatcatcatttgctggctaacaagttcgatccgaaggtagatgataatgccctccagtgcctggaggaatacctgagatataaagcaatctacggaaccgagctatag

SEQ ID NO: 118451 - DNA, 264 bp, synthetic construct
  misc_feature 1..264: note = Description of Artificial Sequence: Synthetic coding sequence
  source 1..264: mol_type = other DNA
atggtgcaatggaaacggttatgccagctacattatttgtgggcactgggttgttacatgctcttagcaacagtggctctcaagctctcgtttcggttgaagtgtgactccgatcacctgggcctagaatcacgcgagtcacaatcccagtactgcagaaacatcctttataacttcctgaaactccctgcaaagcgcagtatcaattgcagcggagtgacacggggtgatcaggaagccgttctgcaagcaatcctgaattag

SEQ ID NO: 118452 - DNA, 462 bp, synthetic construct
  misc_feature 1..462: note = Description of Artificial Sequence: Synthetic coding sequence
  source 1..462: mol_type = other DNA
atggtacagtggaaacggttatgccaactgcactatctgtgggccctgggttgctacatgttgctggccacagtcgcacttaagctgtccttccgcctcaagtgcgatagtgaccacttgggtctggagagcagagagagccaatcacagtattgtcgtaacatactttataatttcttgaaactcccagctaagcggtcaatcaattgctccggagtcactcgcggggatcaggaagcagtgctgcaggctattctgaataatttggaggtaaaaaagaaaagagagccttttaccgacactcactatctcagcctgacacgggattgtgagcacttcaaagcagaaaggaagtttattcagttcccactctcaaaagaggaggtagaattccccatagcctattcaatggtaatacatgaaaagattgagaacttcgagcgcctactgcgggcagtttag

SEQ ID NO: 118453 - DNA, 162 bp, synthetic construct
  misc_feature 1..162: note = Description of Artificial Sequence: Synthetic coding sequence
  source 1..162: mol_type = other DNA
atggtgcaatggaaacgcctgtgtcagctgcattatctctgggccctaggttgctacatgctcttggctaccgtggcccttaaactgtccttcagactgaagtgtgattccgatcacctgggactggaatcccgggaatctcaatcccagtattgtcggtag

SEQ ID NO: 118454 - DNA, 1317 bp, synthetic construct
  misc_feature 1..1317: note = Description of Artificial Sequence: Synthetic coding sequence
  source 1..1317: mol_type = other DNA
atggtgcagtggaagcggctctgccagctacattatctgtgggccctgggctgctacatgctccttgctacagtcgcactgaaattgtcattcagattaaagtgcgattcagaccacttgggtctcgagagcagggagtctcagtctcagtattgtcggaatatcttatacaactttctaaaactgcctgcgaagagatctatcaattgctctggtgtaactagaggcgaccaagaagctgtgctgcaggctattcttaacaacctggaagtgaagaagaagcgcgaaccattcaccgacactcattacctcagcctgactcgcgactgcgagcacttcaaggccgagaggaagttcatccagttccctctcagtaaggaggaagtggagttccccatcgcatactccatggttatccacgaaaaaattgaaaacttcgagcggcttctcagggcagtgtatgctcctcagaatatttattgcgtacatgtggacgaaaagtcacccgagaccttcaaagaagcagtgaaggcaattatcagttgttttcctaatgtgtttatcgcatccaaattagttcgcgtagtttacgccagttggtctcgcgtgcaagccgacctcaactgcatggaagaccttctgcagtccagcgtaccatggaagtatttcttaaatacttgtgggaccgatttcccaatcaagtcaaacgccgagatggtgcaggcactcaagatgctcaatgggaggaactccatggagtccgaggtgccgccaaagcataaggagaccagatggaaatatcactttgaagttgtcagagatacacttcacctgactaacaaaaagaaggaccctccaccctataacctgactatgttcacaggcaacgcctatattgtggcctcgcgggacttcgtccagcacgtcttaaagaatcctaagtcccagcagctaattgagtgggtaaaggatacttactctccggacgagcacctctgggctaccctgcagagggcaaggtggatgccgggctccgtgcctaaccatcccaagtacgacatttcagacatgacgagtattgctagactagtgaaatggcaggggcacgaaggagatattgataagggagctccctatgccccttgttctggcattcaccagcgcgccatttgcgtttatggggccggagacttgaactggatgctccagaaccatcatctgctggcaaacaagtttgatcctaaggtggacgataacgcattacagtgcctagaggaatacctacgctataaggccatttatggcaccgagttgtag

SEQ ID NO: 118455 - DNA, 1041 bp, synthetic construct
  misc_feature 1..1041: note = Description of Artificial Sequence: Synthetic coding sequence
  source 1..1041: mol_type = other DNA
atggagagtactctgggcgccggtatcgtgattgccgaggccctgcagaaccagctggcgtggctggaaaatgtctggctttggatcaccttcctgggcgatccaaagatcctgttcctgttctattttcctgccgcctactacgcaagcagacgcgttgggatcgctgtgctctggatcagtcttatcactgagtggttaaacctgatcttcaaatggtttctgttcggagataggcccttttggtgggtacacgaatccggatactattctcaagccccggcgcaggttcaccagttccccagttcctgtgaaacagggcctggctcaccatctggacattgtatgattacaggggccgctctttggcccatcatgacggctttatcaagccaggtagccaccagggccagatctaggtgggtgcgggtgatgccttctctggcctactgcacgttcctcctcgctgtgggcttaagtcggatcttcatccttgcccactttcctcatcaggtgttggcaggcctgattactggggctgtgctaggctggctcatgaccccccgagtccccatggaaagagagctctcgttttacggattgaccgcactggcgttaatgctgggtacctccctgatctactggacattattcaccctcggccttgatctgtcctggagcatcagcttggcctttaagtggtgcgaacggcctgaatggatacacgtggactcaaggccattcgcaagccttagccgagatagcggcgcagctcttgggttggggatagctcttcacagcccctgctatgcgcaggtgcggcgggctcagctgggcaatggccagaaaattgcttgcctagtgctcgccatgggactgctcggccctctggactggctggggcaccctccacaaatttcactgttttacatcttcaacttcctgaagtacacattatggccatgtttggtgctcgccctggtgccatgggcggtacacatgttcagtgctcaggaggcaccgcctattcacagtagctag

SEQ ID NO: 118456 - DNA, 465 bp, synthetic construct
  misc_feature 1..465: note = Description of Artificial Sequence: Synthetic coding sequence
  source 1..465: mol_type = other DNA
atggactttctccacaggaatggcgttctgattatccaacacctgcagaaagactacagagcatattacaccttcctcaatttcatgagcaatgtgggagatcccaggaacatcttctttatctacttcccgctctgttttcagtttaatcagaccgttgggacaaaaatgatctgggtggcagttatcggggattggctgaatttaatttttaaatggatcctcttcgggcataggccttactggtgggtgcaagaaacacagatttatcccaatcacagcagcccatgtctggaacagttcccgaccacctgcgagactgggcccggctctccatctgggcatgccatgggcgcatcctgcgtttggtacgttatggtcacagctgcgctgtcccataccgtttgcggcatggacaaattctccataaccttgcaccgtcacgcaggcggtcgggggctttag

SEQ ID NO: 118457 - DNA, 1068 bp, synthetic construct
  misc_feature 1..1068: note = Description of Artificial Sequence: Synthetic coding sequence
  source 1..1068: mol_type = other DNA
atggatttccttcaccgcaatggagtgctaatcatccagcacttgcaaaaagattaccgggcttactacacgttccttaactttatgtccaatgtgggtgaccctcgcaacatctttttcatctacttccccctgtgctttcaattcaatcagacagttggaacaaagatgatttgggtcgcggtgatcggagactggttaaatctcatctttaagtggatcctctttgggcatcgtccatactggtgggttcaggagacccagatctaccccaatcatagttctccctgtctcgagcaatttccgacgacgtgcgagactgggcctggatccccatccggccatgctatgggggcgagctgcgtctggtacgtgatggttaccgccgccttatctcatactgtatgtggaatggacaagtttagtatcacactgcacaggctgacttggtcgtttttgtggagtgtgttttggcttattcaaatctcggtctgcatatctcgggtatttatcgctacacactttcctcaccaggtcatcctgggtgtcatcggcggcatgctggttgcggaggcctttgaacacacaccaggaattcagactgcatccttaggaacctacttaaagacaaacctctttctgttcttgttcgctgtcggcttctaccttctactgcgcgtcctaaatatcgatctgctgtggtccgtcccgatcgccaaaaagtggtgtgccaaccctgattggatacatattgacacaactccattcgctggactggttagaaacttgggagtcctgtttgggctcggattcgcaatcaattccgaaatgttcctgctatcctgtcgcggagggaacaactataccctcagcttcaggctgctttgtgccctgacgtctttgaccatcctgcagctttatcatttcctccagatccccacccacgaggagcatctcttctacgtgctgtctttttgtaaaagtgctagcatccccctgacagttgtcgccttcatcccttattccgttcacatgctgatgaaacagagcggcaaaaagagccaatag

SEQ ID NO: 118458 - DNA, 1677 bp, synthetic construct
  misc_feature 1..1677: note = Description of Artificial Sequence: Synthetic coding sequence
  source 1..1677: mol_type = other DNA
atggcagctctcacaagggatcctcaatttcagaaactgcagcagtggtaccgcgagcaccggagtgagcttaacttgagacgactgttcgacgcaaataaggatcgtttcaaccatttctcgctgaccctgaatactaaccatggccacatcctggtggactatagcaaaaacctagttactgaagatgtgatgagaatgctcgtggacctggcaaaaagccgcggggtggaggctgcccgggagcggatgtttaatggcgagaagatcaactacactgaaggaagggctgttcttcatgtcgccttgaggaatcggagcaacacccccattttagttgatggcaaagacgtcatgccagaagtgaataaagttctggataagatgaaaagtttctgtcagcgggtgcgatctggcgactggaaggggtacactggcaaaaccataacagatgtaatcaatatcggaattggcggctcagacctcggacctcttatggtaacagaagctttgaagccttattccagtggtggaccaagggtgtggtatgtatcaaatatcgatgggacccatattgctaagactctcgctcagttgaacccagagagctccctgttcatcatcgcgtctaaaacgtttaccactcaggagaccatcacgaatgcagagacagctaaagagtggttcctccaggctgcgaaggacccatctgccgtagccaagcatttcgtggccttgagtaccaacacaacaaaagtcaaggagtttggaatcgatccgcagaatatgtttgagttctgggattgggtaggcggaaggtattccctctggtctgcgataggcctttcaatagcactgcacgtgggcttcgacaatttcgaacagctgctgagtggcgcccactggatggatcagcactttcgaaccactccccttgaaaagaatgccccggtcctgctcgccctcctagggatctggtacataaactgttttggctgcgagactcacgcgatgctcccatatgatcaatacctgcatagatttgctgcttattttcagcaaggagacatggagtccaacggaaagtacattaccaagagtgggactagggtggaccaccaaaccggcccaattgtatggggagagcccggaacaaacggacaacacgctttctatcagctgatccatcagggaaccaaaatgatcccctgtgactttttgattcccgtgcagacacaacatccgattcgaaagggcctgcatcataaaatactcttggcaaacttcctggcccagactgaagccctcatgcggggcaagtccactgaggaggcacgtaaagaactgcaggcagcagggaaatcccccgaggatctcgaaaggttgctgccccacaaagtttttgaagggaacaggcccaccaatagcatcgtgtttactaagttaactccttttatgctgggcgccttggtcgcaatgtacgaacataagatttttgtacaggggatcatttgggatattaacagtttcgaccaatggggagtggagctgggtaagcaacttgccaaaaagattgaaccagagctcgacggttccgcccaggttaccagtcatgacgcaagcactaatggcctgattaatttcattaagcagcagcgcgaggcccgggtgcagtag

SEQ ID NO: 118459 - DNA, 1563 bp, synthetic construct
  misc_feature 1..1563: note = Description of Artificial Sequence: Synthetic coding sequence
  source 1..1563: mol_type = other DNA
tctcgacacggtagatcccaccccggaccccctgtgccggaagcggccgctatggtgccacgggcccccctgcgggctgaacctgcgccgcccttgcgctgtcagcagggcccactgcagcccctgcaggttcgtgccggcagacggcgaggacttcccagggcagcccccggaaccgggcacgctggcctcggctctggaggagggggtagtggagcaagggggcctcagtctcctacttccagaccgagaacgggagcccaggcagaaagcgctctcaggccatggtcattgcttggtgtccggtcctggggtctggctgctagcccaggcgtatccgccccgggtctgctgcgatacgaggagaagagggctccgccatggggccattttcccagcagcagcccttgctcctcaggtcacctcagccgcggaagtttccgctcgtgtgaggagcgtccttggctcactcagcaggccgggaagggttgcccattcccctctgcccctggccatatgtccctcggcgcttccgctggccgagcggcaagagccggcgtttttgagggggcagggtggaaagacggtgatgtgggccgagattcttgcaggcggcacctctgtacaaccggcaagtgggagggagtgttcgagcagataatgggtggctcagctgctaagggagcattgattaccgacactggcggaggtggtggcggggagcgcctatggttgcgcgcacgcagacctgatgggcacccatgccatctcgacgggtgcctttctaacttgcggcaaaaagtcgaggctctcgggagaggaggcccaccactccagtcgggactcctcatacagggtctccccgcatccacggtatgcgaggatggctttttcctgtgggctgccgttgcagaccatccaggtggcccggccggcgatagacaccatcactgcgccggttggccgagacctctgtggggcgttggccagggggggtgctttttctgggagcagctccttctaagggcttggcttccagcccgggagacgagagtgtggagtgctgcatctccgtctttttgcagtttgaccttgaatacaaaccacgggcacatccttgtggattatagcaagaacttggttactgaggacgtgatgagaatgctggtagatctggccaagtcccggggggtggaggccgcacgcgaacgcatgttcaacggcgaaaagatcaattatactgaggttagtcggcctcatataccttccggtgcctcgttcctgccattcggtgtttacttgaccgtaagcaggattactctttgcttgcaccccttcagctgggcaatgctgttgcttaacgagggacctgagggactgttccctccagcttgttcacgagccctgggatgcgcctttcacaagatcggtctagtaagttccctcgagtggtttcccgtgagtgcctgggaggaacacatctcatacccgcagggtgaatttttgaaggccgacatcttcctcgaaaagctcactctgatatacccccagtgtaagttttag

SEQ ID NO: 118460 - DNA, 1710 bp, synthetic construct
  misc_feature 1..1710: note = Description of Artificial Sequence: Synthetic coding sequence
  source 1..1710: mol_type = other DNA
atggtggccttatgttctttgcaacaccttggatcatcagatcctagggccctacccacattacctactgccaccagtggccagcgacccgctaaaagaaggagaaagagcccggccatggccgctcttacccgcgatccacagttccaaaagcttcagcagtggtatcgtgagcacagatcagagctgaacctgagacgcttatttgatgcgaataaggacagattcaatcacttctccttaacacttaacaccaaccatggccacatcctagtggattatagcaagaacctcgtaaccgaggatgttatgaggatgcttgtcgacctcgctaagagtagaggtgtggaggctgctcgcgaacggatgttcaacggcgaaaagattaactatacggaagggagggctgtactgcacgtcgcacttaggaacagaagtaatactccgatcctggtggatggtaaggatgttatgcctgaggtcaataaggtgctggataagatgaaatctttctgtcagggacccctgatggttacagaggccctaaagccttattcctctggcggcccgagggtgtggtacgtgagcaatatcgacgggacgcacatcgctaaaacgctggcacaactcaacccggagagttctctgttcataatagcatctaagacatttacaacacaagagacaataaccaacgccgaaactgcaaaggaatggttcttgcaggcagcaaaagaccccagcgcggtggccaaacatttcgtggccttaagcaccaacacaacgaaggtcaaggaattcggcatcgaccctcagaatatgtttgaattctgggattgggtgggtggtcgctatagcctttggtctgccatcggcctgtccattgccctgcacgtcggcttcgacaacttcgaacagctcctgtcaggcgctcattggatggaccagcactttcggacaacccctctggagaagaatgccccagttcttctcgctctgctcggaatttggtacattaactgtttcggatgcgaaacccacgccatgctcccctatgatcagtacctacatcggtttgccgcctatttccagcagggtgacatggagagtaacgggaagtacatcaccaaatccggcacccgcgttgaccatcaaaccggccctattgtgtggggggaaccagggacaaacggacagcatgccttttatcagctaatccatcaggggacaaaaatgatcccttgcgattttctcatccccgttcagactcagcaccccatccggaaaggcctgcaccacaagattctcctcgcgaattttctggcccaaaccgaggccttaatgagggggaaatctacagaggaggctaggaaggaactgcaagctgccggaaaatctccagaggatcttgagcgactacttccccataaggtcttcgaaggaaatagacctaccaactccattgtgttcacgaagctgacgccgttcatgctgggcgcactagtcgctatgtatgaacacaaaatcttcgtgcagggtataatttgggacataaatagtttcgatcagtggggcgtggaattgggaaaacagcttgccaagaaaattgaaccggaattggacggatctgcccaggtcacatcacacgacgcatcgacaaatggccttattaacttcatcaagcagcagagggaagctcgagtccagtag

SEQ ID NO: 118461 - DNA, 2901 bp, synthetic construct
  misc_feature 1..2901: note = Description of Artificial Sequence: Synthetic coding sequence
  source 1..2901: mol_type = other DNA
atggccgcggtggccgctgtcgccgcccgcagacgcagaagctgggcctccctggtcctggcctttctgggcgtgtgtcttgggattactctggctgtcgacagatcgaacttcaaaacatgcgaggaatcttctttttgcaagaggcagcgctcaatccgccccggactgtctccttatcgcgccctgttggactcactccagctgggtcccgactcactcactgtgcatcttattcacgaggttacaaaagtgctgctggtgctggagctgcaaggcttgcagaagaatatgacacgcttccgcatcgatgaattggagccacgacgacctcgatatagggtgccggacgttttggtcgccgaccctccaatcgctaggctatccgtctctggacgagatgaaaactccgtggaactgacaatggctgagggaccatataaaatcattctcacagcccgacccttcagactcgacctactcgaggataggtccctgctcctgtcagttaatgcccgcggcttgctcgaattcgagcaccaaagagcaccgagagtgtctttcagtgataaggtaaatctgaccttggggtcaatctgggacaaaatcaagaatctgtttagcagacaggggagtaaagaccccgcagagggggacggggcccagcctgaggaaacacctcgggatggagataaaccagaggagactcagggaaaagccgagaaggacgagcccggcgcatgggaggaaacattcaaaacacactccgacagcaaaccatacggcccgatgtcggtgggactcgatttctctctcccgggaatggaacacgtgtatgggatcccagaacacgccgataacctgagattaaaagtgacagaaggcggggaaccctaccgtctttataatctagacgtgttccagtacgaactctataaccctatggcactgtacggatctgtgccggttctgctcgctcacaacccccaccgggatctcggtattttttggctcaatgccgcagagacttgggtggacatctcttccaatactgccgggaagaccctgtttgggaagatgatggactatctgcaaggatccggagagactccccagacagacgtccggtggatgagcgagactgggattatagacgtctttctgctgctggggccgtcaattagcgatgtcttcagacagtacgctagcctgaccgggacccaggccctgcctcccctttttagccttggctaccatcagtcaaggtggaattatcgggacgaggcagatgtgctggaggtggatcagggatttgatgatcataatctcccatgcgatgtcatatggctcgacattgaacacgccgacgggaagagatacttcacatgggatccaagccggttcccacagccaaggacaatgttggagagacttgccagcaaaagaagaaagctggtcgctatcgttgacccacatattaaggtggactccgggtaccgcgttcatgaagaacttaggaatctcggtttgtacgttaagaccagagatgggagcgattatgaaggctggtgttggcctggatcagcgggctacccagatttcaccaaccctacaatgagagcctggtgggccaatatgtttagctatgacaattatgagggttcagctcccaatttgtttgtatggaatgatatgaacgagcccagcgtgttcaatggaccggaggttaccatgctgaaggatgcgcagcattacggcggctgggagcatcgagatgtgcataatatctacggcctctatgtgcatatggccacagcagatggattgcggcagcgcagcggagggatggaaaggccttttgttctggctcgggcgttttttgcaggctcccagcgctttggcgcagtttggacaggggataatactgcagagtgggaccatttgaagatctccatccccatgtgcctaagtctgggccttgtcggactgtccttttgtggcgcggacgtggggggattttttaaaaatccggaaccagagctcctcgtgcggtggtaccagatgggagcttaccagccatttttcagagcacacgcgcatctcgacactggccgacgagagccctggctgctaccgagccagcacaatgacattatcagagacgccctagggcagcggtatagcctcctgcctttttggtataccttgctctatcaggcccatagggaaggcatccccgtcatgcgccctctgtgggtgcagtaccctcaagacgtgacgacgttcaacattgatgaccagtatctgttgggcgacgcccttctggtgcaccccgtctcagactcaggagcccacggggtacaggtctatctgcctggacagggcgaagtgtggtatgacatccaatcatatcaaaagcaccacgggccacagacactctatctccccgtgactctaagtagtatcccagtctttcagcgaggaggaaccattgtcccaagatggatgagagtgcggaggagcagcgaatgtatgaaggatgatcccatcacgttattcgtagcactctcccctcaaggaactgctcagggggaactgttcttggacgacggtcataccttcaactatcaaactcgccaggagtttctcttacggaggttttcattctccgggaataccctcgttagtagctccgccgatccagaaggccatttcgaaacccctatctggattgaacgtgttgtgattatcggggccggtaaacctgctgccgtggtgctccagactaaaggcagcccggaatcacgcctgagcttccagcatgatccagaaactagcgtgctcgtgcttcggaaacccggaatcaatgtcgctagtgattggagtattcacctgcgttag

SEQ ID NO: 118462 - DNA, 2835 bp, synthetic construct
  misc_feature 1..2835: note = Description of Artificial Sequence: Synthetic coding sequence
  source 1..2835: mol_type = other DNA
atggccgccgtagccgctgtggccgctcgtcggagaaggagctgggcctccctagtgttggccttcctgggcgtgtgtctgggtatcaccctggcggtcgaccggtccaatttcaagacctgtgaggagtcctcattttgtaaacgacaacgatccattcgtccaggtctgtccccgtacagggcccttctcgatagcctgcagttgggtccggattctcttaccgtgcaccttatccacgaggtgactaaagtgctcctcgtgctcgagcttcagggcctacagaagaacatgacacgcttccgcatcgatgagctggaaccccggagacctcgctatcgagttccggacgtgctagtcgccgaccctcccatcgcccgactctcagtgagtggccgggatgagaatagtgtcgagctcactatggctgagggaccttacaagatcattcttactgcacgaccctttagactggacctcttagaagatagaagcctgctgcttagtgtgaatgcgcgcggattgctggagtttgagcaccagcgggcgcccagggttagccagggctcaaaagaccccgctgagggagacggcgcgcagccggaggaaacacctcgcgacggtgacaaaccagaggagacacaggggaaagccgaaaaagacgaaccaggagcttgggaagaaacattcaagacccattccgactcaaaaccatacggccccatgtcagtcggactggactttagcttgcctggcatggagcacgtgtatgggattccggaacacgcagacaacctcagactcaaggtgaccgaaggaggggagccgtaccgcctctacaatttagacgtatttcaatacgaactgtacaacccgatggctttatacgggagcgttcctgttctgctcgcccacaatcctcaccgtgacctggggatcttctggttgaacgcggccgagacatgggtggatatcagctccaacacggcgggaaaaaccctctttggcaagatgatggactacctgcaaggctctggagagactccacagaccgatgtgcgttggatgagcgagacgggaatcatcgacgtgttcttgttgttaggcccttcaatatcagacgtgtttaggcagtacgcgtctcttacaggaacacaggctctccccccattgttttccctcgggtaccaccagagccggtggaactatagagatgaggcagatgtgctcgaagtcgaccaggggttcgatgaccacaacctgccatgcgatgtaatatggctggatatcgaacacgctgacggcaagcgctacttcacttgggacccttccaggtttccccaaccgaggaccatgcttgaaaggctggcctcaaaaagacgcaagttagtggccatcgttgatccccatattaaagtcgatagtgggtacagggtgcacgaggaattgaggaacctgggactgtacgttaaaacgagggacggaagtgattacgaggggtggtgctggccaggatccgccggatatcctgatttcacaaaccccactatgcgggcctggtgggctaacatgtttagctacgacaactatgaaggctctgctcccaatttgttcgtctggaatgatatgaatgaaccgtcggtgtttaacgggccagaagtcactatgctaaaagacgctcaacactacggagggtgggagcaccgggacgtacataacatatatggcctctatgtccacatggcgacagccgacggtttaagacagagatctggggggatggaacgacctttcgttctggccagagccttcttcgccggatcacaacggtttggagctgtctggacaggagataacaccgcagagtgggatcacctgaagatcagtatcccaatgtgtctttcactcggcctggttgggttgtcattctgcggtgccgatgtagggggcttcttcaagaatcccgagcccgagctgcttgtccgatggtatcaaatgggcgcgtaccaaccctttttcagagctcatgcgcatctggataccggccggcgcgagccttggctgctccctagtcaacacaacgatataattcgggacgctttgggacagaggtacagcctgctccccttttggtataccttgctctaccaggcacaccgcgagggcatccctgtgatgcggccactctgggtgcaatacccccaggatgtgacaacctttaacatcgatgaccagtatctccttggggacgccctgctggttcaccccgtcagcgacagcggggcacatggggtgcaggtttatctgcccgggcagggagaggtttggtacgatatacaaagctatcagaagcatcacggtccacagaccctatacctgcccgtcacattgtcgagtattcccgtctttcagcgcggaggaactatcgttccgcggtggatgagggtgagacgcagcagcgaatgtatgaaagatgaccccataactctgttcgtggctttatctccccaagggactgcacagggagagctatttctggacgatggacacacattcaactaccagaccaggcaggagttcttgttgcggcggtttagcttctccggaaataccttggttagctcgtccgcagatcctgagggacattttgagactccaatctggatcgagcgcgttgtgatcattggcgcgggaaagcccgccgctgtggtgttacagacaaagggctccccagaatcaagactcagcttccaacatgaccccgaaacatcggtgcttgtgctgagaaaacctgggataaacgtcgcttcagactggtctatccatcttcggtag

SEQ ID NO: 118463 - DNA, 2544 bp, synthetic construct
  misc_feature 1..2544: note = Description of Artificial Sequence: Synthetic coding sequence
  source 1..2544: mol_type = other DNA
atgacccgctttaggatcgatgaactcgaaccacgccggccccgctatcgcgttccggacgttctcgttgcagacccacctattgccagactgagtgtgtcaggccgagacgagaacagcgtggaacttacaatggcggagggaccctacaaaatcatactgactgccaggccattccggctggatcttttggaagaccggagtctgttactctcagtgaacgcaagagggctgctggagtttgaacatcaaagagccccgcgtgtaagccagggttccaaggacccagccgagggggatggcgctcaacctgaggagactccacgggatggggacaagccagaggagacccagggaaaggcagaaaaagatgaacccggagcctgggaggagaccttcaagacgcactctgactccaaaccttacggtcccatgagcgtgggcctcgattttagcttgccgggcatggagcatgtgtatggcattccagaacatgccgacaatctcagactcaaagtcacagaaggcggcgagccctatagactgtacaatttggatgtcttccaatacgagctatataatcctatggctctgtacggctccgtgcctgtactgctggctcacaatccacaccgggatctcggcatcttctggcttaatgccgccgaaacctgggtggacatctccagcaacacagccggcaaaactctctttgggaaaatgatggactatctccaggggagtggcgagacacctcagaccgatgtacggtggatgtctgagaccggcatcattgacgttttcctcctccttggcccatctatcagtgacgtgttccgacagtatgcatcgctgactggcacacaggccctccctcccctgtttagtctggggtaccaccagagccgatggaactacagagacgaagcagacgttctggaagtcgaccaggggtttgacgaccacaacctcccttgcgatgttatttggcttgatattgagcatgcggacggaaagcggtacttcacctgggatccttcccgatttccacagccacggacaatgttagagagactggcctcaaaacgccgaaagttggtggctattgttgatccccatatcaaggtggatagcggatatcgagtccacgaagaactcaggaacctgggcctctacgttaaaacacgagatggcagtgactacgagggctggtgctggccgggtagcgctggctacccagattttacaaatcccactatgcgtgcttggtgggcgaatatgttctcttatgataactatgagggatctgcccctaatctatttgtgtggaacgatatgaacgagccttctgtcttcaacggccccgaggtgacgatgttaaaggacgctcaacactatggcggatgggaacaccgtgacgtgcataacatctacggattgtacgtgcacatggccactgccgacggcctgcggcaacggagcggcggaatggagcgcccattcgtcctggcacgtgccttttttgcaggcagccagagatttggcgctgtgtggaccggcgacaataccgcagagtgggatcacctgaagatatcaataccaatgtgtctatccttgggcctggtcggtctttccttttgcggtgctgacgttggggggtttttcaagaatcctgaaccagagctactggtcagatggtaccagatgggtgcttaccagcctttctttagggcccatgcccacttagacacggggcggcgggagccatggcttctcccgagccagcataacgacatcattcgtgacgccctaggacaaagatattccctgcttccattttggtataccctgttgtatcaagctcatcgcgaaggaatcccagttatgaggccactttgggtgcagtaccctcaagatgtgacaactttcaacatcgatgatcaatacctgctgggggacgctttactggtgcaccccgtgtccgattccggggcacacggcgtccaggtgtacttaccaggtcagggcgaggtctggtatgacatccagtcctaccaaaaacaccatgggccgcagactctgtacctacccgtaactctgtcctccatccctgtgttccagagaggcggcacaatcgtaccaagatggatgagggtcaggcgtagctctgagtgtatgaaggatgacccgatcaccctgtttgttgcactgtccccacagggtaccgctcaaggggagttgttcctggatgacggccacaccttcaactaccagactcgccaggaattcctgctgcgtagatttagcttctccggaaacacattggtgtcgtcctctgccgaccccgaggggcatttcgaaacccctatttggattgaacgcgtggtgatcatcggcgccggtaaaccagccgctgtggtcctgcagactaagggttcaccggaatctcggctgtcctttcagcacgaccctgaaactagtgtgttggtcctacgaaagcctggtattaatgtggcgtctgactggtcgatacacctgcgctag

SEQ ID NO: 118464 - DNA, 2745 bp, synthetic construct
  misc_feature 1..2745: note = Description of Artificial Sequence: Synthetic coding sequence
  source 1..2745: mol_type = other DNA
atggaggctgccgtgaaggaggagatctccctggaagatgaggcagtggataaaaacatctttcgggattgcaataagattgctttctaccgtcggcagaagcagtggctgtctaagaagagcacctatcaagcactgctcgattcagtaacaacagatgaggacagtactagatttcagatcatcaatgaggcctcaaaggtgcccctgctcgcagaaatttacgggatcgagggaaatatattcaggctcaagatcaatgaggagactcctcttaagcctcgtttcgaggtacccgatgtgctcacttccaaaccatctactgtgcgacttatctcttgttccggagacaccggctccctaatcctcgccgatgggaagggggacttgaagtgccatataacagcaaaccccttcaaagtggacctcgtgtccgaggaagaggttgtgatatctattaattccctgggccagctgtactttgagcatttacagatcttacacaagcaaagagcggcaaaagagaacgaggaggagaccagcgttgacacatcgcaggagaaccaggaagatctcggattgtgggaagaaaaattcggtaagttcgttgatatcaaagccaacggcccgagttccatcgggctcgatttctcattacatggctttgagcacttgtatgggataccacagcatgctgaaagccaccagttaaagaataccggcgatggcgacgcatataggctgtacaatttggacgtttacggctatcagatttacgataaaatggggatctacggaagtgtaccttacctgttagcacacaagctgggcaggacaatcggaattttctggctgaacgcatctgagacattggtagagattaatactgaacccgctgtagaatacacacttacgcagatgggtcccgttgccgcaaagcagaaggtgaggagtcggacgcatgtgcactggatgtctgaaagcgggatcattgatgtatttcttctgaccggacccaccccatccgatgttttcaagcagtatagccacctgaccggcacccaggccatgccacctctgttcagcctgggataccaccagtgccggtggaactacgaagatgaacaagacgtgaaggccgtagacgcaggattcgatgaacacgacataccctacgatgccatgtggctggacatcgagcacactgagggcaagcgctacttcacctgggataagaacagatttcctaatccgaaacgcatgcaggaattgctgcggtctaagaaacggaagcttgtggtgatatctgatccccatataaaaattgatccagactatagcgtatatgtaaaggcgaaggaccaggggtttttcgttaagaaccaagaaggcgaggatttcgagggcgtttgttggccgggactatcctcatatctggattttaccaatcctaaggtacgcgaatggtattcttctcttttcgcattccctgtgtatcagggatctaccgacattctgttcctgtggaatgacatgaatgagcccagcgtcttcaggggccccgaacaaaccatgcaaaaaaatgctattcaccacgggaactgggagcacagagagctgcataatatctatggcttttaccatcagatggctaccgctgaggggctgatcaagcgaagcaaaggaaaagaacgcccatttgtactcacgcggagcttcttcgccggctcccagaaatatggggcagtatggaccggcgataacactgccgagtggagtaacttgaagatctctatacccatgcttctcacactgtctatcacaggaatcagtttctgtggggccgatatcggcgggtttattggcaatcccgagaccgaactgctcgtaaggtggtatcaggcaggagcatatcagccattctttcggggacatgccacaatgaacactaagcggagagagccgtggctgtttggcgaagagcacactaggcttatacgggaagccattcgcgagaggtatggtctgctgccttattggtacagcttgttttaccacgctcatgttgcttctcaacccgtaatgagacccctttgggtggaatttcccgacgagctgaaaactttcgacatggaggatgaatacatgctggggtccgcattgttagtccaccccgtgactgaaccaaaggccaccacagtagacgtctttctgccaggctctaacgaagtgtggtacgattataaaaccttcgctcactgggaaggagggtgcacggtcaagattcctgtcgccctggacactatcccagtgttccagagaggaggcagcgtcatacctatcaagacgaccgtcgggaaatcaacaggctggatgaccgagtcttcttatggacttagagtcgcactgagcacgaagggttcttcagtcggagaactttatctggacgatggccactctttccagtatctgcatcagaaacagttccttcaccgcaaattttcattctgctccagcgtgttaataaacagctttgccgaccagcggggacactatccttccaagtgcgtggtggagaagattctggtactggggtttagaaaagaaccttcctctgtgactactcactcgagcgacggaaaagaccagccagtggcatttacgtattgcgctaaaacctccattctatctctcgagaaattgagcctgaatatcgccaccgattgggaagtgcgtattatttag

SEQ ID NO: 118465 - DNA, 849 bp, synthetic construct
  misc_feature 1..849: note = Description of Artificial Sequence: Synthetic coding sequence
  source 1..849: mol_type = other DNA
atggaggctgcggttaaggaggagattagtctggaagacgaagcagtggacaagaacatcttccgagactgcaacaaaattgcattctacaggcggcaaaagcagtggctctcaaaaaagtccacctaccaggcactgctggatagcgtcacgaccgatgaggactcgactagatttcagattattaacgaagctagtaaggtgaggtgtcaggatcaatccccgaccacattagatgccttcaaaggcaaagagaccacagtccaggaagaaacacaggatctgagcactcgtcaacacctagcgcaaaaggaagcggaagagcctgataagcagggccagataacctgggacatcagcaacgttgcgcctaagactgaaaacttcgaagacctacttgaacagaccccctgctccgcctgcttacaaggatttactagggacaatacgtcaagctcgttttctgaggatgcaggaatttcattaagcacctccgtcaagctgcccttagcctcatctagcaagccaaatgagaacgaagctcttcctaatcagcctccaagccagcaaatcagacacaactatcggcttctcgctagcacggtttccgccgaaatggcaagaaataggcagcttatatgggagctggcccgccagtccgaggcccatctggaccggcccgttgtgctgggagagcaggccagtgctcaaagagaggttgcttctatattatgccgcaagagtgtcctggccattaaccagctcgccgcaaccgtagagggcacaatcagcgttctgcaacagttcaatgaactgttggaccatcctttagatcctgggcgtagctag

SEQ ID NO: 118466 - DNA, 1230 bp, synthetic construct
  misc_feature 1..1230: note = Description of Artificial Sequence: Synthetic coding sequence
  source 1..1230: mol_type = other DNA
atgcggcgatacctgcgcgttgttgttctgtgtgtcgcatgcgggttctgttccctcctctacgccttcagtcagctcgcagtcagcctggaggagggaaccggaggggggggagggaaaccgcaggccgccgtggccagctggctcgctggaggaggtcgcggtgctgtgcgcggcgccggtgtagcgggtcctgccgcccatccaggggtgagtgaccgttacagtctcaagattcaacctgtcgagaaaatgcatttggccgtggtggcctgtggggaacgcctcgaggaaacaatgacaatgctgaaatctgcaattatattctctatcaagccccttcaatttcacatcttcgccgaggatcagctgcaccactcctttaaaggcaggctcgacaattggagcttcctgcagacatttaactatactctttatcctattaccttcccatccgagaacgctgccgagtggaagaagctgtttaaaccttgcgcaagccagaggttattcctccctctcatcctgaaagaagtcgactcactcttatacgtggataccgatatcctattcttgaggcccgttgatgacatctggagcctgttaaagaagttcaatagtactcagattgcagcaatggctcctgaacacgaggaaccacgcatcggttggtacaatagattcgcaagacatccttattatgggaaaacaggagtgaattcaggtgtgatgctgatgaatatgaccagaatgcgccggaagtacttcaagaatgacatgaccaccgttcgtctgcagtggggtgacattctgatgcccttactgaagaagtacaagttaaatattacgtggggcgaccaagacctgctgaacattgtgttttttcataatcccgaatccctgtttgtgtttccatgccagtggaattacaggccagaccattgtatctacgggtcgaattgccaagaagcggaggaaggcggcatatttatcctacacggcaatcgtggggtctaccatgacgataaacagcccgcgttcagggctgtctatgaggctctgaggaactgcagttttgaagacgacaacatacggagtctcctgaagccactggagcttgagctccaaaagacggtgcatacttattgcggaaaaatctacaagatatttattaaacagctggcgaagtctgtgagagataggtacgcccgtagtcccaaagagaaatag

SEQ ID NO: 118467 - DNA, 1323 bp, synthetic construct
  misc_feature 1..1323: note = Description of Artificial Sequence: Synthetic coding sequence
  source 1..1323: mol_type = other DNA
atgagaagatacttacgagtcgtcgttctgtgcgttgcatgcggcttctgttccctgctttatgcattctcccaactggctgtgtccctcgaagaaggaactggaggcggcggtgggaagccccaggctgctgtggccagctggcttgcgggtggcggaaggggcgcagtgcgaggcgccggcgtggccggacccgccgcccaccctggtgtctctgatcggtgcaaagacttcagtctttgttactggaacccttattggatgctcccatccgatgtctgcggcatgaattgtttttgggaggctgcatttcgctacagcctgaagattcaaccggtagagaagatgcatcttgccgtcgtggcctgcggtgaacgacttgaggaaaccatgacaatgctgaaaagcgccatcattttctccatcaagcccctgcagtttcacatctttgccgaagaccaattgcaccattccttcaagggaagattggataattggtcattcttacagacctttaattacactctttaccccataactttcccctctgaaaatgcagctgaatggaagaagttattcaagccctgcgcctcccagcgcctctttctgccgctgattctgaaagaagtggatagcttgctgtacgtggataccgacatcctcttccttcgcccagtagatgacatctggtcactcctcaagaaatttaactcaacccaaattgccgctatggccccagagcatgaagaacccagaatcggctggtacaaccgttttgctcgtcacccttactatggcaaaacaggtgtgaattccggggttatgcttatgaacatgacacgaatgcggaggaaatatttcaaaaatgatatgacaaccgtcaggctgcagtggggagacattctgatgcctctccttaaaaaatacaaattaaacattacctggggggatcaggatttgctcaacatagtgttttttcacaacccggagtctttgtttgttttcccctgccagtggaattatcgtccagaccactgcatttacgggtcgaattgtcaagaagcagaagagggcggcatctttatcctacacgggaatcggggagtctaccatgacgacaagcaacccgcctttagagccgtgtatgaagctcttcgcaattgtagcttcgaggatgataacatccgttccttattaaaaccattagaactggagcttcagaaaaccgtgcacacgtattgcggcaagatatacaagatctttatcaaacagctcgccaagtccgtacgggataggtacgccagaagtccaaaggagaagtag

SEQ ID NO: 118468 - DNA, 1332 bp, synthetic construct
  misc_feature 1..1332: note = Description of Artificial Sequence: Synthetic coding sequence
  source 1..1332: mol_type = other DNA
atgaaattacgatccaaggctgctgccctgctgctgctcgctcttgcagcccttttgttggcactgctgagtctgcgggcaggcagggccgaaccgcccgccctgccagctcgccccgctagcgctccccagcggcacccagcaccggttcccgcccgatggcccgggccaggggccctcccaggtgcctcaccaggggtccgcaggagacgaccaccgaggccaagacccagagcaggccgacgtggcgccgcccggctggaaaagctggcccggaggcccggcgaaccccggtcatttcaggcagtactccctcctgaactctggattcatctcgcagtagtagcttgtggcaacaggctcgaggagacgctggtcatgctaaagtccgcagttctgttttctcatcgcaaaatacaatttcatattttcactgaggactctttgaagcccgagttcgataagcagttacggcagtggccagatagttatacaaagaaattcgagcacaggatctaccctattacattctctgttggcaacccacaagagtggaagaaactgttcaagccctgcgcggcacagcgacttttcctccctgttattctcaaagacgtggacagcttactgtacgtggatactgatgttctgtttcttcgacctgtggatgatatttggaaactgctgcgcctgtttaacagcacccagttggccgcaatggcccctgaacatgaaattccaaaaataggatggtactcccgctttgcccgccatccattctatggctccgctggggtgaattcaggggtgatgctcatgaacttaacaagaatcagatcaacccagtttaagaacagcatgatccccacgggactggcctgggaagatatgttataccccctgtaccagaagtacaaaaacgcgataacgtggggcgatcaggacctgcttaatattattttctatttcaatcctgagtgcctgtatgtcttcccatgtcagtggaattacagacccgatcattgcatgtacggatcgaactgtcgggaggccgagcatgagggtgtctccgtgctgcacggcaaccgtggcgtttaccatgatgacaagcagccaaccttccgcgccctgtatgaggcaatccgggactttccatttcaggacaatcttttccagagcatgtactaccccctccagctcaagttcctggagactgtgcacacactatgcggccgaataccccaagtttttctgaaacagatcgaaaaaactatgaagcgtgcctacgagaaacacgtgatcattcatgtgggtcccaaccagatgcactag

SEQ ID NO: 118469 - DNA, 1854 bp, synthetic construct
  misc_feature 1..1854: note = Description of Artificial Sequence: Synthetic coding sequence
  source 1..1854: mol_type = other DNA
atgcggtgtctggctgcccgagtgaattataaaaccctcattataatttgcgcgctatttacgctagtcacagtcctgctgtggaataaatgcagctcggacaaggcaatccaattcccccgaaggagtagcagtggctttcgtgtggatggctttgaaaagagagccgccgctagcgaatctaataattatatgaaccacgtggcgaagcagcagtctgaagaggctttcccgcaagagcagcagaaagccccccctgttgttgggggcttcaatagcaacgtcgggagtaaagttctcgggctcaagtatgaagagatcgattgcttgattaacgatgagcacactatcaaagggcgcagggagggtaacgaagtattcttgccctttacatgggttgagaagtactttgatgtgtatggaaaggtggtgcagtacgatggatacgatagatttgagttttcacactcttactcgaaagtatacgcgcaacgcgcaccctaccaccctgacggagtgtttatgtccttcgagggctacaacgtcgaggtcagggacagggtgaagtgcattagcggtgtggaaggcgtgccgctttctacacaatgggggcctcagggatatttctaccccattcaaatcgcccaatacggactgagccattactccaagaacctgaccgagaaacccccacatatagaggtatacgagaccgcagaagaccgtgataaaaataagcccaatgattggacggttccaaagggctgctttatggctaatgtcgccgacaagtctcgattcacaaatgtaaagcagttcatagctcccgaaacatcagaaggggtgtcattgcagttggggaacaccaaagatttcattatatctttcgaccttaagttcttaactaacggttctgtgtctgtggtactggagacaaccgaaaagaaccagctgttcaccatccattacgtcagcaatgcacagcttattgctttcaaggagcgtgacatttattacggaatcggccctcgtaccagttggtcaaccgtaacacgtgatctggtcaccgacctgcgcaagggcgtcggactgtccaataccaaggccgtcaaacctaccaaaatcatgcccaagaaagtagtcagacttatcgctaaaggcaaaggattcctcgacaacatcaccatctccacaaccgcacacatggcggctttctttgcggccagcgactggttggttagaaatcaagatgagaaggggggatggccaattatggtaactcgcaaactgggggaaggattcaaatccctggagcccgggtggtactccgccatggcacaagggcaggcaattagcacactagtgcgagcttacctgctaaccaaggaccatatatttcttaacagtgctctccgagcaacagccccttacaaatttttatccgagcagcatggcgttaaagccgtctttatgaacaagcacgattggtatgaggaataccctacaaccccttcttcattcgtgttgaacggctttatgtattccctgattggtctctatgacctcaaagagacagctggcgaaaaactcggcaaggaagcgagaagtctttatgaaaggggcatggaatctctcaaagccatgctgccactgtacgatacaggttcagggaccatctacgatctgcgccacttcatgttagggatcgcccccaacctagcacggtgggactaccacaccacacacattaatcagctgcaactgttgagcactatcgacgagtcacctgttttcaaagaatttgtgaagaggtggaagagctatctcaaaggatccagagccaagcacaactag

SEQ ID NO: 118470 - DNA, 1662 bp, synthetic construct
  misc_feature 1..1662: note = Description of Artificial Sequence: Synthetic coding sequence
  source 1..1662: mol_type = other DNA
atgaaccatgttgccaaacagcagtcagaggaagctttccctcaggagcagcagaaagcacctcctgtggtgggtggattcaactccaatgttggtagcaaggtgcttggccttaagtacgaggaaatcgattgcttgatcaatgatgagcatactattaaggggagacgtgaggggaatgaggtgttccttccctttacctgggtcgagaaatacttcgacgtgtacgggaaggtggtccagtacgatggatatgatcgtttcgagttctcgcactcctacagtaaggtttacgctcagagggcaccgtatcaccccgatggcgttttcatgagctttgagggctacaatgtcgaggtgagggacagggtgaagtgtataagcggggtggaaggcgtgccattatccacacagtgggggccccaagggtacttttatccaatccaaattgctcagtatggactcagtcactattcaaagaacctgaccgaaaagcccccccacattgaggtatatgaaacagctgaggacagagacaaaaataaacctaatgattggaccgtgccaaaaggctgttttatggctaacgtggccgacaagagccgctttaccaatgtgaagcagtttattgcacccgaaacgagcgaaggagtaagtctccaactcggcaacactaaggacttcatcatttcttttgatttaaaattcctcacgaatggatccgtgagtgtggtgctcgagactaccgagaagaatcagctgttcaccattcattacgtgagcaatgcacagctgatcgcgtttaaagagcgcgacatctattatgggataggcccacgcacatcatggtcaacggtcaccagggacctcgtaactgatttaaggaagggagtaggtctctctaacaccaaggccgttaagcccaccaagattatgcccaagaaggtggttaggctcatagctaagggaaaaggcttcctagacaatatcacaatcagcacaacagcgcacatggcggcattctttgctgcctctgattggctggtgcgcaaccaggacgagaaaggcggctggcccattatggttacacggaaattaggagaggggttcaaaagtcttgagccgggctggtactccgctatggcccaggggcaggcgatcagcaccttggtgcgcgcttatctgctcactaaggatcacatattcctcaacagtgcgctgagggctaccgccccctacaagtttctgagtgagcagcacggggtgaaagccgtgtttatgaacaaacacgattggtacgaagagtatccaactaccccgagctctttcgtgctaaacggatttatgtactctctaatcggcctctacgacctcaaagagacggctggggagaagcttggaaaggaagcgcggagcttgtatgagcggggaatggaaagtctgaaggcaatgctccctctgtatgacactggatctggcactatatacgacctgagacattttatgctgggcatcgccccaaacttggctagatgggactatcatacaacccatatcaatcagctccagctcttgagcacaattgacgagagcccagtgttcaaagagtttgttaagcgatggaaatcttatctgaagggaagtagagccaaacataattag

SEQ ID NO: 118471 - DNA, 1956 bp, synthetic construct
  misc_feature 1..1956: note = Description of Artificial Sequence: Synthetic coding sequence
  source 1..1956: mol_type = other DNA
atggcccggggtagtgcagtggcatgggctgccctgggcccactcctctgggggtgtgcgttaggactgcagggtggtatgctgtatcctcaagagtcaccatctcgagagtgcaaggaactagatggtttatggtctttccgagccgatttctccgataaccgtagacggggcttcgaggaacaatggtatcggagaccactgtgggaaagcggccctactgttgatatgcccgtgccatcgagctttaacgatattagtcaagattggcgtctccgtcatttcgttggctgggtatggtacgagcgtgaagtgatcttgcccgagagatggactcaagatctgcgaacacgggtagtgctgcgcattggcagcgcccacagctacgcaatcgtatgggtgaatggagtggacacacttgaacatgaaggcggttacttaccttttgaagctgacatctccaacctggtgcaggttggccccttgccatcacgtttgaggatcacaatcgccatcaataatactcttacgccaaccacgctgcctcctggcaccattcagtatctgacggatacaagcaagtatccaaagggctacttcgtgcagaacacctacttcgactttttcaactacgcgggcttgcaacgctccgttctgctgtacaccacaccaaccacgtatattgatgacatcacagtgaccacatctgtggaacaagactcaggcttggtgaactatcaaattagtgtgaaggggagcaatctttttaagctggaagtgcgccttcttgacgccgagaacaaggttgtggcaaacggcaccggcacacaggggcagctgaaagtcccgggtgtcagtttgtggtggccatatttgatgcatgagcgtccagcttacctctacagcctggaagtccaactgaccgcacagactagcctcggacctgttagcgacttttatacactccctgtgggcattcgtaccgtcgctgtcactaagtcccagttccttatcaatggtaagcccttctattttcatggggtaaacaagcatgaagacgctgatatcaggggaaagggcttcgactggcccctcttggtcaaggactttaatctgttacggtggctgggggctaacgcttttaggacatcccattatccttatgccgaagaggtaatgcagatgtgtgacagatacggcatcgtcgttatcgacgaatgccctggagttgggctggccctcccgcagtttttcaataacgtgtccctccatcatcatatgcaggtgatggaggaggtcgtcagacgagataagaaccatcccgcggttgtcatgtggtctgtggccaacgaacccgcgagccatctcgagagcgccgggtactacctgaagatggttattgcacacactaaaagtttagacccctctaggccagtgacattcgtctccaactccaactatgccgcagacaagggcgccccttatgtcgatgtcatctgcctgaattcatattacagctggtatcatgattatggtcacctggagctgatccagctacagcttgcaacacaatttgagaactggtataaaaagtatcagaaaccaataatacagagtgagtatggggctgagaccatagctggtttccaccaggaccctccactgatgttcaccgaggagtatcagaaaagtctactggagcaataccatctgggcctggatcagaagcgccgcaagtatgtcgtgggggaacttatttggaatttcgcagattttatgacagagcaatctccaactagagtcctgggcaataagaagggcatttttacccgacagagacaaccgaagagcgccgcctttctcctgcgagagcgatattggaagattgctaacgaaaccaggtacccacactccgtcgcaaaatcacagtgcctggaaaacagcctgtttacttag

SEQ ID NO: 118472 - DNA, 1803 bp, synthetic construct
  misc_feature 1..1803: note = Description of Artificial Sequence: Synthetic coding sequence
  source 1..1803: mol_type = other DNA
atggctcgggggagcgccgtggcatgggccgccctcgggcccctcctgtggggctgtgcattgggcttgcaaggcggtatgctttacccacaggagtctccctcccgggaatgtaaagaactcgatggactttggtctttccgagccgatttctccgacaatcggcgcaggggttttgaagaacagtggtacaggcggcctctctgggagtcaggacctaccgtggacatgcccgtcccctccagctttaacgacatatcccaggactggaggctgaggcattttgtggggtgggtgtggtacgagcgtgaggtgatcctgccagagcggtggacccaagaccttcgtaccagggtggtactgcggatagggtcagcccattcatatgccatcgtctgggtaaacggagttgacactctggagcatgagggcgggtacctcccctttgaggctgacatttccaacctggtgcaagtagggccattacctagcaggctgaggatcaccatcgccatcaataacacactgacgcctactaccctgccccccggcactattcagtatttgaccgacactagcaagtatcccaaaggctactttgtgcaaaacacctacttcgactttttcaattatgccggtctgcagaggtccgtacttctttacaccactccgaccacctacatcgatgacattactgtgactacctcggttgagcaggacagcggcctggtgaactaccaaatcagcgttaaaggttccaatttatttaagcttgaggttcggctgctcgatgcagagaacaaagtagtggcgaacgggaccggcacacagggccagctcaaggtgcccggtgtatccctgtggtggccttatctgatgcatgaaaggcccgcttatctgtacagcctcgaaattcgcggaaaggggtttgactggccacttctggtgaaggacttcaatctcctgcggtggttgggcgctaatgctttccggacatcccactacccctatgcagaggaggtgatgcagatgtgcgatcgctatggcattgtggtgatagacgaatgtcctggggtcggactggctttgccccagttcttcaacaacgtctccctgcaccaccatatgcaagtcatggaggaggtggtgcggcgtgataaaaaccatcccgccgtggtcatgtggagcgtggccaacgagcctgctagccatctagaatccgctgggtattatctgaagatggttatcgcccacaccaaatccctggacccttcgaggccggtgacatttgtgtcgaattccaactatgccgctgacaagggtgctccgtacgtggacgtgatttgtctcaacagttactattcttggtaccatgactatgggcacttagagctgatacaactccagcttgctactcagtttgagaactggtataagaagtaccagaaaccaatcattcagtcagagtacggggctgaaacaatcgctggattccaccaggaccctccactcatgttcactgaagaatatcagaagagtcttttggaacagtatcatctcggactggaccagaaaagaaggaagtatgtcgtgggcgaacttatttggaactttgccgactttatgaccgagcagagtcccacccgggtgcttggaaacaaaaaagggatattcacgcggcagaggcaaccaaaatcagccgcattcctgctgcgggagcggtactggaagatcgcaaatgaaacccgctatccgcatagcgtggctaagagccagtgtctggagaatagcctctttacctag

SEQ ID NO: 118473 - DNA, 675 bp, synthetic construct
  misc_feature 1..675: note = Description of Artificial Sequence: Synthetic coding sequence
  source 1..675: mol_type = other DNA
atggcatccagcacacccagcagtagcgccaccagcagcaacgcgggcgcagaccctaataccaccaatctgaggcccactacctacgacacatggtgcggcgtcgcccatgggtgcacccgtaagctggggttgaaaatctgcggcttccttcaacgaacaaatagcttggaagagaagtctcgtctggtctccgcctttaaggagcgacagtctagcaaaaacctactgtcctgcgagaattctgatcgcgatgcacgcttcaggagaactgagacagatttttctaatttgttcgcccgcgatctcctgcccgctaaaaatggcgaggaacaaactgtgcagttcctgctggaggttgtggacattttgctcaactatgtcaggaagacgttcgatagatcaacaaaggtgctggattttcaccatccacaccagctcctggaggggatggaaggatttaacttggaactgtccgatcatccggaatctcttgagcagatccttgtggactgccgggacactctcaaatacggggtgcgaaccggtcatccacggtttttcaaccagttatccaccgggcttgacattataggattggcaggggagtggctgactagcacagcgaatacgaacatgccatcagacatgagggaatgctggctgctgagatag

SEQ ID NO: 118474 - DNA, 1785 bp, synthetic construct
  misc_feature 1..1785: note = Description of Artificial Sequence: Synthetic coding sequence
  source 1..1785: mol_type = other DNA
atggcgtccagtacccccagtagctcagccacaagctcaaatgcaggtgccgatccaaacaccactaacctccggcctacgacctacgatacttggtgtggagtcgcccacggttgcacgcggaagctcggactcaagatttgcggcttcctgcaacgcactaactctctggaagagaaatcacgtctggtctctgctttcaaagagaggcaaagctctaaaaatctgctcagttgtgagaactctgatagggacgcgagattccgtcgcaccgagacagacttctctaatctgttcgccagagacttactccccgctaaaaacggggaggagcagactgtacagttcctccttgaagtggtggacattctgctgaactacgtgcgaaaaacgtttgaccgcagtaccaaagtgctcgactttcatcatccccatcagcttctggaaggcatggaaggcttcaatctggagctgagcgatcatccggagtcactcgagcagatactcgtcgattgccgggatactctgaagtatggcgtgcgcacagggcaccccaggttcttcaatcagctttcaacggggctggacatcatcgggctcgcaggagagtggctgacctcaaccgccaataccaatatgtttacatatgaaatcgctcccgtgttcgttttgatggaacagatcacattgaagaagatgagggaaatagtcggttggtccagcaaggacggcgatggtatcttttcacccgggggagccatatctaatatgtattccataatggctgcccggtataagtatttccccgaggtcaagactaaagggatggctgccgtgccaaaactggtgctgtttacctctgaacagagccactactccatcaagaaggcgggggctgcactgggattcgggacagacaatgtcatcctaattaagtgcaacgaaaggggaaaaattatcccagcagacttcgaggcaaaaattcttgaggccaagcagaagggatacgtgccgttctacgtgaacgccaccgctggcacaactgtttatggggcttttgaccccatccaggaaattgccgatatctgcgagaagtataatctgtggctccacgttgatgccgcctggggaggcgggctgttaatgagtcggaaacatcggcacaagctaaacggcatcgagcgggccaactcagtgacctggaacccccacaaaatgatgggcgttctgctgcaatgctccgccatcctggtcaaggagaaaggcattcttcaggggtgcaatcagatgtgtgctggctacctgttccagcctgataaacagtacgatgtatcatatgataccggagacaaggccattcagtgcggcagacacgtcgatatatttaagttctggctgatgtggaaagccaagggtacagtgggttttgaaaaccaaatcaacaagtgtctggagctcgccgagtacctgtacgccaagataaagaatagggaagaattcgaaatggtgttcaatggagaacccgaacacactaacgtatgtttttggtatatccctcagtcattaagaggtgtgccggactcacctcaacggagagagaagttacacaaggttgctcctaagatcaaagccctgatgatggaatccggaacaaccatggtcggatatcaacctcagggcgataaggcaaattttttcaggatggtcatctccaacccagctgcaacccagagcgacattgattttctgatcgaggaaattgagcgcctcggacaggacctgtag

SEQ ID NO: 118475 - DNA, 675 bp, synthetic construct
  misc_feature 1..675: note = Description of Artificial Sequence: Synthetic coding sequence
  source 1..675: mol_type = other DNA
atggcgtcttctaccccaagctcctctgcaactagctctaacgcaggggcagaccccaataccactaatctgcgcccgactacttatgatacatggtgcggtgtggcccacggatgtacccgtaagttgggtttgaagatctgtggcttcctgcagcggacaaactcactggaggagaaaagtagacttgtgagcgcgttcaaagaacggcagtctagtaagaatcttctatcctgcgagaactcagatcgcgacgcccggtttcgccgcaccgagacagacttctcaaatttgttcgccagggatctgctccccgcgaagaacggtgaggagcagaccgtgcagttcttgctggaagtggttgacattctgttgaactacgtaagaaagaccttcgatcggagcaccaaggttctagattttcatcacccacatcagctcctggaggggatggaaggctttaaccttgaactttccgatcaccccgagtcactggagcagattctagtcgattgccgcgatacactaaaatacggcgtgcggaccggacaccctcgattcttcaaccagctgtctaccggtctggacattattggcctcgcgggagaatggctgacatctaccgccaatactaatatgccttcagacatgagggagtgttggctgctaaggtag

SEQ ID NO: 118476 - DNA, 114 bp, synthetic construct
  misc_feature 1..114: note = Description of Artificial Sequence: Synthetic coding sequence
  source 1..114: mol_type = other DNA
atggccagctccaccccgagctcatctgcgacatcctccaatgctggggccgacccaaacacaacaaacctaagacccaccacatatgatacttggtgtggtgtggcgcactag

SEQ ID NO: 118477 - DNA, 258 bp, synthetic construct
  misc_feature 1..258: note = Description of Artificial Sequence: Synthetic coding sequence
  source 1..258: mol_type = other DNA
atggcgtcctcaacgccctccagttcagcaacctcaagcaatgccggcgccgaccccaatacaactaaccttagacccacaacctatgacacatggtgtggcgtcgcgcacgggtgcacacggaaacttggtctcaagatttgtggatttctccagcggactaattcactcgaggaaaagtcccgactggtctccgcttttaaggagcggcagtccagtaagaatctgttgtcatgcgaaaattcggaccgcgactag

SEQ ID NO: 118478 - DNA, 348 bp, synthetic construct
  misc_feature 1..348: note = Description of Artificial Sequence: Synthetic coding sequence
  source 1..348: mol_type = other DNA
atggccagcagtactccttcgagttcagcaacctcatcaaacgccggcgctgaccccaacactacgaatctcaggcccaccacctatgacacatggtgcggtgtcgcccatgggtgcactcgtaagctgggtctgaagatatgcgggttcctccaaaggactaatagtctcgaggagaagtctcgcctggtctctgcttttaaagagcggcagtcctcaaagaatctcctaagttgcgaaaattctgaccgtgacgccaggtttaggaggaccgagaccgacttttctaacctgttcgcccgtgacctcttaccagccaaaaacggtgaagagcagacggtgcagtag

SEQ ID NO: 118479 - DNA, 366 bp, synthetic construct
  misc_feature 1..366: note = Description of Artificial Sequence: Synthetic coding sequence
  source 1..366: mol_type = other DNA
atggcgagcagtacaccgtcctcttcggccacaagtagtaacgcaggggcagatccaaacacaacaaatttgaggccaacaacctatgatacctggtgcggcgtggcacatggctgtaccagaaagctgggtctgaagatttgcggcttcttgcagagaacgaactcactagaagagaagtctcgccttgtgtcagccttcaaggaacgccagtctagcaagaatttgttaagttgtgaaaacagtgacagggatgcgaggttccgacggaccgagactgactttagcaacctgttcgcccgggatttgctgccagcgaaaaacggcgaggaacaaacagtccagtttctgctcgaggtagtgtag

SEQ ID NO: 118480 - DNA, 1758 bp, synthetic construct
  misc_feature 1..1758: note = Description of Artificial Sequence: Synthetic coding sequence
  source 1..1758: mol_type = other DNA
atggcgtcgccgggttcgggcttctggtcgttcggtagcgaagacgggagtggagacagcgagaacccaggtaccgctcgagcgtggtgtcaggtcgcacagaaatttacgggggggatcgggaataagctatgtgccctgctatacggcgacgcagaaaagcctgccgaatctggcgggagccaacctccaagagccgccgcgcggaaggctgcttgtgcttgcgatcagaaaccctgcagctgtagcaaggtcgacgtcaactacgctttcctccatgccaccgacttactgccggcctgcgatggcgagcgcccaacacttgcctttctccaggatgttatgaacatcctgctccaatatgttgtaaagtcattcgaccgatccacaaaagtcatagactttcattaccctaatgagctgctacaggagtataattgggaactggctgaccaaccccaaaatctcgaagaaatactgatgcactgtcagactactctaaagtatgcgattaagacggggcacccaaggtactttaaccagctgtccaccggtttagatatggtgggtctggcggcagattggttgacttccaccgcaaacaccaatatgtttacatatgagattgcccctgttttcgtgctgcttgagtatgttacactaaaaaaaatgcgggagattatcggatggcccgggggcagcggtgatgggatcttctcacctggcggggccattagtaacatgtacgctatgatgatagctcggtttaaaatgtttcccgaagtgaaggaaaaaggaatggcggcactgccaagactgatcgctttcactagcgaacattcacacttctctctgaagaagggtgctgccgccctgggcatcggaaccgactctgtaatcctcattaaatgtgacgagcgagggaagatgatcccatctgatctcgagcgaagaattcttgaggctaaacagaaaggcttcgtgcctttcctagtgagtgccaccgctggaaccacagtgtatggcgctttcgatccactgttggccgttgcagatatctgtaagaaatataaaatatggatgcatgtcgatgccgcctggggcggaggactgctgatgagcagaaagcacaaatggaaattgagtggagtcgaaagagccaattccgtgacctggaaccctcataaaatgatgggggttccactccaatgtagcgcgctcttagttagggaagaggggctcatgcagaattgtaatcagatgcatgccagttacctgtttcagcaagataagcactatgacctcagctacgataccggggataaggcgcttcaatgtgggcggcacgtagatgtcttcaaactgtggctgatgtggagagctaaaggcaccactggatttgaggcccatgtggacaagtgtctggagcttgccgagtacctgtacaatattatcaaaaacagagagggctacgagatggtgttcgatgggaagccccagcatactaacgtgtgcttctggtatatacccccctccctgagaacgctagaagacaacgaagaacggatgtctagactgagcaaagtcgcaccagtgatcaaggccagaatgatggaatacgggactactatggtctcttatcaacctctgggggataaggtgaactttttccggatggtcatctcaaaccctgctgccacacatcaggacattgacttcctaatcgaagaaattgagaggctcggtcaggatttatag

SEQ ID NO: 118481 - DNA, 390 bp, synthetic construct
  misc_feature 1..390: note = Description of Artificial Sequence: Synthetic coding sequence
  source 1..390: mol_type = other DNA
atgaacattctcctacagtacgtggtgaagagcttcgatcgaagcacgaaggtgattgacttccactatcctaacgagttactccaggagtataattgggagctggctgatcagccccagaacttggaagagatcctaatgcactgccagaccactcttaagtacgctataaaaacgggccacccacgatacttcaatcagctgagtacaggcctggacatggtgggcctcgcagcggactggctaacaagcaccgctaataccaacatgttcacctacgagatcgccccagtttttgtgttgctggagtatgttaccctcaaaaagatgcgcgagattatcggctggcccggaggcagtggcgacggcatcttctctccaggaacctag

SEQ ID NO: 118482 - DNA, 1758 bp, synthetic construct
  misc_feature 1..1758: note = Description of Artificial Sequence: Synthetic coding sequence
  source 1..1758: mol_type = other DNA
atggctagtcccgggagcggcttttggtcatttggaagcgaggatggttctggagattctgagaatcccggaaccgctcgtgcatggtgccaagtcgcccagaagttcaccgggggaatagggaataaactctgcgcactgctgtacggcgacgctgaaaagccggctgagtcaggaggcagccagccaccgagggccgccgcccgcaaggccgcatgcgcatgtgatcagaagccatgctcctgctctaaggtggatgtcaattatgccttcctccatgccactgacctgctgcccgcttgcgatggcgagcgcccaactctggctttcttgcaagacgttatgaacatcctgttgcagtacgtggtaaaaagtttcgatcggtctaccaaagtcattgattttcattatcccaacgaactgctgcaggagtacaactgggaattggccgatcaaccccaaaatcttgaggaaattctcatgcactgtcagactactcttaaatacgctataaagacaggccaccccaggtattttaaccagctgtccacaggactcgacatggtgggcctcgccgcagactggctgacttcaactgccaatacaaatatgtttacttacgaaatcgctccagtttttgtcctcctggaatacgtcaccctgaaaaagatgcgagaaatcattgggtggcctggagggtctggcgacgggatatttagccctggaggggcgatctctaatatgtatgccatgatgatcgctaggtttaaaatgtttcccgaagttaaagaaaagggtatggccgccctccctcggctgatcgctttcacatccgagcattcacacttcagcttaaagaagggcgcagccgccttgggcattggcactgacagcgtgattctgatcaagtgcgatgagagaggaaaaatgatccctagtgatctcgaaagacgaatcttggaagcaaaacagaaaggattcgtgcctttcttggtttcagctactgctgggactaccgtgtatggggcttttgaccctttgttggccgtggctgacatttgcaagaaatacaagatttggatgcacgtagatgccgcttggggggggggtctgctaatgtctagaaagcacaaatggaagctttccggagtagagcgagccaatagtgttacttggaaccctcataaaatgatgggcgttcctcttcaatgttccgccctcctggtgagagaagagggtctgatgcaaaattgcaaccagatgcacgcatcctatctgtttcagcaggataagcactatgacttgtcctacgatactggggataaggccctgcagtgcggtcgccatgtggatgtctttaaattgtggttgatgtggcgggctaaaggcactacaggttttgaagcccatgtggataaatgtttggaactggccgagtacttgtacaacattatcaagaatcgggagggatatgagatggtcttcgacggaaagcctcagcatacaaacgtttgtttctggtacatccctcctagccttcgcacactagaagacaatgaggagagaatgtctaggctgtcaaaggtggctcccgtgatcaaggctagaatgatggagtacgggaccactatggtttcctaccagccattgggggataaggtgaattttttcaggatggtcatcagtaacccagctgcgacacatcaagatatcgatttcctaattgaggaaattgaaaggcttggacaggacctatag

SEQ ID NO: 118483 - DNA, 567 bp, synthetic construct
  misc_feature 1..567: note = Description of Artificial Sequence: Synthetic coding sequence
  source 1..567: mol_type = other DNA
atggcaagtccaggcagtggcttctggtctttcggaagcgaagacgggtctggcgactcagaaaaccctggtactgccagggcatggtgccaggtggcccagaaatttactggcggcatcggaaacaagctatgtgcactgctgtacggcgatgcagagaagccagctgaaagcggcgggtctcaacctccacgtgctgccgctcgcaaagctgcctgcgcctgtgatcagaaaccttgtagctgcagcaaggtggacgtgaattatgcctttttgcatgccactgacctgttgcctgcatgcgacggcgagcgacctacattagcgttccttcaggacgtgatgaacattctgctccaatacgttgtgaagagttttgatcgatctacaaaggttatagacttccactacccaaacgaactgcttcaggagtacaactgggagctggccgaccagccacaaaatctggaggaaatcttaatgcattgtcagacgacacttaaatatgccattaaaacgggcatcgtgtcctctaaaatcattaaactgttttttcgtctgcagtag

SEQ ID NO: 118484 - DNA, 1677 bp, synthetic construct
  misc_feature 1..1677: note = Description of Artificial Sequence: Synthetic coding sequence
  source 1..1677: mol_type = other DNA
atgtaccgctacctgggtgaagcactcctgctcagccgcgccggtcccgccgcactcggctcagctagcgccgatagcgccgcccttctgggatgggctaggggtcaaccagcagcagccccccagcccggtctggcgctggcagctagacggcattactcagaggccgtcgctgaccgcgaagatgatccaaacttctttaaaatggtggaagggtttttcgaccggggtgcatccatcgtggaggacaagctggtggaggatttaaggactagagagagcgaggagcagaagaggaaccgggtccgagggattcttcgaatcattaagccatgcaaccacgtcctttctctaagtttccccataagaagggacgacggcagttgggaagtcattgagggatacagggcccagcactcacaacataggacaccttgcaaaggcggtattcggtatagcactgatgtgagcgtcgacgaggttaaggccttagcctcattgatgacctataaatgcgctgtggtcgacgtgcctttcggaggagctaaggctggcgttaaaatcaaccctaagaactataccgacaacgagctggagaagatcactcgcaggtttacgatggagctcgcgaagaagggatttatcggcccgggcatagacgtgcccgcgcctgacatgtccactggcgaaagggaaatgtcttggatcgccgatacttacgcctctaccataggccattatgatatcaatgcgcacgcttgtgttactggaaaaccaatcagccaaggaggtattcacgggaggatcagtgccacggggcggggcgtgttccacggcatcgagaatttcatcaacgaagctagttacatgtctatcctgggcatgaccccgggattcggagacaagacttttgtcgtccaaggctttggcaatgtgggactgcacagcatgaggtatctacacagattcggcgccaagtgcatagcagttggggagagtgatgggagcatttggaaccccgacggcatcgatcccaaggagctggaagacttcaagctccagcatggatcaatcctcgggttccctaaagcaaagccctacgaagggtccatactggaagcggactgtgatattctcatacccgctgcaagcgaaaagcagctcacaaaatccaacgccccccgcgtgaaagcgaagatcatcgctgaaggagcaaatgggcctacgacacccgaagccgataagatcttcctggagagaaacatcatggtgataccggatctatacttgaacgccggcggagttaccgtgtcctattttgaatggctcaagaacctcaatcatgtgagctacgggagattgacatttaaatacgagcgagactccaattatcatcttttaatgtccgtgcaagaatccttggagcgtaaatttggtaaacacggcggcaccatccctatcgtgcccacagcagaattccaggatcggatatccggggcatctgagaaggacatcgttcactccgggttggcatacacaatggagagatccgctcggcagatcatgcgaactgctatgaaatacaacctggggcttgatttacggactgctgcctacgtgaatgccattgaaaaggtgttcaaggtgtataatgaagccggagtaacctttacatag

SEQ ID NO: 118485 - DNA, 1548 bp, synthetic construct
  misc_feature 1..1548: note = Description of Artificial Sequence: Synthetic coding sequence
  source 1..1548: mol_type = other DNA
atgtaccgatacctgggacccgggacagccagacgacgcccagccgccggagccggcatcggtaggcctgctccactgcagcgcggggggggtaggcctcgaggccggccacagctactccaggatggcggcggactgctccgctccaggagacagcacaggggaggacaggctggaggaggtcctgaggatcccggagaaagaggggccgaagccgagcccggtgcaagacacccagctgatcatcaggctctccagccctgcgctgagtcattacttccccagcactcacagcatcggaccccgtgcaagggaggcatcagatattccacagatgtgtccgtcgatgaggttaaggctttagcttccctgatgacatacaagtgcgccgtcgtcgacgtgcccttcggcggcgctaaggctggggtaaagattaatccaaaaaattacactgacaatgaacttgaaaagattacacggaggttcaccatggagttggccaagaaaggatttatcgggcccggaatcgatgtacccgcccctgacatgagcacgggggagagagagatgtcctggatcgcagacacttatgcttcaactattggacattatgacatcaatgcgcatgcctgcgtgaccggtaaacccatctcacagggcggaattcacggcaggataagtgccaccggacggggcgtttttcacggcatcgagaactttattaacgaagcatcttacatgtccatccttggaatgacacccgggttcggcgataagacgttcgtggtacagggcttcggaaacgttggcctccactctatgagatatctgcatcgcttcggagccaaatgtatcgccgttggtgagtctgacggtagcatttggaatccagacgggattgaccctaaagaactggaagactttaaattgcaacacgggtccatcttgggttttcccaaggccaagccctatgaaggaagcattctagaggcagactgcgatattttgatacccgccgcctccgaaaagcagctgacaaaatcaaatgctcctcgggtaaaggctaaaattattgccgaaggtgcaaatggccccactacaccggaggccgacaagattttcctggaacggaacattatggttatccccgacctgtatttgaatgctggcggagttacggtgtcctattttgaatggttgaagaacttaaaccacgtcagttatggacgtttaacatttaaatacgaaagagactcaaattaccacctcctaatgtccgttcaagagagccttgagaggaagttcggcaagcacggcggcacgattcctatagttcccacagccgagtttcaagaccgaatttcgggcgcttcagagaaggacatagtgcactctggactggcctacactatggagagatccgcacgccagatcatgcgtacagccatgaaatataatttgggcttggacctgcggactgccgcctacgtgaatgccattgaaaaggtctttaaagtgtataatgaggcaggtgttacttttacttag

SEQ ID NO: 118486 - DNA, 1473 bp, synthetic construct
  misc_feature 1..1473: note = Description of Artificial Sequence: Synthetic coding sequence
  source 1..1473: mol_type = other DNA
atggtggaaggatttttcgataggggggcgtcaatagtcgaggataaactggtcgaggacctgcgaactagagagtccgaggaacagaaacgaaatcgggtgagaggaatccttcgcatcatcaagccatgtaaccatgtactcagcttgagcttccccatacgccgtgacgatggctcttgggaggtcatagaagggtatagggctcagcattctcagcacaggacaccctgcaagggtggcatcagatactccacagacgtgtctgtggatgaggttaaggctcttgcttcattgatgacatacaagtgcgctgtggtcgatgtcccattcggtggggccaaggcaggcgttaaaatcaatcctaaaaactacactgataatgagttagagaagatcacaaggagattcacgatggagttggccaagaaagggtttatcggccctgggattgatgtacctgcccctgatatgagcaccggcgagagggagatgagttggatcgctgatacctatgcatcaaccataggtcactacgacatcaacgcccacgcttgtgtcacaggcaaacctattagccaaggaggtatacatggccgcattagtgccactgggagaggtgttttccatggcatcgaaaacttcatcaacgaggcatcatacatgtcgatcctcggcatgacacccggttttggcgataaaacgttcgtggtgcagggattcggtaatgtgggactgcacagcatgagatacctgcatcgtttcggggccaaatgcattgctgtgggggagtctgatggatccatctggaacccggacggcattgatccaaaggaactggaggacttcaagctccaacacggcagtattctgggttttccgaaagccaaaccctacgagggatctatcctggaagctgattgcgatatcctcatccctgctgcctcagagaaacagctgactaaaagtaatgctccccgcgtgaaggccaagataattgccgagggagctaacggacctaccactcctgaagccgataaaatattcctggagcgcaacatcatggtgattcctgatctttacttgaatgccggaggcgtcaccgtttcttatttcgaatggctaaagaatctcaatcacgtgtcctacgggcgcctgacttttaagtacgagcgggattctaattaccacctgctcatgagtgtgcaggaatctctggagcggaagtttgggaaacacggcggaactattcccattgtgcctaccgccgaattccaggataggattagcggggctagcgaaaaagacatcgtgcattccggattggcatacaccatggagaggtccgctcgacaaattatgaggaccgctatgaaatataacctcggtttggacctcaggacagctgcttacgtaaatgcaattgagaaagttttcaaggtctataacgaggctggagttacatttacctag

SEQ ID NO: 118487 - DNA, 774 bp, synthetic construct
  misc_feature 1..774: note = Description of Artificial Sequence: Synthetic coding sequence
  source 1..774: mol_type = other DNA
gaaaacttcatcgtggaaggcttcggcaacgtggggctgcacagtatgagatacttgcacaggttcggcgctaaatgcattgctgtcggcgagagtgatggctctatctggaacccagacggtattgacccgaaagagttggaagactttaagctacagcacgggtccattctgggttttcctaaggcaaaaccttatgaagggtctatcctggaagcagattgtgatattctgatcccagcagcctccgaaaagcagctgaccaagtcgaatgccccccgtgtcaaggcgaagattatcgcagaaggagccaatgggccaaccacacccgaagccgacaagattttcctggaaagaaacattatggttatccccgacctatatctgaatgcaggcggggtaaccgtgtcttacttcgagtggctgaagaacctgaaccacgtgagttatggaaggctcactttcaagtatgagcgagattctaactatcatctgctgatgagtgtccaggagtcgctcgagcgcaagttcgggaaacacggcggcacaattccaatcgtccctacagcagaattccaggacaggatatcgggcgctagtgagaaggatatcgtccactcagggctggcgtacactatggagcgttcggccaggcaaatcatgcgcacggcaatgaagtacaatcttgggctggaccttagaacagccgcttacgttaatgctatcgagaaggtcttcaaagtctataacgaagccggcgttacgtttacctag

SEQ ID NO: 118488 - DNA, 1176 bp, synthetic construct
  misc_feature 1..1176: note = Description of Artificial Sequence: Synthetic coding sequence
  source 1..1176: mol_type = other DNA
atgacgtacaagtgtgccgttgttgatgtccccttcggcggagcaaaggcaggagtgaagatcaatccgaaaaactacacagacaacgagctggaaaagatcacccgccggttcacgatggagctggcaaaaaagggattcatcgggcccgggatcgatgtacccgcaccagacatgagtacaggggaacgcgaaatgtcctggatcgccgacacatacgcttctacaatcggacactatgatattaatgcgcacgcgtgtgttacagggaagcccatctctcagggcgggatccacggacgtatctctgcgacaggaaggggcgttttccacggtattgagaactttatcaatgaagcctcctatatgagcatacttgggatgactcccgggtttggcgacaagacctttgtcgtgcaagggttcggcaacgtcggactgcattctatgcggtatctgcaccggttcggggcgaaatgtattgctgttggcgagagtgacgggagcatctggaatcccgatggcatcgatcctaaagaactggaagatttcaaactgcagcatggatccatactcggcttccctaaggcgaagccttacgaaggttcaatcctggaggctgattgtgatatactcataccagctgcgtctgagaaacagctcacgaaatccaatgcgccgcgcgtgaaggctaaaatcatagcagagggagctaacggccctactactcccgaagcagataaaattttcttggagaggaacataatggtcattcccgacctgtatctgaatgctggcggcgttaccgtttcatatttcgagtggctgaagaacctgaatcacgtgagttatgggagactaacgtttaaatatgagcgcgactcaaactatcatctgctgatgagcgtacaggagagtttggaacgcaagtttggcaaacacggtggtactattcctatagtgccaacagcggaatttcaggatcgcatttctggggccagtgagaaagacattgtgcactctggcctggcatataccatggaacgatctgctcgccagatcatgcggactgctatgaagtacaacttggggctggatctaagaacagctgcatatgtgaatgcgatcgagaaagtattcaaggtctataatgaagcgggtgtgacgtttacttag

SEQ ID NO: 118489 - DNA, 1278 bp, synthetic construct
  misc_feature 1..1278: note = Description of Artificial Sequence: Synthetic coding sequence
  source 1..1278: mol_type = other DNA
atgacatgtccctgtgataatgccagttccgttttcctcggattttgcatcagatactcgacggacgtatctgtggacgaagtaaaagcactcgcttcgctgatgacatataaatgcgccgtagttgatgtgcctttcggcggggccaaggcgggtgtgaagatcaaccccaagaattatacggacaacgaactggaaaaaatcactaggaggttcacaatggaactcgccaaaaagggtttcatcggacctggaatagatgtgcccgctcccgatatgagcactggtgaacgcgagatgtcctggatcgcagacacgtacgcctcaaccatcggtcactatgatattaatgctcacgcctgcgtcactgggaaacccatctcacaggggggcattcatgggcgtatttccgctaccgggaggggggtgttccacggcattgagaacttcattaacgaagcttcttatatgagcatcctaggaatgaccccaggctttggcgacaaaacatttgtggtccagggatttggcaatgtgggtctccattccatgcgctacttacaccgatttggagctaaatgtattgcggtgggcgaatcggatggctctatttggaacccagacggcatagaccccaaggagttggaggatttcaaactgcagcacgggtcaatattaggcttccccaaagcaaagccatacgaaggtagtatcttagaggctgattgcgatattctcattcccgccgcctctgaaaaacagttgactaaatcaaacgcaccgagagtgaaagccaaaattatcgctgagggagccaatggacccaccaccccagaagcagacaaaatcttcctagagcgcaacataatggttattccagacttatatttaaacgccgggggggtaactgtgtcatatttcgagtggctgaaaaatctgaaccacgtgtcatacggcagactcacatttaagtatgaaagggattctaattatcacctgttgatgagcgtgcaggagtccttggaacgcaagttcggtaaacacggaggcaccatccctatcgtgccgactgccgaattccaagatagaatcagcggtgccagtgaaaaggacatcgtacattcaggcttagcctacaccatggagcgttcggccaggcagatcatgaggacggctatgaagtacaacttaggattggacctgcgaactgcagcatatgtgaatgcaatcgaaaaggtgttcaaagtttacaacgaggccggtgtgactttcacatag

SEQ ID NO: 118490 - DNA, 1677 bp, synthetic construct
  misc_feature 1..1677: note = Description of Artificial Sequence: Synthetic coding sequence
  source 1..1677: mol_type = other DNA
atgtacaggtacctggcgaaagccttattacctagccgggccggaccagcagctctgggctcagctgcaaatcacagtgcggctttgttagggcggggccgcggtcaacctgccgctgcatctcaacccgggctcgcgctggcggcgaggagacactattccgagctcgttgctgatcgtgaggacgatcctaatttttttaaaatggtggaaggcttctttgacagaggcgctagcatcgtagaggataagcttgttaaggaccttcgcacgcaggaatccgaggaacagaaacgaaacagagttcgtggcatcctgcgcattattaaaccctgtaatcacgtcctgtcgctttctttccctattaggagagacgacggtagctgggaagttatcgagggctaccgggctcagcattcacaacacagaacaccgtgcaaaggcgggatacgttacagcaccgacgtgtctgtcgacgaggtgaaggcactagcctccctgatgacctataaatgcgctgttgtcgatgtaccattcgggggagccaaagcgggggttaagattaacccaaaaaactacacagagaatgagcttgagaaaattacccggcggttcactatggagctggcaaaaaaaggcttcatcggaccaggcgtcgatgtgccggcgccagatatgaataccggtgaacgcgaaatgagctggattgcagatacctacgcctcaaccatcggccactatgacatcaatgcccatgcatgcgtaacaggaaagcccattagtcaggggggcatccatggccgaattagtgcgactggccggggggttttccacgggatcgagaacttcatcaatgaggcaagttacatgagcatcctgggaatgactcccggcttcagagacaaaaccttcgtggtgcagggctttggaaatgtgggattacactccatgcgttatctacaccgctttggggccaagtgtatcgcagtgggtgagtcagatgggtccatctggaatcccgatggtattgacccaaaggagctagaagactttaagctgcagcatggtagcattttgggctttccgaaagcgaagccttacgagggcagtatcctggaggttgactgtgatattttgatccccgccgccactgaaaagcaactgaccaaatctaacgccccccgtgtcaaggccaagataattgctgagggcgctaacggtcccacaacccctgaggctgataaaatctttctggagaggaatatcttagtcatccccgatctgtacctgaatgctggaggagtcacagtgagttattttgaatggctaaaaaatctaaaccatgtgagttacggcagactgacttttaagtatgaaagagactctaactaccatctgttgctgtccgtgcaagagagtctggaaaggaaattcggtaagcacggagggaccattcccattgtcccaactgcagaattccaggatagtatttcaggtgcttctgagaaggacattgtccacagcgcgctagcatacaccatggagagaagtgctcggcagatcatgcatactgccatgaaatacaatcttggattagacctgaggaccgcagcgtacgtaaacgctattgagaaagtgttcaaagtctatagcgaagctggcgtcacatttacctag

SEQ ID NO: 118491 - DNA, 3342 bp, synthetic construct
  misc_feature 1..3342: note = Description of Artificial Sequence: Synthetic coding sequence
  source 1..3342: mol_type = other DNA
atgatcgcggtgtccttcaagtgcaggtgtcagattctgcgacgactgacaaaagatgagtctccttatacaaagagcgcgtcacagactaaacctcccgatggagccctggcagtgcgcagacagtctataccagaggagttcaagggctccactgtcgtggaactgatgaaaaaggaagggaccaccctcggcctcaccgtgagcggtggcatcgacaaggatggcaaacctcgtgtatcaaacctgcgtcagggagggattgccgctcggtccgaccagctggacgttggggactatatcaaagccgtaaacggaatcaaccttgcaaagtttagacacgacgaaatcatctccttgctgaaaaatgtgggcgagcgggtcgttctcgaggtggagtacgaactaccccccgtgagtgtccaggggtcttctgtgatcttcaggacagtagaagtcacgttacacaaggagggcaatacattcggctttgttatcagggggggcgcacatgacgataggaacaagagccggccggtcgttatcacttgtgttagaccaggaggtccagctgatcgggagggtacaattaagccgggcgatagacttctgagtgtggacggcattagattgctgggaaccacacacgctgaagcaatgagcatactgaaacagtgcggtcaagaggcggccttgctcatcgagtatgacgttagtgttatggacagcgtcgccacagctagcgggccgctcctcgtggaagtagccaaaaccccaggcgcatccctcggtgtggccttgaccacctccatgtgttgtaataagcaggttattgtcatcgacaagattaagagtgcgtctattgccgatcggtgcggtgcactgcacgtaggggatcatatcctatccattgatgggacttcaatggagtattgtaccttggccgaggctactcagtttcttgctaacacgacggatcaggttaaattggaaatcctgcctcaccatcaaacccggctggcactaaaagggcctgatcacgtcaaaatccaacggagcgatagacaactgacctgggactcttgggcttcaaaccacagctcattgcacactaaccaccattacaacacataccaccctgatcactgccgagtccctgcccttacatttccaaaagcccctccgcccaattccccaccagcactcgtgtctagttccttttcccccacatctatgagcgcatactctctatcgtccctgaacatgggaacactgcctagaagtctgtactcgacaagcccgcggggcacgatgatgcgccgccggctgaaaaagaaagattttaagagctcattaagcctggcttcatctactgtgggcctggccggccaggtcgtccacaccgaaaccacagaggttgtgctcacagccgacccagtgactggcttcggtatacaactgcagggcagtgtgttcgctacagagactctatcttcaccacctctcatcagttacatcgaggccgactctcccgccgagcggtgcggcgtcctacagatcggggatagagtcatggctattaatgggattcccacagaggattcgacctttgaagaggccagccagctgctccgcgacagttcgatcacctcaaaagtaaccctcgagattgagttcgatgtcgctgagtccgtaattccatcctctggtacctttcacgttaaactgcccaagaagcacaacgtagaattgggcatcactatttcctctcccagctctcgcaaaccaggggatccactcgtcattagcgacattaaaaaaggttccgtcgctcaccgaacagggaccctggaactgggcgataaactccttgcaattgacaatattcgactcgataactgcagtatggaggacgctgttcaaattctgcaacagtgcgaagatttggtgaagctgaagattagaaaagatgaagataacagcgatgaacaagagtcctcgggagccatcatctataccgttgaacttaagaggtatggaggcccactcggcataaccatctccgggaccgaggagcccttcgatccaatcataatctctagccttactaaaggaggactggccgaaagaactggcgccatccatataggcgatcggatccttgccatcaattctagctccctgaaagggaaacccttatccgaggctatccaccttttgcagatggctggcgagactgttaccctgaagattaaaaagcagaccgacgcccaaagcgcttcatctccaaagaagttcccaatctcttctcatttatcagacttgggcgatgtggaagaagacagctctcctgcgcagaagcccgggaaactctccgacatgtaccctagcacagttccatcagtagacagcgctgtcgactcctgggacggctctgcgattgacacaagctatgggacccaggggactagttttcaagcatccgggtataatttcaacacctacgattggagatcaccgaagcagcgaggatcgctctcaccggtgaccaagccgcgctcgcagacttaccccgacgtaggattgtcctacgaagactgggacagaagcaccgcgagcggatttgcaggagccgctgattccgctgagacagagcaagaagagaacttctggtcacaagcactcgaagaccttgaaacatgcggccaaagtggtattctgagggaactggaggctactattatgtcagggtcgacaatgagcttgaaccacgaagcgccaacgccaagaagccagctgggaaggcaggcctccttccaagaacgcagcagctcgcgcccccactacagccaaactacccgtagcaacacattacccagtgatgtggggcggaaatctgtgacgttgcgaaagatgaagcaagagatcaaggagatcatgtcaccaactccagtggagctgcataaggtgactctttataaagactcagacatggaagatttcggattttccgtcgccgacgggctgctcgaaaaaggggtctacgtgaaaaatattcgtcccgccggaccaggtgatctggggggccttaagccgtacgatcgccttctacaggtaaaccacgtacggactagggattttgattgctgtctggtagtgcccctgatagccgaatctgggaacaagctcgatttggttatctcacgcaaccctttggctagccagaaatcaattgaccagcagagccttccgggggattggtccgagcaaaactctgcattcttccagcaacccagtcatggggggaacctggaaacccgggaacccactaatacactgtag

SEQ ID NO: 118492 - DNA, 3387 bp, synthetic construct
  misc_feature 1..3387: note = Description of Artificial Sequence: Synthetic coding sequence
  source 1..3387: mol_type = other DNA
atgatcgccgtgagcttcaaatgtcgttgtcaaatactgaggcgcctgacaaaagatgagagcccctacactaagagcgcctcccaaactaagccccccgatggagccctcgcagtgcggaggcagtctataccggaggaattcaaagggagtactgtggtggagttaatgaagaaggaaggcaccacactgggcctcacggtgtctggcgggatcgacaaagacggcaagccccgcgtgagcaacctcaggcaggggggaatcgctgcacggtctgatcaacttgacgttggtgactacattaaagccgtcaatgggatcaacctggctaaatttcggcacgacgaaattatttccctgctgaagaacgtgggcgagagagtagtgctggaagtggagtatgaactgccaccagttagcgtgcaggggagtagcgttatcttccgcactgtggaggtcacacttcacaaggaaggtaatacttttggctttgtgattcgcggcggagctcacgacgaccgtaataagtcccggcctgtggtgattacctgcgtaagacctggtggtccagcggaccgcgaggggacaattaaaccgggcgataggttgctgtcagtggacggaattagactactggggacaacccatgctgaggccatgagtattctcaaacagtgtggacaggaggccgcactgctgatcgaatatgatgtgtccgtaatggactccgtagctaccgctagcggaccgctgctagtggaggtggcgaagacccccggcgcgtctttgggggtggcgttgactacctcaatgtgttgcaataagcaggtcattgtgattgataaaataaagagtgcctcgattgccgaccgatgtggcgccctacatgtcggggatcacatcctgtccatcgacggcacttctatggaatactgcactttggctgaggcaacgcagtttctagcaaatacgactgatcaggttaagctggagattctgccccatcaccagactagacttgctctcaagggtcctgatcatgttaaaatacaacgaagcgacagacaactgacatgggacagctgggcttctaaccactcatctcttcatactaatcaccattataatacgtaccatccggatcattgcagggtgcccgccttgacgttcccgaaggctccaccacctaattccccaccagctcttgtaagtagctccttttcaccgacatctatgtccgcctactctctgagttccctgaacatgggaaccctgccacgctcactttattcaaccagcccccgcggaacaatgatgcggagacgcctgaaaaaaaaggactttaaaagcagcttgtcacttgcctctagcactgtgggcctcgccgggcaagtcgtgcataccgaaactaccgaggtggttctcactgctgaccccgtcaccggatttggaattcagctccaaggaagcgtcttcgccaccgaaaccctcagcagcccccccctcatctcctacatcgaggcagacagtccagccgaacggtgtggagtcttgcagattggagaccgcgtgatggcaatcaacggtataccaacagaggacagcacatttgaggaggccagccagttgcttagagattccagcattacaagcaaagttaccctcgagatcgagtttgacgtcgcggagtcagtgatcccttcatctggcacctttcatgtaaagctgccaaaaaagcacaatgttgaactgggaattacaataagttccccgtcaagccgcaaacccggcgacccactggttatctctgacattaagaaggggtccgtagctcatagaaccggcacactggagctgggagacaagctgcttgccatcgacaatattcggcttgacaactgctctatggaagatgctgtccagatcctccaacagtgcgaggacctagttaagctcaaaattagaaaagatgaggacaactcagatgagcaggaaagtagcggagctatcatttataccgttgaactcaagagatacggtggaccactaggaatcaccatatcaggtaccgaggagccattcgacccaataattatttcttccctgacaaagggtggcctagcggaacggaccggcgccatccatattggtgatagaattctagctataaactcgtcgtcactgaaaggtaagcccctgtccgaagcgatccatctgctccagatggccggtgagaccgttaccttaaaaatcaagaagcagaccgacgcccagagtgcctcgagcccaaaaaagttccctataagttctcacctgtccgatctcggcgatgttgaagaagactcctcaccagctcagaagccaggcaagctgagcgacatgtatccatcaacagtcccctccgtggactcagctgtggacagttgggacggaagtgcaattgataccagctatggcacacagggcaccagtttccaggcttcaggatataattttaatacttacgactggcgtagtcctaagcagagaggctcactgtccccggtgacaaagccccgcagccagacttacccggatgttgggttaagttacgaggattgggaccgctcaactgcgtctggcttcgccggtgctgctgatagtgctgaaactgagcaagaggagaacttctggagccaggcactagaggaccttgaaacatgtggtcagtcggggatcctgagagagctagaagagaaggcagatagacgcgtgagcctgcgaaatatgactctgcttgctaccattatgagtggatctaccatgagcctcaatcacgaggccccgacccctagatcgcagctagggcggcaggcatcctttcaagagcgcagtagctccaggcctcactattcgcaaacgacgagatcgaacacactgcctagcgatgtcggacgtaagtccgtaaccctgaggaaaatgaaacaggagattaaggaaattatgtcccccacccctgtagaactgcacaaagtgacactttacaaggacagcgatatggaagactttggcttctccgtagcagacggactgctcgaaaaaggagtgtacgtgaaaaatattcgccctgctggccccggggacttgggagggctgaaaccctatgatcgcctgctgcaggtgaaccacgtgagaacccgagatttcgattgctgcctggttgttcccctgatcgcagagagcggaaataagttggacctggtcatcagtcgcaaccctttggcctcacagaaatcaatcgaccagcaaagtctgccaggcgactggagcgagcagaatagcgccttctttcaacagccctctcatggagggaacctggaaacacgggagcctacaaatacactttag

SEQ ID NO: 118493 - DNA, 3231 bp, synthetic construct
  misc_feature 1..3231: note = Description of Artificial Sequence: Synthetic coding sequence
  source 1..3231: mol_type = other DNA
atgatcgccgttagtttcaagtgtaggtgtcagatactcaggagactgacaaaggacgaatctccctatacgaagtccgcatctcagacgaagcctcctgatggcgccctagcagtcagacgacaatcaatacccgaagagttcaaggggtcaaccgtggtggaactaatgaaaaaagagggcaccacactcggtcttacggtgtccggaggaattgacaaagatggtaagcctcgtgtctcaaatctgagacagggcggcatcgcagcgaggtccgaccagttagacgtgggagactatatcaaagcggtcaatggtataaacttggctaagttccgtcacgacgaaatcatctctcttctgaagaacgtcggtgagagggtggtgcttgaggtcgaatatgagctgccaccagtgtctgtgcaaggaagcagcgtgatctttagaacagtggaggtgacgctgcataaagagggcaacacttttgggttcgtgattagagggggggctcatgacgaccggaataaaagtcggccagtcgtaattacatgtgtaagacccgggggcccagccgaccgggagggcactattaagcctggcgatcgcctgctatcagtggacggcatacggctgctgggaacgactcatgctgaggcaatgtctatattgaagcagtgtgggcaggaggctgccctgctgatagagtatgacgtgtcagtgatggactcagttgctaccgcctcgggacccctgctcgtagaagtggcaaagacccctggcgcctcgctcggcgtcgctttgaccacatccatgtgttgcaataaacaagtaatcgtcattgataaaatcaaatcagcatctatcgcggacagatgcggggctctgcatgtgggtgatcatatccttagtattgatggcacctcaatggagtactgtacattggccgaggcgacacagttccttgctaacacaacagatcaagtaaaacttgaaattctgcctcaccatcaaacaagacttgcactcaaaggtcctgaccatgccgcgttggtttccagcagtttttccccaacgagtatgagcgcatattcactgagctctcttaacatggggacgttgcctcgcagcctttattccacatccccaagagggaccatgatgagaagacgcctgaaaaaaaaggacttcaagtcatctctgtccctggcttccagcaccgttggcctggccggacaagtcgtccacactgaaaccaccgaagtggtactcacggctgaccccgtgaccgggttcggcatccagttgcaggggagcgtgtttgccaccgagacactgtccagccctccgctaattagttatattgaagcagactcacctgcagagagatgtggagtgttgcagattggagatcgcgtgatggcaattaacggaatccctacagaagatagtacttttgaagaagccagccagctgttgcgcgattcttccatcacttcaaaagtcactttggaaattgaatttgatgtggcggaatctgtcatcccctccagcggtacctttcatgttaagctgccaaaaaagcataatgtagagttgggtattacaatttccagtcccagtagtcggaagcccggcgatccccttgtgatctcagatattaaaaaggggagcgtggcacatcggaccgggactctcgagctgggagacaagctgcttgctatcgataacatccgtttagacaactgtagcatggaagacgcagtgcagatactgcaacagtgcgaggatctcgtcaagctcaaaatacgcaaggacgaggataactcagatgagcaggaatcttccggcgccattatctacacagtggaactgaaacgatatggcggacctttgggaataaccatttctggaacagaggaaccttttgaccccattatcatttcctcccttacgaagggaggtctggccgagcgaactggcgctatccatataggggatagaatcctcgcaattaactctagttcattgaagggtaaaccactgtccgaggccattcatctccttcagatggcgggggaaaccgtgacccttaagataaaaaagcaaacagacgcccaatccgcctcatcacccaagaagttcccaataagctctcatctgtctgatttgggagacgtggaggaggactcttcccctgcacagaagcctggtaaactgagtgacatgtatccatccactgtgccatccgtggatagcgctgtggatagctgggacggctctgccattgatacatcctatggcacgcagggaacaagtttccaagccagcgggtacaatttcaacacttacgactggcgctctccaaagcagcggggctctttaagtcctgtgacgaagccccgcagccagacttatcccgatgttgggctcagttatgaggattgggatcggagtaccgcctctgggttcgcaggggccgctgacagcgccgagaccgaacaggaagaaaacttttggagccaagccctggaagacctggagacttgtggccagagtggcattctacgagaacttgaagagaaggccgatcgtcgggttagcctgcgcaatatgaccctgctggcaaccattatgagtgggtctacgatgtctctgaaccacgaggcaccaacaccccgatctcagctgggcagacaggcgtcctttcaggagcggagcagctcaaggccacactacagccagactacacggtccaacaccctgccctcagacgtgggcaggaaaagcgtgactctgagaaaaatgaaacaggagattaaagaaatcatgagtcccaccccagtggagctccacaaagttactttgtacaaagacagcgatatggaagattttggttttagtgtagccgacggcctcctggagaagggagtgtatgtgaaaaacatccgcccagctggtcccggagatttgggcggcctgaagccctatgaccgattactgcaggtgaaccatgtgcggacccgtgattttgattgttgcttggtagttcccctgattgccgagagtggaaataaattagacctggtaatttcacgcaatcctcttgcctcgcagaaatccattgaccagcagtccctccccggggattggagcgaacagaacagcgcttttttccaacaaccctctcacggcggcaatctggaaacacgagaacccacaaatacactgtag

SEQ ID NO: 118494 - DNA, 2511 bp, synthetic construct
  misc_feature 1..2511: note = Description of Artificial Sequence: Synthetic coding sequence
  source 1..2511: mol_type = other DNA
atggtccagttctctactagtgaatttcgcctgacaccccatattgacaaccttgaggtggccaactcgtttgccgtgactaatgcattttgcagccagttcagccgaggagtttatgcgatcttcggcttctacgacaaaaagtcagtgaatactatcaccagcttttgcgggacacttcatgtatcttttatcacaccctcttttccaaccgacgggacacacccattcgtaattcagatgcgccctgacctgaaaggtgccttgctttctcttattgaatattatcagtgggataagtttgcctatctgtatgactccgatcgaggattgtctactttgcaagctgtgctagactctgcagctgagaaaaagtggcaggtaactgccatcaatgtcggtaacattaacaatgataaaaaggatgaaatgtatcgctccttatttcaggatctggaattgaagaaggagaggagggtgatactagactgtgagagggataaggtcaacgacatagtggaccaggtaattactattggaaaacacgtcaaaggctatcactatattattgcaaacctggggttcactgacggggatttgttgaagattcagttcggcggggctaacgtgtctgggttccagatagtcgactacgacgacagcctggtgtcaaaattcattgaacgctggtctacactcgaggagaaagagtacccgggagctcatacaaccacgatcaaatatactagcgctttgacatacgacgcggttcaagtcatgaccgaggcctttcgcaatctcaggaagcaaagaattgagataagccggaggggtaatgcgggcgattgtctggccaaccccgcagtcccttggggtcagggcgtggagattgaaagggccttaaagcaggttcaggttgaagggctctcagggaatatcaaattcgaccagaacggaaagcgcattaattataccatcaatatcatggagctgaagactaacggaccccggaaaattgggtactggagtgaagtcgacaagatggtggtgactctgacagaactaccctctggcaacgacacatccgggcttgagaataaaaccgtcgtcgttaccaccatactcgagagtccttatgtgatgatgaagaagaaccatgagatgctggaagggaatgagcgctacgaggggtactgcgtcgacttggctgctgagatagccaagcattgcggctttaaatacaagctcaccatcgttggagatgggaaatatggcgctagggatgccgacaccaagatctggaacggaatggtgggtgaactcgtatatggtaaggccgatatcgccatagcacccctcaccattactctggtgagagaagaagtaattgatttctccaaacctttcatgtccctgggcatttctatcatgatcaagaagccacagaaatccaaaccgggcgtgttttcgtttctggaccccctcgcgtacgagatatggatgtgcatagtgttcgcttacatcggagtgtctgtagtcttattccttgtctctcgcttcagtccctatgaatggcataccgaggagttcgaagacggccgtgaaacccagagcagtgagagcaccaatgagttcggaatctttaattccttatggttttctttaggggcattcatgcagcagggatgtgatatttcccctagatccctgtccgggaggatcgtcgggggtgtctggtggttttttactttgattattatcagctcgtacacagcgaatctggctgccttcctgaccgtggagcggatggtcagcccgatagagagcgccgaagatttatcaaagcaaacagaaattgcatatgggacccttgatagcggctcaacaaaggaattttttcgcaggagcaagatcgcggtgtttgataagatgtggacatacatgcgctccgcagagccatccgtgtttgtacgcacgaccgcagagggtgtggcacgtgtaagaaagtccaagggaaagtacgcttacctgctggagtctacaatgaacgagtatattgagcaacggaaaccgtgtgacacaatgaaagtcgggggcaatctagactctaagggctacgggattgccacacccaaaggtagctccctgcggaccccagtgaacctggccgtgctcaaattgtctgagcagggcgtgctggataagctgaaaaataaatggtggtatgacaagggtgagtgcggggccaaagattcgggcagtaaggaaaagaccagtgctctcagcctgtctaatgtcgcaggagtgttttacatattggtcggaggcctcgggctcgcgatgttagtcgctctgatagagttctgttataagagccgagctgaggccaaaagaatgaaggtagccaaaaacgctcagaacattaacccttcatcgtcacagaattcccaaaacttcgccacttataaggaagggtataacgtatacggcatcgaatcggtgaagatctag

SEQ ID NO: 118495 - DNA, 2706 bp, synthetic construct
  misc_feature 1..2706: note = Description of Artificial Sequence: Synthetic coding sequence
  source 1..2706: mol_type = other DNA
atgtcgactatgcggcttcttaccctggctctccttttctcgtgtagcgtggcccgagccgcttgcgaccccaaaatcgtgaacattggagcagttttgtccactcggaaacacgagcaaatgttcagggaggccgttaatcaagctaataagagacacgggagctggaagatccaacttaatgcaacaagcgtcactcataaacccaacgcgattcaaatggccctgagtgtctgtgaggacctgatctccagccaggtttacgccattcttgtgtctcatccccctacccccaacgatcacttcactccaacacctgtcagttatacagccgggttctatcgaatccccgtcctcggcctcacaacgagaatgagcatatacagcgataaaagcattcacctgagcttcctgcggacagttcccccttacagccaccagtcttccgtttggtttgaaatgatgagagtgtattcctggaatcatatcatactgttggttagcgacgaccacgaagggcgggcagcgcagaagagactcgagactcttctggaagagagggagtctaaagcggagaaagtgctacagtttgatcccggcacaaaaaacgtgaccgcccttttgatggaagcaaaggaactggaggctagagtgatcattctgtcggccagtgaggatgacgcagccacagtgtacagggcagcagctatgctgaatatgactggaagtggctacgtctggcttgtgggcgagcgggagatttcaggcaacgctctccgctatgcccctgatggtatcttgggtctccaactgattaatggaaagaatgagtccgctcacatatcagacgcagtgggtgtggtcgctcaggcggtgcatgaattgctagagaaagaaaacataactgatcctcctcgtggatgcgtggggaatactaatatttggaaaactggccctctgttcaagcgagtcctgatgtcatccaaatacgccgatggagtaaccggtcgggtggagttcaatgaggacggagataggaaatttgccaattacagtattatgaacttgcagaataggaaactcgtgcaggtgggcatttacaatggtacccacgtgattcccaatgacagaaagataatttggcctggaggcgagaccgaaaagccgagaggttatcagatgtcaacccgcctcaaaatcgtgaccattcatcaagaaccgttcgtgtatgtaaaaccaacgctgtccgatggcacatgtaaggaggaatttactgtgaatggggaccccgtcaagaaggtcatatgcacaggccctaatgacacctcccccgggtcaccaagacacaccgttcctcagtgctgttacggattttgtattgacctgcttattaagctggcccggactatgaactttacgtacgaagttcatttggtagcagacggtaagttcggaacccaggagcgagtgaacaattcaaataagaaggaatggaatggcatgatgggggaactgttgtccgggcaagcagacatgattgtagcgcccctcaccataaacaatgagagagcacaatatatcgaattttcaaaaccatttaagtaccaggggcttactattttggtgaaaaaagagattccgagaagcaccctggactctttcatgcagccgttccagtcgactctgtggctgctcgtcggactcagcgtccacgtggtggccgttatgctctacttgttagaccgcttctctcctttcggtcgctttaaggtgaacagtgaggaggaggaggaagacgctctaaccctgagcagtgcgatgtggttctcttggggtgtccttctgaattccgggattggtgaaggagcccctcggtctttctccgctcggatcctgggtatggtgtgggccgggtttgccatgattatagtagcatcctataccgccaatctcgccgcctttttagtcttagatcgaccggaagaaagaatcacaggaattaacgacccacgcctgagaaatcccagtgacaagtttatttacgctacagtgaagcagagctcagtggacatttactttagacgccaggtggagctttcaacaatgtaccgacatatggagaagcacaattatgaatcagccgcggaagccatccaggctgttagggataataagctgcatgcctttatctgggactccgccgtgctggaattcgaggcatcccagaaatgtgatttggtcaccacaggcgaattattcttcaggagtggattcggtatcgggatgagaaaagactccccatggaagcagaatgtgtcactaagcatcctaaaaagccatgagaatgggttcatggaagacctggacaaaacttgggtaagataccaagaatgcgattcacggtcaaatgcccctgcaacactgactttcgaaaatatggcaggcgtgtttatgctagttgctggcggaattgtggccgggatcttcctgatcttcatcgaaattgcatacaagcgccacaaggatgccagacgtaagcagatgcagctggctttcgcagctgtgaacgtctggagaaagaatttgcagagcaccggaggtggccgaggagctctgcagaatcagaaggacacagtattgccaaggcgtgcaatcgagcgcgaggagggtcagcttcagctgtgcagtcgccaccgcgaatcatag

SEQ ID NO: 118496 - DNA, 2658 bp, synthetic construct
  misc_feature 1..2658: note = Description of Artificial Sequence: Synthetic coding sequence
  source 1..2658: mol_type = other DNA
atgagcacaatgagacttctgacactggcgctcctgtttagttgtagtgtggccagagccgcttgtgatccaaagatcgttaacattggtgcggtcttgagcacacgaaagcatgaacagatgttccgggaggctgtgaaccaggccaataaacgccacggcagttggaagattcagctcaatgctacctctgtaacccataagcccaatgcaattcagatggctttatccgtctgcgaagatctcattagttcacaagtgtatgcgattctagtgagccatcctcccactccgaatgaccattttacccctactcccgtgagttacacagccggattctaccgcatcccagtactcggactgacaacccggatgtctatctattccgacaagtccattcacttatccttcctgcgaacggtccccccgtacagtcaccagtcttctgtatggtttgagatgatgagagtgtattcttggaatcacattattttgcttgtgagcgacgatcatgaaggtagagcagcccaaaaacgcctcgagactctgctcgaggaacgtgagtcgaaggccgaaaaggttcttcagttcgaccctgggacgaagaacgtgacagcgctcctgatggaagccaaagaacttgaggcacgcgtgatcatcctgtcggcctccgaggacgatgccgccactgtctacagagctgctgcaatgctcaacatgaccggcagcggctacgtgtggttggtcggcgagagggaaatttcagggaatgcattacgttacgcacccgatggtatccttggattgcaacttatcaacggcaaaaatgaaagtgcacatatttctgacgcagtgggcgtggtcgcccaggctgtccatgagctgttggaaaaagagaatattaccgacccaccccgggggtgcgtcgggaataccaatatttggaagactggaccgctgtttaaaagagtgctgatgagctcaaaatatgctgacggcgtgaccgggcgcgtggaattcaatgaagacggcgaccgcaagtttgctaactattccattatgaacctacagaaccgcaagcttgtccaagtcgggatctataacggcacccacgttatcccgaacgaccgcaagatcatttggcccggaggagagaccgagaagcccaggggttatcagatgtccaccagactcaagatagtgactatccatcaggaacccttcgtgtacgtgaaaccgacactttccgacggtacctgcaaggaggaatttactgtgaacggcgatccggttaagaaggtcatctgcactgggccgaatgatacaagccccggatccccacgtcatactgtccctcagtgttgttacggcttttgcattgatttgcttatcaagttggcaagaacaatgaattttacatatgaagtacatctggtcgccgatggaaagtttggcacacaggaacgggtgaataattccaacaagaaggaatggaacggaatgatgggagagttactttccggacaggcagatatgatcgtagctccattgaccataaacaatgagagggcccaatatatcgaattttccaaacctttcaagtaccaagggctgaccatattggtgaagaaggagatcccccgctccactttagacagctttatgcagcccttccagtccactctctggcttctcgtgggcctgagcgtgcatgtggttgcagtgatgctgtatctgttggaccgatttagtcccttcggaagattcaaggtgaattccgaagaggaggaggaagatgcactaactctaagcagcgcaatgtggttttcgtggggcgtactccttaacagtggtatcggggagggtgccccaagatctttcagcgcaaggattctgggaatggtgtgggcaggatttgctatgattatcgtggcctcttacacagcaaacctggcggcgtttctggtgctggatcggccagaggagagaatcacgggaatcaacgacccacgattaaggaacccctccgataagttcatctacgctactgttaagcagtcttcagttgatatttatttccgccgacaggtcgagctatcaacgatgtaccgtcatatggagaaacataactacgagtcagccgccgaagctatacaagctgtgagagataacaagctccatgctttcatctgggactccgcagtgctggagttcgaagcgagtcagaaatgtgacctggtgaccacaggtgagctgttctttagaagtggatttggcataggcatgcgtaaggatagcccatggaaacagaatgttagcctctccatcctcaagtctcacgagaacggctttatggaagacctcgacaagacctgggttaggtaccaggagtgcgacagtcggtccaacgctccagctacattgacatttgaaaacatggctggggtcttcatgttggtggctgggggaatcgtggccggaatcttcttgatatttattgaaatcgcatataaacggcacaaagatgctcggcggaaacagatgcagcttgctttcgccgccgttaatgtgtggaggaaaaacttacagcagtaccacccgaccgatatcaccgggcccctgaacttaagtgatccctccgtttccacagtggtgtag

SEQ ID NO: 118497 - DNA, 2769 bp, synthetic construct
  misc_feature 1..2769: note = Description of Artificial Sequence: Synthetic coding sequence
  source 1..2769: mol_type = other DNA
atggtccagctgcgaaagttactgagggtcctgaccctgatgaaatttccttgctgcgttttggaagtgctgttgtgtgctctagccgccgccgcaagaggccaagaaatgtacgctcctcactccatcagaatcgagggagatgtgacactcggcggactgtttccagtccatgcaaagggcccttcgggggttccttgtggtgacattaaacgtgagaacgggattcaccgtctggaggctatgctgtacgctctcgaccagataaactccgaccctaatctgttacccaatgtcacactcggcgcccgaattctggacacatgcagcagggatacctatgcattggaacagtcactgacctttgtccaggccctgattcagaaggacacgagcgatgtgcggtgtacaaatggtgaacctccggttttcgtcaagccagagaaagtcgtgggagtgatcggcgcctcgggttctagtgtgagcatcatggtcgcaaatattctgagactgtttcaaatcccgcaaatttcgtacgccagtactgcccccgagctcagcgacgatagacgttacgattttttttcaagagtggttccaccggattcctttcaggctcaagccatggtcgatatcgttaaagccctgggctggaactacgttagtacccttgcttcggagggcagctacggcgagaaaggggtggagagctttacacaaatttcaaaggaggcagggggactctgcattgctcagagtgtccggattccgcaggagcgcaaggaccgaacaatcgatttcgatagaatcattaagcagctcttggatacccccaactcgcgggccgtagtcatcttcgctaacgacgaggacataaaacagattctcgcagctgccaaacgagcagatcaggtgggacacttcctgtgggtgggctccgactcatgggggtcaaagattaaccccttgcaccaacacgaggacatcgcggagggcgctatcacaattcagccaaaacgggcaacagttgagggctttgatgcatattttacctcaagaacattagagaacaatagacggaatgtgtggtttgctgagtactgggaagaaaactttaattgtaaactcacaatctcaggcagcaagaaggaagacaccgataggaaatgcaccgggcaagaaagaataggcaaggatagcaactacgagcaggaggggaaggtacagttcgtgatcgatgctgtctacgccatggcccatgcccttcatcatatgaataaagatctgtgtgcagactatcgcggggtctgcccggagatggaacaggccggcgggaagaagcttttaaaatacatccgtaatgtgaatttcaacggatcggccgggacccctgtgatgttcaacaagaatggcgacgctccggggaggtacgacatatttcaatatcagaccactaatacttcaaaccctggctaccgtctcatcgggcagtggactgacgaactgcagttaaatattgaagacatgcagtgggggaaaggggtacgcgaaattccagcctccgtgtgcacactaccatgtaaacccggacagaggaaaaagacccaaaagggaacaccatgttgctggacctgtgagccttgtgacgggtaccagtaccagttcgatgaaatgacgtgtcaacactgcccatacgatcagcgccctaatgagaatcgcacaggctgtcaggatattccgattatcaagctggaatggcatagcccgtgggccgtgatccccgtcttcctggctatgctaggaattatcgcaaccatcttcgtcatggcaactttcattcgatacaatgacacacccatcgtgagagcctcaggtcgtgaattatcatatgtgcttctgaccggtatctttctttgttacattatcacttttctgatgatcgcgaagcctgatgtggccgtatgctcttttcgccgggtctttttgggcctgggcatgtgtatttcatatgcagccctgcttaccaaaaccaaccgcatttacaggattttcgagcaaggtaagaaatccgtcacggctcccagattgattagtccgacaagccagctggccatcacatcctcccttatctccgtacaattgctgggcgtgtttatatggtttggggtggatccccctaacatcatcattgattacgacgagcataagactatgaatcccgagcaagcaaggggtgtgctgaagtgcgatatcacagacctccagattatctgctcccttgggtattccatactcctcatggttacatgtaccgtttacgctataaagaccaggggtgttccagagaatttcaatgaagcgaaaccaattggattcaccatgtacaccacttgtatcgtttggctggctttcatccccatctttttcggtactgcccagagtgccgagaaattgtatatccaaacaactactctgaccataagtatgaatctttctgcttccgttgccttaggtatgctctacatgccaaaagtctacatcattatctttcatccagaattgaacgtgcaaaagcgtaaacgctcctttaaggcagtggttaccgccgcgacgatgagctctcgcctcagccacaagccttcggacagacccaacggcgaggcgaagaccgagctctgtgagaatgtagatcccaataactgcattcctcccgtgaggaagtcagtgcaaaaatcagtcacctggtatactattcctccaactgtttag

SEQ ID NO: 118498 - DNA, 2685 bp, synthetic construct
  misc_feature 1..2685: note = Description of Artificial Sequence: Synthetic coding sequence
  source 1..2685: mol_type = other DNA
atggccaggcaaaaaaagatgggtcaatctgtgctgcgggctgtattctttctcgtgttgggtctgctgggccattcccatggggggtttccgaacactattagcattgggggcctgtttatgagaaatacagtccaggagcattctgccttcaggtttgcagtacagctgtacaatacaaatcagaacactaccgagaaacccttccacctgaactaccacgttgaccacctggacagctctaactcctttagtgtcactaacgccttctgttcccagttctcaagaggagtctacgccatcttcggtttctatgaccagatgagcatgaatacgcttacaagcttctgcggggcactccatacgagttttgttactcctagcttcccaaccgacgccgacgtgcagtttgtgatccaaatgcgtcccgccctaaaaggagccatcctatcacttctcgggcattacaagtgggaaaagtttgtatatttatacgatacggagagagggttcagcattctgcaggcgatcatggaggccgccgtccagaacaactggcaggttaccgccagatccgtgggcaatataaaggacgtgcaggagtttagacgaattatcgaggaaatggaccgcaggcaggagaagagatacctgatcgactgtgaggtggagcgcatcaacaccatcctggagcaggtcgtgattctgggcaagcattcccggggataccactatatgctggcgaatctcggatttacagatattctgctcgagagggtgatgcatggcggcgctaacatcacgggatttcagattgtaaacaacgaaaatcccatggtgcagcagttcattcagcggtgggtacgtctggatgagcgagagtttccagaagccaagaatgctcccctgaaatacacctcagctctcacgcatgacgctatcctggtgatagctgaggcattcaggtacctacgacgacaacgagtagacgtctcccggcgagggagcgctggagactgccttgcaaaccctgcagtgccctggtcacagggaattgacatcgagcgcgccctcaagatggtgcaggtgcagggaatgaccggcaatattcagtttgacacctacggtcggcgcactaattacactattgatgtctacgagatgaaggtgagcggaagccgcaaagctggttattggaatgagtatgaacggtttgtgcctttctcagaccagcagatctctaacgactccgcctcatctgaaaaccggactatcgtggtaaccacgattctggaaagcccgtacgtgatgtacaagaagaaccatgagcaacttgaggggaatgaacgctacgagggatattgtgtagacttggcctacgaaattgctaagcatgttcgtataaagtataaattgtctattgttggagacggtaaatatggggccagggaccctgaaaccaagatctggaacggaatggtgggcgaactcgtgtacgggcgcgcagacatcgccgtcgcacctctgacgatcaccttagtgcgggaagaggttatcgacttctcaaagccttttatgtctctcggaatcagcattatgatcaagaagccacagaaatccaaaccaggtgtcttcagttttctggaccccctcgcctacgagatctggatgtgtatagttttcgcttatatcggggtctcagtagtgctgttcttagtgagccggtttagtccctatgagtggcacctggaggacaataacgaggaaccccgggatccacaatcacctcctgaccctcccaatgagtttggaatttttaacagtttgtggttctctcttggtgccttcatgcagcagggatgtgacatcagccctaggtcactgagcggacggatcgtgggaggcgtttggtggtttttcacattaataataattagcagctacacagccaatttggccgcattcttgaccgtcgagcgaatggtgtctcccatcgagagtgctgaggacttagctaagcagacagaaatcgcatacgggacactagactccgggagtactaaagagttttttcggcgctcaaagattgctgtctacgagaaaatgtggtcctacatgaagagcgcggagccatcggtgtttaccaaaaccacggccgacggggtcgccagggtacggaagagtaaggggaaattcgcgtttctgctcgagagtactatgaacgagtacatcgagcaaaggaagccctgtgacaccatgaaggtgggaggcaacctcgactccaaagggtacggtgtggctaccccgaagggctctgctctccggaacgccgttaacctggctgtcctgaagctgaacgaacagggactgttagacaaacttaagaacaaatggtggtacgataaaggagaatgtgggtcggggggcggagacagtaaagacaagacatccgcacttagcctgagtaatgttgctggggtgttttatatcctcgtcggcggcctcggtctagccatgatggtcgctctgattgagttttgttacaaatcaagagcagaatccaaacgaatgaaattgacaaaaaacacccagaatttcaagccagccccagcaaccaatacacagaattacgctacctaccgggaggggtacaatgtgtacggaaccgagtctgttaaaatttag

SEQ ID NO: 118499 - DNA, 432 bp, synthetic construct
  misc_feature 1..432: note = Description of Artificial Sequence: Synthetic coding sequence
  source 1..432: mol_type = other DNA
atggcccgacagaagaaaatgggccagagcgtgctgcgagctgtcttttttctagtcttggggttactaggacacagccatggagggttccctaacacaatttccattggcgggctatttatgaggaatacggtccaggaacactcagccttcagattcgccgtgcaactgtacaataccaaccagaatacaacagagaaaccatttcacctcaattaccatgtggatcatctggacagcagtaatagcttcagcgtgaccaacgcctgccctgccgagcgcgactacctaccatggcctgggtccattagagaaaacaattggactgcgctgccctgctgcaaggaccatggattactccaccttaaatgcagtcccggcggcaggcagaattgggcctattgcatctggggagtcaccggcgagctttag

SEQ ID NO: 118500 - DNA, 2685 bp, synthetic construct
  misc_feature 1..2685: note = Description of Artificial Sequence: Synthetic coding sequence
  source 1..2685: mol_type = other DNA
atggcaagacagaaaaagatggggcagagcgttctccgcgcagtcttctttttagtgcttggtcttctcggacactcgcatggcggctttccaaatacaatcagcatcgggggtctgtttatgagaaatactgtccaggagcacagtgcatttagattcgcagtacagttgtataataccaaccagaatacgacggaaaaaccattccaccttaactatcatgtcgaccacctggacagctcaaattctttctctgtcacaaacgctttttgctctcagttcagcaggggggtatacgcgatttttggattctacgaccagatgtccatgaacacacttacgtcattttgtggagcgctccacacgtcattcgttactccctccttccctacagacgccgatgtgcagtttgttatccaaatgcgacctgcactcaagggggcaatcctgtccctgcttggccattacaagtgggaaaagtttgtgtatctgtatgatacagaaagaggctttagcattctccaggcaataatggaagccgctgtacagaacaattggcaggtgaccgcccggtccgtgggcaacatcaaagacgtccaggaattccgcagaattattgaggagatggaccgaagacaggagaagaggtatcttatagattgcgaagtcgaaagaataaatacaatactggagcaggttgttatactaggcaaacactctagggggtatcactacatgcttgccaacctcggatttacagacatcttactggaacgggtgatgcatggaggcgcaaatataactggtttccagatcgtcaataatgaaaaccccatggttcaacaatttattcaacggtgggtgaggctggatgagcgcgaatttcccgaagcaaaaaatgctcccctgaagtatactagcgctcttacgcacgacgccatactggttattgccgaggcctttagatatctgcggaggcagagggtcgatgtatccaggcgcggcagcgccggggactgcctggctaaccccgctgtaccctggtcccagggcattgacatcgaaagggccttaaagatggtacaggtccaggggatgacagggaatatccagttcgatacttacggccgcaggaccaactacactatagatgtttacgagatgaaagtcagcggatcccggaaggctggctattggaatgaatacgaaagatttgtcccctttagcgaccagcagatctccaatgatagcgcaagtagcgagaatagaacgatcgttgtaacgactatactggagtcaccatacgtaatgtacaagaagaaccacgaacaattggaagggaacgagcgttatgagggatactgtgtcgatttggcatacgagatcgccaagcacgtcagaatcaagtacaaactgtcgattgtcggcgatgggaagtacggggcccgtgaccctgaaaccaagatctggaacgggatggtcggggagctcgtgtacggtcgcgccgacatcgctgttgcgccccttaccatcaccctcgtgagggaagaggtaattgacttctctaaacctttcatgtctttagggatctccattatgattaaaaaacctcagaaatcaaagcctggcgtgttctccttcttggatcctctagcctatgagatctggatgtgcattgtgttcgcctatattggcgttagtgttgttttgttcctggtgagtcgattctctccctacgagtggcacctggaggataataatgaggagccgagagacccccagtcgccacccgatcctccaaacgaatttggcatttttaactctttatggttcagtctcggcgctttcatgcagcagggctgcgacatctcccctcggagcctctctggacgcatagttggaggcgtttggtggttcttcacattgatcattatttcctcttacacagccaatttggctgccttcctgaccgtggagcggatggtgtcccctatcgagtcagcggaagaccttgccaagcagactgagatcgcatatggcactctcgattccgggagcaccaaagagttcttccggcggagtaaaatagccgtttatgagaaaatgtggagttatatgaaatccgccgagccatctgttttcacaaagaccaccgcggatggagtggcaagagtgaggaagtccaaaggaaagtttgcttttttactggagtctacgatgaatgagtacatagagcagcggaaaccctgcgataccatgaaggtgggaggtaacctggattctaagggctatggtgtggctacacctaaaggtagtgcactgagaaatgccgtgaatcttgccgtattgaaactcaatgagcaggggttgctggataagttaaaaaacaagtggtggtacgacaaaggcgagtgcgggtccggcggaggcgactcaaaggacaaaacatccgccttgtctctgtccaacgtggccggcgtgttttacatcttggtagggggcctcggcttggcaatgatggtggcattgatcgaattctgctataagtctcgagccgaatccaagcgcatgaagctgactaagaacacacagaattttaaaccagcgcccgctacaaacactcaaaactacgctacttaccgcgaagggtacaacgtatacggaactgagtctgtgaaaatatag

SEQ ID NO: 118501 - DNA, 2685 bp, synthetic construct
  misc_feature 1..2685: note = Description of Artificial Sequence: Synthetic coding sequence
  source 1..2685: mol_type = other DNA
atggccagacagaagaagatgggtcagtccgttttgagggcagtattttttttagtattaggcctcttgggccacagtcacggaggctttccaaacactatatctattggaggcctgttcatgaggaacactgtacaggagcactctgcttttcgattcgccgtacagctctacaataccaaccagaatactaccgagaaaccattccacctgaactaccacgtcgatcatcttgattcatccaattctttttcagtgaccaacgctttttgtagccagttcagcaggggcgtttacgcaatcttcgggttttatgatcagatgtccatgaataccctgacaagcttctgcggcgctctgcacacgtccttcgtcactccttccttccctactgatgcggatgttcagtttgttatacaaatgagacctgccctcaaaggcgccattctctctcttctgggacattacaagtgggaaaagttcgtgtacctgtacgatacggagagaggattcagcattctgcaggcgattatggaggccgccgtgcagaataactggcaagtcacggcccgaagtgttgggaatatcaaggacgtgcaggaatttcgacggatcattgaggaaatggacagaagacaggagaaaaggtaccttatcgattgtgaggtggaacgcataaacacgatcctggaacaagtggtgatcctgggaaagcattccagaggataccattatatgttagctaatctgggcttcaccgatatccttttggagcgggtaatgcatgggggcgctaatatcacgggatttcaaatagtgaacaacgaaaaccctatggtgcagcagtttattcagagatgggttaggttagatgaacgggagtttcccgaagccaagaatgctccactgaaatatacttcagccctgacgcatgatgctatcctagtgattgccgaagcttttcggtacctacgccgtcagagagtggacgtaagcaggcgcggaagcgccggtgattgcctggccaaccccgctgtgccttggtcccaggggattgacatcgaacgggctctgaaaatggtacaggtgcagggtatgaccgggaatatccaattcgacacatacggtcgtaggactaattacacaattgacgtgtatgaaatgaaagtgtcgggctccagaaaggcaggttattggaacgagtatgagcggttcgtgccattttcagatcagcagatcagtaatgactcagcttcctccgagaataggaccatcgtggttactactatcttggagagtccctacgtaatgtacaaaaagaatcacgaacagctggagggcaacgagagatacgaaggctattgtgtagaccttgcatacgaaattgctaaacatgttcgtattaaatacaagttgtctatagtcggtgacggcaagtatggagccagggatccggagacaaaaatctggaacgggatggtgggagaactggtatacggaagagccgacattgctgtggccccactgacaatcactctcgtgagggaagaagtgatcgatttctcaaagcctttcatgtcgttgggaatatccatcatgattaaaaagccacaaaagagcaagcccggagtattcagtttccttgaccctctcgcatacgagatttggatgtgcatcgtgtttgcatacatcggcgtgtccgtggtcctgtttctggtgtcaagatttagcccctacgagtggcatttggaagacaataacgaagaaccacgcgaccctcagtctccaccagaccccccgaatgagtttgggatctttaactccttgtggttttccttaggagcattcatgcagcaggggtgtgatatctccccacgctctctctccggccgcatcgtggggggcgtttggtggttcttcaccctgattatcattagctcctacactgctaacctagctgccttcttaactgtcgagcgaatggtttctccaattgaatctgccgaagatcttgccaaacagaccgagatcgcctatggaaccttggacagcggatcaaccaaagaattttttcgcagaagtaaaattgccgtttatgaaaagatgtggagctacatgaagtcggctgagcccagtgtgtttacaaaaaccacagcagatggcgtcgcacgggtgaggaaatccaaagggaagtttgcttttctgctcgaatcaaccatgaatgaatatattgagcagaggaaaccctgcgatactatgaaggtgggagggaatctcgatagcaagggctatggcgtagctactccaaagggatccgcactcaggacacccgtgaaccttgctgtgctgaaactgtctgagcagggaattcttgacaagcttaaaaacaagtggtggtatgacaaaggggagtgcggagctaaggattcaggttccaaggataagacgtccgctctttcactatccaatgttgcgggggtattttatattctcgttggcggcttggggctggccatgatggtagcgctgattgagttttgttacaaaagtagggccgagagcaaaagaatgaaattgacaaagaacacccaaaattttaaaccagcccccgccactaatacacagaactatgcaacttatagggaggggtataatgtgtacggaacagaatccgtgaagatctag

SEQ ID NO: 118502 - DNA, 495 bp, synthetic construct
  misc_feature 1..495: note = Description of Artificial Sequence: Synthetic coding sequence
  source 1..495: mol_type = other DNA
atggcccgacagaagaaaatggggcagtctgtgctccgcgccgttttttttctggtattggggctcttggggcactcccatggaggattccccaacactataagtatcggcgggctatttatgagaaataccgttcaggagcattctgcctttaggtttgccgttcagctctataacactaatcaaaacaccacagagaagcctttccacctgaattaccatgtcgaccacctggacagctccaactccttctcagttaccaacgcgtgccctgccgagagagattacctgccctggcctggcagcattagggaaaacaattggacagccctcccttgttgcaaggaccacggtttactgcacctaaagtgttctccgggagggccggctaagaccggacccatagtctccggggcactgcaagtgaattgtaagatgagaacacggtcccaagtttctacaacttcctcgttactggagtttagtacggagtag

SEQ ID NO: 118503 - DNA, 495 bp, synthetic construct
  misc_feature 1..495: note = Description of Artificial Sequence: Synthetic coding sequence
  source 1..495: mol_type = other DNA
atggctaggcaaaaaaagatgggccagagcgtgctgagggcagtcttcttcctggtcctgggcctcttgggccactcacacggagggtttccgaataccattagtatcggcggcctgtttatgaggaatacagtccaggagcatagcgcttttagattcgctgttcagttgtataatacaaaccagaacacgacagagaagcccttccacttgaattatcacgtagatcatcttgatagttctaattcctttagcgtgactaatgcctgtccagccgagcgcgattacctgccatggcccggatctattcgcgagaataactggacggcccttccctgttgtaaggaccatggactgctccacttgaaatgtagcccgggcggtccagccaaaaccggtccgattgtgtcaggagctctgcaggtgaattgtaaaatgagaacacgttcacaggtgagtaccacctcatccttactggaattctctactgagtag

SEQ ID NO: 118504 - DNA, 1989 bp, synthetic construct
  misc_feature 1..1989: note = Description of Artificial Sequence: Synthetic coding sequence
  source 1..1989: mol_type = other DNA
atgctgcagggaggcgaggaatccagacttttcgggtctctgctttggactctgccatggcgagggcttttcatgcgaaacaccgtacaggaacacagtgctttccgcttcgccgtgcagctgtacaatacaaaccagaacactaccgagaaacctttccacttgaactatcacgtggatcatttagactctagcaactcgttcagtgtgacaaacgcgttctgcagccagttctcccggggagtgtacgccatttttggcttttacgatcaaatgtctatgaatacgttaacaagcttttgcggtgctctccatacctcattcgtcacgcctagctttccaactgatgctgacgtgcagttcgtcatacagatgaggcccgcgctgaagggcgctattctcagcctcctgggtcactacaagtgggagaagtttgtatacctctatgataccgagagaggtttcagcattctccaagccattatggaggccgccgtgcagaataactggcaagtgactgctagaagcgttggtaacatcaaagacgttcaggagttccgccgcatcattgaggagatggataggagacaagaaaaaaggtacctcattgattgcgaagtggaacggattaatactatcctggagcaggtggtgatactgggcaaacactcacgaggatatcactatatgttggcaaatctgggatttactgatatattacttgagcgcgtgatgcacggcggcgcaaatattacaggattccagatagtgaataacgaaaacccgatggtacaacagtttattcagcgctgggtccgactcgatgaacgagaattccccgaggcaaagaacgcgcccctgaaatatacgagtgccctgacacatgacgcaattcttgtgattgccgaagcttttagatacttgagacgccagcgcgttgacgtatcccgacggggctccgccggtgactgtctggccaacccggccgtcccttggagccagggcattgatattgaacgggccttgaagatggttcaggttcagggcatgactggtaatatccagtttgacacatacggtcgccgcactaattacacaatcgacgtgtatgagatgaaggtgtccggttcacggaaagctggatattggaacgaatacgagcgatttgtgccattttccgaccagcagatctccaatgattctgcctcctctgaaaaccggactatcgtggtgacgactattttggagtctccttatgtgatgtataaaaaaaaccacgaacagctcgaagggaatgaaaggtatgagggctactgtgtggacctggcatatgagatcgcgaagcacgtgcgcataaaatacaagttgtccattgtgggtgatggaaaatacggcgctagagacccagagaccaaaatttggaatggaatggtcggcgaattggtgtacggtcgagctgatatagccgtcgcccccttgacaattacactcgtgcgagaggaggttatcgatttctctaagccattcatgtcattgggcatttcaattatgataaagaaaccccagaagtccaagcctggtgttttttcatttcttgatcccctcgcctatgaaatctggatgtgtatcgtctttgcatacatcggagtatccgtcgtgcttttcctggtctctaggttcagcccttatgaatggcatttggaagataacaatgaggagcccagggaccctcagagcccaccagacccccctaacgagttcgggatcttcaactccctttggttctcccttggcgccttcatgcaacaaggatgcgacatctcgccaaggtttgtttttgtcgcatattcaatgccccattgcatactttggtcgtactccatacacgtacatatggtgtttatccatcttaactctagattcttctcctttaacatcccttccaacgatcgtcttagctctagccattgcgtgtgtttgtgcccatag

SEQ ID NO: 118505 - DNA, 2475 bp, synthetic construct
  misc_feature 1..2475: note = Description of Artificial Sequence: Synthetic coding sequence
  source 1..2475: mol_type = other DNA
atggcccggcagaagaaaatggggcaaagcgtgctgcgtgccgttttttttctagttctaggactgcttggccatagccatggcggatttcctaatacgattagtatcggtgggctattcatgaggaatactgtgcaggaacatagcgctttccggttcgctgttcagctgtataacacaaaccagaataccactgaaaaaccttttcatctcaactaccatgtcgaccacctggactcaagcaattcattctccgtgaccaacgccttctgttctcaatttagcagaggcgtctatgctatttttgggttctatgatcaaatgtccatgaacacactgaccagcttctgtggagctctccacacaagttttgtaacaccatctttccctacagacgccgatgtccagttcgtgattcaaatgagacccgcgctcaagggggctatcctatcgctcttaggacactataagtgggagaagttcgtttacctatatgacaccgagcgcggattttcaattctgcaggccatcatggaggccgccgtccagaacaactggcaggtgactgcgcggtccgttgggaatataaaagacgtgcaggaattccgacgcattattgaagagatggaccgccgtcaggagaagcgttacctgatcgactgtgaagttgaaagaattaatactatactggagcaggttgtcatcctcggcaagcattcacggggataccattatatgctcgctaaccttggattcacagatatcttactggagagagtgatgcatggtggcgcaaatattaccggcttccagattgtcaataatgaaaatcctatggtgcagcagttcatccaacggtgggtgcgactcgatgagcgcgagttccccgaagccaaaaacgctcccctgaaatacactagcgccttgacacatgatgcgatattggtgattgctgaggcatttcgatatctgagacgacagcgggtcgacgtgtcacgtcggggctctgcaggagactgtctggctaatccggctgtcccctggtcccagggaatcgacatcgagagagccctgaaaatggtgcaggtgcaagggatgaccggcaacatacagttcgacacatacgggcgccgaactaactacacaatcgatgtatatgaaatgaaagtaagcggctcacggaaagctggatactggaatgaatatgaaaggtttgtaccgtttagtgaccagcaaatctcaaatgatagcgcttcaagcgaaaatcggactattgtggtcacaactatcttggagtccccttacgtgatgtacaagaagaaccatgagcagctcgaggggaatgaacggtacgaagggtactgtgtcgacctggcttatgagatcgctaaacatgtgagaataaagtataagctgtccatcgtcggagatggcaagtatggcgcccgggacccagagaccaagatttggaacggcatggtaggcgagcttgtatatggaagagcagacatcgccgtcgcaccacttacaatcacactggtccgggaagaggtgattgacttttcgaagccttttatgtccttgggaatcagtattatgatcaaaaagccccagaagagcaagcctggagtcttctcctttcttgacccactggcgtacgagatctggatgtgcatagtcttcgcctacattggcgttagcgtggtactgtttttggtaagcaggttcagtccttatgagtggcacctggaggacaataatgaggaacctagagacccacagtcaccacccgaccctcccaacgagtttggaatctttaattccctttggttctccttaggcgcgttcatgcaacaaggttgcgatatatcgcctcgctcacttagtgggcggatcgttggcggcgtttggtggttcttcacactcatcattatttcgtcctacaccgcaaacctggccgcttttttgacagtggagcggatggtctcccccattgaaagcgctgaagatttggctaagcagacagagattgcctatgggactcttgattctgggtccactaaggagttcttccgacgatctaaaatcgccgtgtatgagaagatgtggtcctacatgaaatctgcagagcccagtgtgttcacaaagactactgccgacggcgtggcccgagttcgtaagagtaagggaaagttcgcatttcttctggaatctaccatgaatgaatacatcgagcaacggaaaccatgtgatacgatgaaggtgggcggcaatctggacagtaagggctatggcgttgccactcctaagggctccgccttgcggaacgctgttaacctagcggtgttaaaactgaacgagcaggggttgctcgacaaactcaagaacaagtggtggtatgacaaaggagagtgtggaagtgggggcggtgatagcaagaacgcctgcaagccttgctcgattgaaactcagtag

SEQ ID NO: 118506 - DNA, 2709 bp, synthetic construct
  misc_feature 1..2709: note = Description of Artificial Sequence: Synthetic coding sequence
  source 1..2709: mol_type = other DNA
atgcgcatcattagtcggcaaatcgtgttgctcttctcaggattttgggggctcgctatgggcgctttcccatccagtgttcaaatcggcggcctgttcatacggaatacagatcaggaatatactgcgtttaggttggccatatttctgcacaacacatctcccaacgcctctgaggcgcctttcaatctggtgccacacgtggataacatcgaaactgcgaattccttcgctgtaactaacgccttttgtagtcagtattctcgaggggtgtttgccatctttggactgtatgacaaacggtccgtccacactctgacgtcattttgtagcgccctgcatattagcctgataacgccctccttccctacagaaggggaatcgcagttcgtgctgcaactaagacccagcctcaggggtgctctgctcagcctgttagatcactacgagtggaactgtttcgtcttcctttacgacacagatcgagggtattctatccttcaggccatcatggaaaaagccggccagaatgggtggcacgtgtctgcaatctgtgtagaaaattttaacgacgtatcctatcggcagctcttagaagagctcgacagaagacaggaaaaaaagtttgtgattgactgcgagattgagaggcttcagaacattctcgagcagattgtgtccgtcggcaagcacgtgaagggttatcactatataatcgcaaacctcggtttcaaggacatctctttagaacggttcatccatggcggcgctaacgttactggatttcagcttgttgacttcaatacacccatggttattaaactgatggacagatggaaaaaacttgatcagagagagtacccagggtcagaaacacccccgaagtacacgtccgccctcacatacgatggggtgttggtcatggcggaaacattcagaagccttcggagacagaaaattgacatttctcgtaggggcaatgccggtgattgcttggcgaatcccgcagctccttggggtcaaggaattgacatggagagaactttaaaacaggtcagaattcaagggttaaccggcaacgtgcagttcgatcactacggtcgccgggttaactataccatggacgtgttcgaactgaagtctacaggcccccgaaaagtgggctactggaatgacatggacaaacttgttttgatccaggacgtccccaccctgggtaacgacactgcagctatcgagaacagaaccgtcgtggtcaccacaattatggaatccccgtacgtcatgtataagaagaatcacgaaatgtttgagggcaatgacaagtacgaaggctactgtgtggacctggcttcagaaattgccaagcacataggtattaaatacaaaatagccatcgtccctgacggtaaatacggcgcaagggatgccgataccaaaatttggaatggcatggttggggagctggtctatgggaaagctgaaattgctattgcgcctctgaccattacattggtgagggaagaagtcatcgacttttctaaaccatttatgagcctggggatctctattatgattaaaaagccacaaaagagcaagcctggtgtgttcagcttcctcgacccactggcctatgaaatttggatgtgtattgtctttgcgtacatcggagtctcggtcgttttattcctggtgtctcggttctccccgtacgagtggcacacagaagagcccgaggacggtaaggaggggccatccgatcaacctcccaacgagttcggtatctttaactctctgtggttctcactaggtgcattcatgcaacagggttgcgatatttcacccaggagtttgagtgggcggatcgtaggtggcgtctggtggtttttcactcttatcatcattagcagttacacggcaaatctggctgcgtttttgaccgtcgagaggatggtgtcacccatcgagtccgcagaggatctggcaaagcagaccgagatcgcttatggaactcttgatagtgggtctactaaggagttcttccggagatctaaaattgcagtgtacgagaaaatgtggacgtacatgagaagcgcggagccctctgtttttacaaggactacagcagaaggagtagctcgcgtgcggaagtctaaggggaagttcgctttcctgctggaaagcacaatgaatgagtacattgaacagaggaaaccctgtgataccatgaaggttggggggaatctcgactctaagggatatggagtggcgacgcccaaggggagcagtctccgcactccggttaatctggccgtcctgaagctgtccgaggcaggcgtgctagacaagctcaaaaacaaatggtggtacgataagggcgagtgcggacctaaagatagcggctcaaaggacaagacatccgcactgtcactgtcaaatgtggcgggagtcttttacattttagttgggggtttaggcttggccatgctggtggcactcattgagttctgttacaaatcaagagcggaggcaaaacgcatgaaactgacattctctgaggctattaggaataaggcaagactctcgatcactggctcggtgggcgaaaatggccgcgttttgacacccgactgtcccaaggccgtgcataccgggacggccattcgtcagtcctccggacttgctgtgatcgctagcgaccttccatag

SEQ ID NO: 118507 - DNA, 1302 bp, synthetic construct
  misc_feature 1..1302: note = Description of Artificial Sequence: Synthetic coding sequence
  source 1..1302: mol_type = other DNA
atgagaattatttctagacagattgtgctgctgttctcaggtttttggggccttgcgatgggggctttcccatcctctgttcaaataggtggcctgttcatcagaaacacagaccaggagtacaccgcctttcgactagcaatctttttgcataatacatcacctaatgcttcagaggcacccttcaacctggttccacacgtcgataatatcgagaccgcaaacagcttcgccgtcaccaacgccttttgtagccaatattcacgcggcgtattcgccatctttggtctttatgataagcgctcagtgcatacactcacaagcttttgcagcgcgctgcatattagcctgataactcccagtttcccgactgagggggagagccaattcgtactgcagctccggccatctctcagaggcgcgctgctgtcactcctggaccactacgaatggaattgttttgtgtttctctatgacactgaccgaggctatagtatcctgcaggctattatggagaaggcaggtcagaatgggtggcacgtgtcggcaatctgcgtggagaatttcaatgacgtatcgtaccggcagttactggaggagttggacaggaggcaggaaaagaagtttgtcatcgactgtgaaatagaacgactccagaacatcttggagcaaatagtttccgtgggtaagcacgtgaaagggtatcactacatcatcgcaaatctagggttcaaagacattagtctagagcgttttatccacggcggggccaatgtgaccggatttcagctggtggacttcaacactccaatggttatcaagctgatggacagatggaagaagcttgaccagcgggagtatcccggatccgaaaccccacctaaatatacatcggcgttgacttacgatggggtgctggtcatggctgaaactttcaggagcctccggaggcagaaaatcgatatcagccggaggggcaatgcgggtgattgtctggccaaccctgcagcgccgtggggtcaaggtatagatatggagaggaccctgaagcaggtgcgaatccaggggctgactggaaatgtgcaattcgaccactacggtaggcgggttaattatacgatggatgtgttcgagctcaagagcaccggccccagaaaggtgggatactggaacgatatggataaactggtgctgatccaggacgtcccaaccctggggaacgacactgccgctatcgaaaaccgtacagttgtcgtgaccacgataatgccattaatgaagaatcccattctgaggaattag

SEQ ID NO: 118508 - DNA, 2655 bp, synthetic construct
  misc_feature 1..2655: note = Description of Artificial Sequence: Synthetic coding sequence
  source 1..2655: mol_type = other DNA
atgaggatcatctcccgacagattgtgctactgttttcgggcttctgggggttggccatgggtgccttcccctcttccgtgcaaatcggaggactgttcattaggaatacagatcaggagtacactgcattccggctagcgatcttcctacacaacaccagtcccaatgcatccgaggccccctttaacctggtgcctcacgttgataacatagaaaccgcaaactcttttgcagtcacaaacgcattttgctcacagtactcacgcggcgtgttcgccatcttcggactgtatgacaaaaggtccgttcacaccctgacatctttttgtagtgcattacacatcagcttgattaccccctccttcccaaccgaaggagagagtcaatttgtcctccagttgcggccgtcccttcggggggctctgctctctcttttagaccattacgagtggaattgcttcgtctttttgtacgataccgacagaggctattctatcctgcaagccatcatggagaaggccggtcagaacggctggcacgtgtccgcaatttgtgtggagaactttaatgatgtttcttaccgtcagctcttagaggaactcgataggcggcaggagaaaaagttcgtgatcgactgtgaaattgagcgtcttcagaacatcctggagcagatcgtctccgttggcaaacatgtgaaaggataccattacatcatcgcgaatctgggcttcaaagacatctctctggaacgtttcatccacggcggtgccaacgtgactggctttcaactggtggacttcaacactcccatggtcataaagttgatggacaggtggaagaagctggaccagcgcgaataccctggatctgaaacaccaccaaaatatacaagtgcactgacctacgacggcgtcctggttatggctgagactttccggtccctaagaaggcagaagattgacatctcaagacggggcaacgcaggcgattgcctggcgaacccagccgcaccttggggccaaggtatcgacatggaacgtactctgaagcaggtgagaatccagggcttgaccggcaatgtgcaattcgatcattacggtcgacgggtcaactatacaatggacgtgttcgagctgaagtcaacgggcccccggaaggtcggatattggaatgacatggacaaacttgtactgatacaggacgtgcctactctgggaaatgatacggcagcgattgaaaacagaacggtagtagtgacaaccatcatggagagcccttatgtcatgtataagaagaatcatgagatgtttgagggtaacgataaatacgagggatactgcgtggacttggcatcagagatagcaaaacacatcggcatcaagtacaagatcgcaattgtgccagatggcaagtacggtgcacgggacgccgacacaaagatctggaatggcatggtgggggagttggtgtatgggaaggccgaaattgccatcgcccccctgaccattacgttggtcagggaggaggtgatcgacttcagcaaacccttcatgtctctgggaatcagtattatgatcaaaaagccccagaagtctaaacccggggttttctccttccttgacccgttggcctacgaaatctggatgtgtatcgttttcgcatacatcggggtgtcggttgtactgttcttagtcagtaggttttcaccgtatgagtggcatactgaagaaccggaagatggaaaagagggccccagcgaccagcctcctaatgaatttgggatattcaattccctttggtttagtctcggagctttcatgcagcagggctgtgatatctccccccggtcactttcagggcgaatcgtcgggggcgtttggtggtttttcacgctcataatcatttcaagctatactgctaaccttgccgcctttctcacggtggaaaggatggtgtccccaatagaatcggccgaggacttggctaagcagactgagatagcatatggtacactggatagcggttccacaaaggaattttttcggcggagtaaaatcgccgtctacgaaaagatgtggacatacatgcgtagcgcggaacctagtgtgtttacacgaaccaccgcagagggagtggcgagagtgagaaagtcaaaagggaaattcgcctttctgctcgaatctaccatgaatgagtacatcgagcaacggaagccgtgcgatactatgaaggtcgggggcaacctcgacagcaagggttacggcgtcgcaactcctaaaggtagttctctgcggaacgccgtgaacctggctgtgctgaaattaaacgaacaaggactgttggacaagctgaaaaacaaatggtggtacgataagggcgagtgtgggtcaggcgggggtgattcaaaggataaaacatccgctttatcgctgagtaacgtggctggagtattttatattctggtgggggggctgggcttagccatgctggtggctttgatcgagttctgttacaaatcccgggcagaagctaagagaatgaaagttgctaaatctgcacagacatttaaccctacgtctagccaaaatacccaaaacctggcaacttaccgcgaaggttataatgtgtatggaactgaatctatcaaaatatag

SEQ ID NO: 118509 - DNA, 1302 bp, synthetic construct
  misc_feature 1..1302: note = Description of Artificial Sequence: Synthetic coding sequence
  source 1..1302: mol_type = other DNA
atgaggattatctcacggcagatcgtgcttctgttttcaggcttttggggcctcgccatgggagcttttccttcgagcgtccaaatcggcggattatttatccgtaatactgatcaggagtatacagcttttcgacttgctatttttcttcacaacacgtccccgaatgcctcagaggctccattcaatctggtcccacatgtagacaacatagagaccgccaacagcttcgcagtgaccaatgcgttttgctcccagtactctaggggggtttttgcaatctttggcctctacgacaagagaagtgtgcacacactgacctccttttgcagcgcgcttcatatatccttaatcactccgtctttccccacagagggcgagagccagtttgtgcttcagctacggccaagcctgcgtggcgcactgttaagccttctggaccattatgaatggaactgctttgtcttcctatacgacactgatagaggatacagtattctgcaggctataatggagaaagccggacagaacggatggcacgtatctgctatctgcgtcgaaaacttcaatgacgtttcttacagacaactgctggaggagttggataggagacaggagaagaaattcgtaatcgattgtgagatcgagcgcttacagaacatcctggaacagatagtgagtgtggggaaacacgtgaaggggtatcactacataattgccaatctcgggtttaaggatatatcccttgaaagattcatccatgggggcgccaacgtaacaggattccaactggtggattttaacacacctatggtgatcaaactaatggatagatggaagaagctcgaccaaagggagtaccctgggtctgagacccccccgaagtataccagtgccctcacctacgacggcgtattagtaatggccgagacctttcgatctcttcggcgccagaagattgatatcagcaggcgcgggaacgctggggattgcctcgctaatcccgccgccccttggggccagggcatcgacatggaaaggactctaaaacaagtcagaatccaggggttaactggcaacgtgcagtttgatcattatggtcggagagttaattataccatggacgtgtttgaattaaaatctacaggtccacggaaggtgggctattggaacgacatggataaattggttctaattcaggatgtacctactctgggcaacgacacagctgccatagagaatagaacagtcgtagttacaactattatgcctctgatgaaaaacccaatactgcggaactag

SEQ ID NO: 118510 - DNA, 2655 bp, synthetic construct
  misc_feature 1..2655: note = Description of Artificial Sequence: Synthetic coding sequence
  source 1..2655: mol_type = other DNA
atgcgcatcatatcgaggcagatcgtcctcttattctccgggttttggggcttggccatgggagcttttccatcttcagtgcagatcggcggactgtttatacgaaatactgaccaggagtacacagccttcaggcttgctatctttttgcacaacacatcccccaacgctagtgaggccccgttcaatctcgtgcctcatgttgataacatcgagacggccaactctttcgcagtgactaatgccttttgctctcagtactcccgtggggttttcgccatctttggcttgtacgacaagaggtccgtccatacactgactagtttttgtagtgctctgcacatctccctcataacgcctagttttcctaccgagggtgaatctcagtttgtcctccagttgaggcccagcctgagaggcgctttattgtcccttctggatcactacgagtggaactgcttcgtgttcctctatgatactgataggggctattcaatcctgcaggcaattatggagaaggccggccagaacgggtggcacgtgagtgctatctgcgtcgaaaacttcaacgatgtgtcctacagacagctgctggaagagctggatcggaggcaggagaaaaagtttgttattgactgcgagatcgagagactgcaaaacattctggagcagattgtctctgtagggaagcacgttaagggctaccattatattatcgctaaccttggcttcaaagacatctccctggaacgattcattcacggcggtgctaatgtcacggggtttcaactggtcgacttcaatacgcccatggtcattaagcttatggataggtggaaaaaattggaccagagggagtacccaggcagcgaaacgccacccaagtacacttcagcccttacctacgatggagtgttagtgatggcagagacctttagatcactacgacgtcagaagattgatatcagccgtcgcgggaacgctggggattgcctggcaaatccagccgcgccctggggtcagggtattgacatggagcgcactctgaagcaagtgcgcattcagggactgaccggtaacgtgcagttcgaccactatggacggcgtgttaactacaccatggatgtgttcgagctaaaaagcacaggtcccaggaaggtaggatactggaacgatatggacaagctagtgttaatccaggatgtccccaccctgggtaatgatactgccgctatagagaatcgcaccgtcgtcgtgacaacaattatggaatctccatacgtgatgtacaagaaaaaccacgaaatgtttgagggcaacgacaagtatgagggctactgtgtcgacctagcatctgagattgctaagcacattggtatcaagtacaagatcgctattgtgcccgatggcaaatacggcgctagggacgcggacaccaagatctggaacggcatggtgggtgagctagtgtatggcaaggcagagatcgccatagccccgctcacaattaccctggtcagggaggaggtgatcgatttttcaaagccgttcatgagtctcgggatctccattatgatcaagaagccccagaaatctaaacccggcgtcttctctttcctggaccccctcgcttacgagatatggatgtgcattgttttcgcatatattggtgtttccgtcgtgttgtttctagtgtcaaggttcagcccatatgagtggcacacagaggagcctgaagacgggaaagaaggcccctctgatcagccccccaatgagtttggaatattcaactctctgtggttctctctcggagccttcatgcagcagggctgtgatattagccctcggtccctgagtgggcgtatagttgggggcgtgtggtggttctttaccctgatcatcatttcaagttacactgcaaacctggctgccttcctgacggtggaaaggatggtctccccaatcgagtccgctgaggacctcgctaagcagactgagattgcctacggcaccctggactccggaagcaccaaggagtttttcaggcgcagcaagatcgccgtctacgaaaagatgtggacctacatgcggagcgccgagccatccgtgtttacccgcaccactgcagagggggtggcccgagtcagaaagtccaagggaaagtttgccttcctgttagaaagcaccatgaacgagtacattgagcagcggaaaccttgcgacactatgaaggtcggcggcaacctcgatagtaagggttacggcgtggctactccaaagggctctagcctgaggaacgctgtcaacctagctgtcctgaaactcaacgaacaaggcttgctggacaaactgaagaacaaatggtggtacgacaaaggcgagtgcgggagtgggggaggtgacagcaaggataaaacaagtgctctttcgctgagcaatgtggccggggtcttctatatcctcgtcggagggttaggactggccatgctggttgccctcatcgaattctgctacaagagtcgcgccgaagctaagcggatgaaagtggccaaaagtgcccaaacatttaatccgaccagctctcagaacacccagaacctagccacgtatcgagaagggtacaacgtatacggtaccgagtccatcaagatatag

SEQ ID NO: 118511 - DNA, 249 bp, synthetic construct
  misc_feature 1..249: note = Description of Artificial Sequence: Synthetic coding sequence
  source 1..249: mol_type = other DNA
atgcggatcatctcacggcagattgtcctattgttttccggtttttggggactggccatgggagctttcccttcttcggtccaaataggtggactttttatcagaaacaccgaccaggagtacactgccttcagactggccatctttctccataacacctcgcccaacgcctctgaagccccatttaatttggtgccccacgttgacaatattgaaacagctaattctttcgctgtcaccaatgcttag

SEQ ID NO: 118512 - DNA, 249 bp, synthetic construct
  misc_feature 1..249: note = Description of Artificial Sequence: Synthetic coding sequence
  source 1..249: mol_type = other DNA
atgcgcatcatttctaggcagattgtactgctgttttccgggttctggggattggccatgggcgcttttcctagcagcgtccagataggcggtctgttcattagaaacacagatcaggaatacactgccttccggctagccattttcctgcacaatacgtctccaaacgccagcgaagccccatttaatttagtgcctcatgttgacaacatcgagactgccaactcatttgccgtcactaatgcgtag

SEQ ID NO: 118513 - DNA, 2709 bp, synthetic construct
  misc_feature 1..2709: note = Description of Artificial Sequence: Synthetic coding sequence
  source 1..2709: mol_type = other DNA
atgagaattatctcacggcagatcgtgctcctcttttccggcttctgggggctggcaatgggggcctttccttcatcagttcagataggaggactctttattaggaatacagatcaggagtataccgccttccgactcgctatcttcttgcacaacacgtcgccgaacgcctctgaagcccctttcaatctggtcccccacgtggacaacatcgagactgcaaatagctttgctgtgacaaacgcgttttgcagccagtactcacggggagtgttcgcgatttttggcctgtatgataaaaggtctgtgcatactctgacatcgttttgtagcgctcttcacatctctctgattacaccatccttcccgacagaaggggaaagtcagttcgttctccaactcaggccaagcctaagaggggctctcttgagcctgttagatcactacgagtggaattgctttgtatttctctatgataccgacaggggctacagtattctacaagcgataatggagaaggctggccagaacggttggcacgtgagcgctatttgcgtagagaacttcaacgacgtgtcttacaggcaactgctcgaagaactcgatcggcgccaggagaaaaaattcgtgatcgactgtgagatagagaggctgcagaacattctcgaacagatcgtttcagtgggcaagcacgttaaaggttatcactacataattgcaaatttgggattcaaggacatttctcttgaacggtttattcatggcggcgccaatgtgacaggctttcaactggtggattttaacacccctatggttatcaagctcatggaccggtggaaaaagctcgaccagcgtgagtaccctggatccgagacacccccaaagtatacatctgcattgacctacgatggggtgttagtcatggccgagacttttcgatccctgaggagacagaagatagacatctccagacggggaaacgcaggcgactgtctggctaacccagcagccccctgggggcaggggatcgacatggaacgcaccctcaagcaagtgaggattcaggggttgaccggaaacgtccagtttgaccattacggccggcgagtaaattacaccatggacgtgttcgagctgaaatcgacgggccccagaaaggttgggtactggaacgacatggataagctcgttttaattcaggatgtccctaccctgggtaatgacacagccgcgatcgagaataggacagttgtggtgactaccatcatggaatccccatacgttatgtataaaaagaaccacgagatgttcgagggcaatgataagtacgaaggttactgtgtagacctggcttcggagatagccaaacatattggcataaagtataagattgccattgtgcctgatggcaagtatggtgcccgcgatgcagatacgaagatctggaacgggatggtgggcgaactggtctacggtaaggcagaaattgcaatcgctcccctgaccataaccctggttcgggaggaagtgatcgactttagcaagccattcatgtccctgggaatcagtattatgataaagaagcctcaaaagtccaagcccggagtattttcctttctggaccccctggcttatgagatctggatgtgtatagtctttgcctacattggcgtgtcagtggtgttgttcctggtgagccggttttcgccgtatgagtggcacactgaggaacctgaggacggtaaggagggtcccagtgaccagccacccaatgagttcggaatattcaattccctgtggttcagcttaggggcatttatgcagcaaggatgtgacatctctccccggtctctctccgggagaatcgtaggcggcgtgtggtggttctttaccctgatcatcatcagttcctacacagcgaacttagccgcctttctgaccgtagaaagaatggtatcaccaattgagtcagcagaggatctggccaagcagactgagatcgcctacggcactctggattctggtagcactaaagaattcttccggcgaagtaagatcgcagtgtacgagaagatgtggacttacatgcggtcagctgagccatccgtgtttacgcggactacagccgaaggggtcgccagagtaagaaagtccaaaggcaagtttgcttttctgcttgagtccaccatgaatgagtacattgagcaacggaagccctgcgacacaatgaaagtgggcggaaatctggactcgaagggatacggagtggctactcctaagggcagtagtctgcggacacctgtcaatttggccgtactcaagctgtcagaagccggtgtcctcgacaaactgaaaaataagtggtggtacgacaaaggcgaatgcggccctaaggactccgggtcaaaagacaagacatccgctttgtcactcagtaatgtggcaggtgtgttctatatccttgtgggcgggctgggactggcaatgctcgttgccctcatagagttctgctataagtccagagccgaagccaagaggatgaagctaacattctcggaggcaatcaggaataaggcccgacttagtataactggatccgtgggagagaacggaagagtcctcacgccggattgtcctaaggcagttcacacagggacggcaatacgccaaagctctgggctggcagttattgcatcagatctgccatag

SEQ ID NO: 118514 - DNA, 360 bp, synthetic construct
  misc_feature 1..360: note = Description of Artificial Sequence: Synthetic coding sequence
  source 1..360: mol_type = other DNA
atgcgttcagcagagccatccgtcttcacacgaaccaccgcggagggcgtggccagagttaggaaatcgaagggaaaattcgcctttctcttggagtctactatgaacgaatatattgaacagcggaagccctgtgatacaatgaaggtgggtggtaacctggatagtaaaggttatggggtggcaacccccaaggggagcagcctgcggaatgcagtaaacctggctgttctgaagcttaacgagcagggccttctggacaaactgaagaacaagtggtggtacgataagggtgagtgtggctctggaggcggggacagtaagaatagctgcaaaccttgtcggtttgaaacacaatag

SEQ ID NO: 118515 - DNA, 2721 bp, synthetic construct
  misc_feature 1..2721: note = Description of Artificial Sequence: Synthetic coding sequence
  source 1..2721: mol_type = other DNA
atgcagcatatctttgcctttttttgtaccggctttctgggagccgtggttggtgccaatttccccaacaacattcagatcggcggactttttcctaatcagcagtcacaggaacatgctgcttttagatttgcattgtcccagcttacagagccaccgaagcttctgccccagatcgacatcgtaaatatttcagactcatttgaaatgacataccgcttttgttctcagttttcgaaaggtgtatatgccatctttggcttctatgaaagacgaactgtgaacatgttgacctccttctgcggtgccctgcacgtctgctttatcacaccctccttccccgtagacacatccaatcagtttgttttgcagttgcgacccgaactgcaggatgcactgatctcaattatcgatcattacaaatggcagaaatttgtgtatatctacgatgccgatcggggtctgtcggtcctgcagaaagtgctagatacagcagcggagaaaaattggcaagtgacggccgtaaacattttaacaaccaccgaggagggttacagaatgttgtttcaagacctcgagaagaaaaaagaaagactggttgtggtggactgtgagtcagagcgccttaacgccatactagggcaaataatcaaactggagaaaaacggaattggctatcattacatcctggctaacctgggctttatggacattgatctaaataaatttaaggagtctggcgccaacgtcaccgggttccagcttgtaaactatactgataccatccctgcgaagattatgcagcagtggaagaacagtgatgcccgcgaccacacgcgcgtggactggaagcgcccaaagtatacctcagccctgacctatgatggtgtgaaagtcatggcagaggcctttcagtcactgcgaaggcaaagaatagatatctctcgacgagggaacgcaggagactgcttggcaaaccccgccgtgccttgggggcagggcatcgatatccagagggccttacaacaggtgcgatttgagggcttgacaggaaatgtccagttcaacgaaaagggtcgcagaaccaattacacactacacgtgatagaaatgaaacatgacgggataaggaagatcggctattggaacgaagatgataaattcgtgccagcggcaaccgatgcccaggctggcggggacaacagttcggtacagaataggacatacattgtcacaacaatactagaagacccatacgttatgctgaaaaagaatgccaatcagttcgaggggaatgaccggtatgagggatattgtgtcgaactggctgccgaaatagctaaacatgtcggatactcgtataggctggagatcgtctcagacgggaaatatggtgcaagggacccagacacaaaagcctggaacggtatggtgggtgagcttgtttatggtagggcggacgtggcagtggccccactgaccatcaccctcgtgagggaggaggtcatcgactttagtaagccatttatgtctctcggtatctctattatgatcaaaaaaccacagaaatccaaacctggagttttttcctttcttgatcccctcgcgtacgagatatggatgtgcattgtttttgcatacatcggcgtttcagtggtactcttcttagtcagccgcttctcaccctatgagtggcactcggaagagtttgaagagggacgggaccagactacttccgaccagagcaatgaattcggaatattcaattctctgtggttttctctgggagcttttatgcagcagggatgtgatatctctccacggtctctttctggtcgtatcgtgggcggagtctggtggttctttaccctcattatcatctcttcttataccgctaatctcgccgccttcctgaccgtcgagaggatggtctctccaatcgagtccgcagaggacttagctaagcagacggagatcgcttatgggaccctcgaagccggcagcactaaggagttttttcgcaggtctaaaatcgcagtgtttgagaagatgtggacctatatgaagtctgccgaacccagtgtattcgtgcgcacgacagaggagggtatgatccgtgtgcggaagagtaaaggtaagtatgcctacctcctggagtctaccatgaacgagtacattgaacagcgcaagccatgcgataccatgaaggtcggcgggaacttagactcgaaaggctatggcattgcaactccaaaaggctcagccctccggaaccccgtcaacctcgccgttctgaaactgaacgagcagggcctacttgacaagctgaaaaacaagtggtggtatgacaagggcgaatgtgggagtggggggggcgacagcaaagataagacctccgccctcagtctttctaacgtggccggcgtattctacatcctgatcggggggctgggactcgccatgctggtggcactcattgaattttgctacaagtccagatccgagagcaaacgcatgaaaggattctgtttgatcccacaacagagcatcaacgaggcgatccgcacgtccactttgccacggaattccggagctggggcatccagtgggggatccggggagaacggtcgcgtggtgtcccatgactttccgaaatccatgcagagtattccttgcatgtcccactccagcgggatgccactcggagcgacgggactctag

SEQ ID NO: 118516 - DNA, 2721 bp, synthetic construct
  misc_feature 1..2721: note = Description of Artificial Sequence: Synthetic coding sequence
  source 1..2721: mol_type = other DNA
atgcaacacatttttgcgttcttctgtacgggatttctgggtgctgtagttggggcaaacttcccaaacaacatccagattggcggactctttcctaaccagcagagccaggagcacgctgctttcaggtttgcactgtctcaacttaccgaacccccgaagctgctgccacagattgacattgtcaatattagtgatagcttcgagatgacctatcggttctgcagtcagtttagcaagggcgtttatgccattttcgggttttatgagcggagaacagtgaacatgctgaccagcttctgcggcgccctccacgtctgcttcattacaccctcctttcccgtcgatacgtcaaatcagttcgtgctccagctgcgccccgagctgcaggacgccctaatcagtatcattgaccactacaaatggcagaaatttgtgtacatatacgatgctgaccgggggctgtccgtgctccagaaagtcctggacaccgctgccgagaagaactggcaggtcacagcagtgaacatattgacaaccacagaggagggttaccggatgctcttccaggacctggaaaagaaaaaggagagactggtggtcgtcgactgcgagagtgagaggctgaacgccatcctgggtcaaatcattaagctagagaaaaacggaatcgggtatcactatattctggcaaaccttggattcatggacatcgacctaaacaaattcaaagagagtggagcaaatgtcactggatttcagctcgtgaactataccgacacaatccctgcgaaaatcatgcagcagtggaaaaatagcgacgccagggaccacacgagggtggattggaagagaccaaagtatacttctgccctgacctatgacggggtgaaggtcatggcagaggccttccagtcgctgcgtagacagagaatcgatatcagccgtagagggaatgccggcgactgcttggccaatcccgctgttccatggggtcaaggcatcgatattcagagggcgctacagcaggtaagatttgagggtcttactggtaatgtgcaatttaatgaaaaaggccggcgcactaactacaccctgcatgtgattgaaatgaagcatgacgggattcgcaagatcgggtactggaacgaggacgacaagttcgttccagcagcgacagatgcccaggcaggtggcgacaacagctctgtccagaaccgaacatacatcgtgactactattctggaggatccatatgttatgttgaagaagaatgcaaaccaatttgagggtaacgaccgctacgaaggctactgcgtcgagcttgccgccgaaattgccaaacacgtgggctatagttaccgtctggagatagtgagcgacgggaagtatggcgcaagagaccccgacaccaaagcctggaacgggatggttggagagttagtctacgggagagccgatgtggctgtcgctcccctcaccataactctcgtgcgtgaggaagtcatcgatttctcgaaaccattcatgtcactcggtatctccataatgattaaaaagccacagaaatcaaagcctggtgtgttcagctttttagaccccctcgcctatgagatttggatgtgtattgtcttcgcttacatcggcgtgtccgtagtcctgttcctggtatccaggttttccccctatgagtggcactctgaagagttcgaggagggtcgcgatcaaactacatctgaccagtcaaatgagtttggcattttcaactccctatggtttagtctaggcgccttcatgcagcaggggtgcgatatatccccgcggtccctgtccggacgcattgtaggcggtgtctggtggttttttacccttattataatcagttcttacaccgcgaacctggctgcttttctgacagttgagaggatggtgagccccatagagagcgccgaagaccttgccaagcagactgaaatcgcatatggcaccttagaagctgggagcaccaaggagttctttaggcgatccaagatcgcagtgttcgagaagatgtggacgtacatgaaatccgccgagccgagcgtctttgtgagaacaacagaagagggcatgatacgggtgcggaaatccaaaggcaaatatgcttacctgctcgagtccaccatgaatgagtatattgagcagcggaagccctgtgacaccatgaaggtgggagggaacctggacagcaaggggtacggcatagctacaccgaagggaagcgctctaagaggacccgtcaacctggctgtactgaaactgtccgagcagggagtgctggacaagcttaagtccaagtggtggtacgataagggcgagtgcggaagcaaagatagtggtagtaaagacaaaacatctgccctcagtctttctaatgtcgcgggggttttctacatcctgatcgggggcttagggttagccatgctggttgcactgatcgagttctgctataaaagtcgctctgagtcaaagagaatgaaggggttctgtttgattccacagcagtctattaacgaagctatcagaacaagcactctaccccgtaatagtggcgcaggcgcttcctccggtggtagtggggaaaacggcagggttgtatcacatgatttcccaaaatctatgcagtcaatcccatgcatgagccatagcagtggcatgccactaggtgccacaggactctag

SEQ ID NO: 118517 - DNA, 2751 bp, synthetic construct
  misc_feature 1..2751: note = Description of Artificial Sequence: Synthetic coding sequence
  source 1..2751: mol_type = other DNA
atgtgttgctctacccacctcttccaacctctacagctggccgggggattagagtggccctggagtaatttgctgtgtttcctcacaccagtcaagttgcaccccgaagtttggggattgttcccgaaccagcagtcccaggaacatgctgccttccgttttgccctcagtcagctgacggaaccccccaaactcctgccacagattgacatcgttaatatatctgactcattcgagatgacctaccgcttttgttcccagtttagtaaaggggtgtacgccatattcggtttctatgagcggagaaccgtgaatatgctcacctcattctgtggggcactgcatgtctgtttcattactccctcgttcccagtcgatacctctaatcagtttgttttgcagctgaggcccgagctgcaggatgcattgatttccattattgaccactataagtggcagaagttcgtatatatctatgatgctgaccgggggttgagcgtattacaaaaagtgctggatacagccgccgaaaagaattggcaggtgacggctgttaacattcttaccacgaccgaagaaggctaccggatgctgttccaggatttggagaaaaaaaaggagcgattggtggtggtggactgcgagtctgagaggctgaatgccattttgggtcagattatcaaactcgagaagaatggcatcggataccattacatactggctaatctcgggtttatggacatagacttgaacaaattcaaggagagcggcgcaaacgttacaggattccaactggtgaactatactgacaccattccagcgaagattatgcagcaatggaaaaattctgatgcccgggaccatacaagggtggattggaagcgcccaaagtacacctccgcactcacttacgatggtgtgaaggtgatggccgaagcattccagtctttacggagacagagaatcgatatctcccgcagaggtaacgccggcgactgtttggccaaccccgctgttccctggggtcaaggcatagatattcagcgagccctccaacaggtcaggtttgagggcttgacaggaaacgtccaatttaacgagaagggcaggcggactaattacacactgcacgtgatcgagatgaaacacgatgggatccggaaaatcgggtactggaacgaggatgacaaatttgtgccagctgcaaccgatgctcaggcagggggtgacaattcctctgtacagaaccgcacctatatcgttactactatcctggaagacccttatgtaatgttaaaaaagaacgccaatcaatttgagggcaacgataggtacgaaggatattgcgtcgagcttgccgccgaaattgcgaaacatgtagggtacagttacaggctggaaatcgtgtccgacggaaagtatggcgcccgggatccagatacaaaagcatggaacgggatggttggtgaactggtctatgggcgggctgacgtggcagtggctcccttgacaatcacgctagtgagagaggaggtgatagacttttctaagccgttcatgagcctcggcatttccattatgataaagaaacctcaaaagtctaagcccggggtcttcagtttcctggatccactcgcttatgaaatctggatgtgtatcgtgtttgcttacatcggggtgagtgtggtgctgtttctggtaagcaggttttctccttatgaatggcactctgaagaatttgaagaggggagggaccagacaacgtcagaccagtccaacgagttcggcattttcaatagcctctggttcagtttgggcgcatttatgcagcaggggtgtgatatttctccacggtccctctctggaaggattgtcgggggagtctggtggttttttacattaatcatcatctctagttataccgctaatctggccgctttccttacagtggaacgaatggtgtccccgatcgagagcgccgaagatcttgcgaagcagaccgagattgcttatgggactcttgaggcaggcagcactaaagaatttttcaggaggtcaaagattgcagtttttgagaaaatgtggacttacatgaagtccgctgagccctccgtcttcgtacgaactactgaagagggaatgatccgagtcagaaagtcaaagggcaagtacgcctatttactggagagtaccatgaatgaatatattgagcaaagaaaaccttgtgacaccatgaaagtgggtggaaaccttgactccaaggggtacggcattgctactcccaaggggtccgccctgagggggccggtcaacctggcggtgctgaagctgtctgaacagggagtgctcgataagctgaaaagtaagtggtggtacgataaaggtgagtgtggatcaaaggactccggctcaaaggataagacctccgcacttagtctgagtaacgtcgccggggtgttttacatacttattggaggactcggactagccatgttagtagcccttattgagttttgctataaatcccgctctgaaagcaaacggatgaaaggattttgtctgattccccagcagtccattaacgaagccatacgcacgtctactcttccacgaaacagcggcgctggagccagctctggtggctccggagaaaacggcagggtggtgagccacgacttccctaagagcatgcagagcatcccctgcatgagccactcgtctggcatgccactcggcgccacgggcctgtag

SEQ ID NO: 118518 - DNA, 2481 bp, synthetic construct
  misc_feature 1..2481: note = Description of Artificial Sequence: Synthetic coding sequence
  source 1..2481: mol_type = other DNA
atgcagcacatttttgccttcttctgtacaggatttctgggcgccgtcgttggtgcaaattttccgaataatatccaaataggcggattatttcccaatcaacagtcacaagaacacgctgcttttcgatttgccctgtcccagctgaccgaaccaccaaaattgctgcctcagatagacattgtgaacatatcagacagctttgagatgacctataggtgtctatccgtgctgcaaaaagtactggataccgccgctgagaaaaactggcaagtgacagcggtaaacatacttaccacaacggaggagggatacaggatgcttttccaagatcttgagaagaagaaggagagactagttgttgtggactgtgaaagcgagcggctcaatgctattctgggccagataatcaagcttgaaaaaaacggaatcgggtatcactatatcctggcaaacctgggctttatggacattgaccttaataaatttaaagaatctggtgctaacgtgactgggtttcaattagtaaattacacggacaccataccggcaaagatcatgcagcagtggaagaattccgatgcaagagatcacacacgcgtagactggaagaggccaaagtacaccagcgcgctgacctatgatggtgtcaaggtgatggcagaagcatttcagtcactgagacggcagcgcatagatatttcccgtagggggaacgctggagactgtctcgccaaccccgccgttccatgggggcagggaatcgatattcagagagcactacagcaggtcaggttcgaagggctgactgggaacgtccagttcaatgagaagggaaggcggaccaattacaccctgcatgtcatcgagatgaaacacgacgggattagaaagattggatactggaacgaagacgataaattcgttcccgctgcaaccgatgcccaggcaggaggcgataactcttccgtgcagaacagaacctatatcgtgaccacgatccttgaggacccatacgtgatgcttaaaaaaaacgctaatcagttcgaagggaacgataggtatgagggttactgtgttgagctggccgccgagatcgcgaagcatgtggggtatagttaccgcttggagattgtctctgacgggaagtacggggccagggatccggatacaaaggcctggaatggcatggttggagagctggtgtacgggcgagcagacgtagctgtggcccctctgactatcaccctggttagagaagaggtgatcgacttctcgaagccctttatgtcgttggggatctccataatgatcaaaaaaccacagaagtcaaagccgggtgtcttcagctttcttgatcccctggcctacgaaatctggatgtgtatcgtgttcgcctacattggcgtcagtgtggtcctcttcctcgttagcagatttagcccatacgaatggcattctgaagagttcgaggagggcagagaccagaccaccagtgaccagtctaacgaattcgggatcttcaacagcctctggttctcgcttggggctttcatgcaacagggttgtgacatatcaccaaggtccctaagtggtaggatcgtcgggggcgtctggtggttcttcacccttataataatttctagttataccgctaatctggccgcttttcttaccgtggaaagaatggtgtccccgattgaaagcgctgaagaccttgccaagcagactgagattgcctacggcaccctggaagcaggatcgacaaaggagtttttccgcaggagtaagattgctgtgtttgaaaagatgtggacctacatgaagagtgccgagcctagcgtttttgtccgaaccaccgaagagggcatgatccgcgttcggaagagtaagggaaagtacgcttacctattggaatcaaccatgaacgagtacatcgaacagcggaagccctgtgataccatgaaagtgggaggaaacctggatagtaaaggctatggcattgctacccccaagggctctgcactgcgaaatcccgtgaacctggctgtcctgaaactcaatgagcagggactactcgacaagctgaagaacaagtggtggtacgacaagggagagtgtggctcaggcgggggcgattcaaaggataagacaagcgccctgagtctatccaacgtcgcaggtgtcttctatatcctgatcggcggtctcggactagcaatgctagtcgcgctaatcgaattctgttacaaaagtcgatcagaaagcaaacggatgaagggattctgccttatccctcagcaatcaattaatgaggctatccgcaccagcaccctgccacggaacagtggagcaggtgccagttcaggcggctcgggggagaatggtcgggtcgtctcacacgactttccaaagtccatgcaaagcattccgtgtatgagtcacagctccggcatgccactgggtgccacagggctttag

SEQ ID NO: 118519 - DNA, 2751 bp, synthetic construct
  misc_feature 1..2751: note = Description of Artificial Sequence: Synthetic coding sequence
  source 1..2751: mol_type = other DNA
atgtgctgcagcacccacctttttcagccactgcaactcgctggcggtctggagtggccttggtcgaatctcttatgttttctcaccccagtcaagctgcaccctgaggtatggggccttttcccaaaccaacagtcgcaggagcacgcggccttccgtttcgccctgagtcagcttacggagcccccaaaacttctcccccagatagatattgtcaatatttcggattcgttcgagatgacataccgcttctgcagtcaattctccaagggcgtgtatgccatctttggattctacgaacggcgaacagtgaatatgctgacatctttttgcggtgcccttcatgtgtgttttatcacaccgagctttccggtggatacgtctaatcaattcgttctgcaactccgcccagagctacaggacgcgctcattagcattattgatcattataagtggcaaaaatttgtgtatatctacgatgctgaccgcggactgtctgtgcttcagaaggtgctggatactgctgctgagaagaactggcaggttacggctgtgaacatactgacaactaccgaggagggttatagaatgttgttccaagatctcgaaaagaagaaggagcggctcgtggttgtcgattgtgagtccgaaagactgaacgccattctcgggcagatcatcaaacttgaaaagaatggcatcggataccactacatcctggccaatcttgggttcatggacatcgatctgaacaagtttaaagagtccggggctaatgttacgggattccaactagtgaattacacggacacgattcctgctaaaatcatgcagcagtggaagaattcggatgccagggatcatacccgagtggactggaaaaggcccaagtacacaagcgccttgacttacgatggagtcaaagtgatggcggaagcgttccagtccctgcgcagacaaaggattgacatctccagaagggggaacgcgggggattgtctagcaaacccagctgtgccatgggggcagggcattgacattcagcgggcattgcaacaggtgcgctttgaggggctcacgggcaacgtgcaattcaatgagaagggaaggaggaccaattacacactgcatgtgatcgagatgaagcatgacggaatcaggaagattggttattggaatgaagacgacaagtttgtccctgctgccactgatgcccaggccgggggcgataactcaagcgtgcagaaccggacatatatagtcactacaatattagaggacccttatgttatgctgaaaaaaaacgctaaccagtttgaggggaacgatcgatatgagggctactgtgtggagctggctgctgagatagccaaacacgtaggctatagctaccggctggagatcgtctctgacggcaaatacggcgccagggacccagataccaaggcatggaatggaatggttggggaattggtgtacggaagagcagatgttgcagtcgctcccttgactataaccctagtccgggaggaagtcatcgacttctccaagccatttatgtctttaggaatctctattatgattaagaaacctcaaaagtcaaagcctggagtattcagcttcttggatcccctcgcatacgaaatctggatgtgtatcgttttcgcctatataggcgtgtccgtcgtgctgttcctggtctctcgattctctccctatgagtggcactcagaggagttcgaagagggaagagaccagaccacctctgaccagtcaaacgaatttggcatctttaacagcctctggtttagcctaggggcttttatgcagcaaggctgcgacatcagtccccgtagcctctctgggaggatcgtcgggggtgtctggtggtttttcactcttatcattatttccagttacaccgctaatcttgcagccttcctgaccgttgagagaatggtatcacccatcgagagtgccgaggacttagcgaagcagacagaaatcgcctatggcacgttggaggccgggagcaccaaagagtttttccggcgaagcaagatcgccgttttcgaaaagatgtggacgtacatgaagagtgccgaaccctccgtatttgttaggaccacagaggagggaatgatccgagtgcgaaagtccaagggcaagtacgcatacctcctcgagtccacaatgaatgagtatatcgagcaaagaaagccgtgtgacacaatgaaagtcggcggtaatttggactcgaagggctatggtatagctaccccaaaagggagtgccctcagaaatcccgttaacttggcggtgctcaagctgaacgaacagggcctgctggacaagcttaaaaataaatggtggtatgacaaaggggaatgcggaagcggcgggggggattctaaggacaaaacgagtgccttgtccctcagcaatgtggcgggggtcttttatatcctcatcggcggcctgggcctagcgatgttagtggctctcatcgagttttgctataagagtaggtcagagtcaaagcggatgaagggtttttgcttaataccacagcagagcatcaatgaagctattcggacctcaaccctgcccagaaattccggagccggcgcctcttcaggtgggagtggcgagaatgggagagtggtaagccacgatttcccgaagtccatgcagtccattccatgcatgagccactcaagtgggatgcccctgggagctacggggttgtag

SEQ ID NO: 118520 - DNA, 2151 bp, synthetic construct
  misc_feature 1..2151: note = Description of Artificial Sequence: Synthetic coding sequence
  source 1..2151: mol_type = other DNA
atgcagcacattttcgcctttttctgcaccgggttcctgggcgccgtggtaggcgcaaatttcccaaacaacatacaaatagtttgcagccagttttcaaagggtgtgtatgccattttcggattttacgagagacggacagtaaacatgcttacctctttttgtggcgccctgcacgtgtgtttcatcacaccaagcttccccgtggacacaagcaatcagttcgtgctgcagctgaggccggagctccaagatgctctcatctccatcatagaccattataagtggcagaagttcgtatacatatacgacgctgaccgcgggctaagtgttttgcagaaagttttggacactgcggccgagaaaaactggcaggtgactgccgtcaacatcctcacgacgaccgaggagggctatcggatgcttttccaggacctggagaagaaaaaggagcggctggtagtggtcgactgcgaatctgagcgtctgaacgctatcctcggacagattataaagctggagaagaacggtattggataccattacattctagccaacctaggtttcatggatattgatctgaataagtttaaagaaagcggagccaatgttacaggttttcagttagtgaactatacagataccatcccagcgaagatcatgcagcagtggaagaacagtgacgcaagagaccatacgagggtagactggaagagaccgaagtatacctcggctctcacctacgacggtgtgaaggtgatggccgaagcattccaatctttacgccgccagaggatcgatatttctcgccggggtaatgccggcgattgcctagcaaaccctgcagtcccttggggtcaagggattgatattcagagggcactgcaacaggtgcgatttgaagggttaacaggaaatgttcagtttaacgaaaaggggagaaggaccaattacaccttgcatgttatagaaatgaagcatgacggcattcggaagattggttattggaacgaggatgataagttcgtgcccgcagcaacagacgcccaagcgggaggggataattcaagcgtgcagaatagaacctacatagttaccaccattttagaagacccctatgtgatgttaaaaaagaacgctaaccagttcgaagggaacgaccgttatgaaggctactgtgtagagctggccgctgagattgcaaagcatgtgggatatagctaccgtctggaaatagtctccgatggaaaatatggggctagagatccagacacaaaggcgtggaatgggatggttggggagctcgtgtatggtcgcgcggacgtggccgtcgcccccctaaccattactctggtgagggaggaagtgatcgatttctccaagccatttatgtcccttggaataagtatcatgataaaaaaaccacagaaatcaaagcctggagtcttctcttttcttgaccctctggcatacgagatctggatgtgcatcgttttcgcctatatcggtgtgtccgtagtccttttcctggtgagcagattctccccgtacgagtggcacagcgaggagttcgaggaaggcagagaccaaaccaccagcgaccagtccaacgagtttggcatttttaattctctgtggttctccttaggcgccttcatgcagcagggctgtgatatcagtcctcgctcactgagtggtaggatcgttggaggcgtgtggtggttctttaccctgatcatcatctccagctacaccgcaaacctggctgctttcttgacagtggagcgaatggtatcaccgattgagagtgccgaggacttggccaaacagaccgagattgcctacggcacgctcgaggcaggttccactaaggagttcttcagaagatccaagatcgccgtgtttgaaaaaatgtggacatatatgaagagcgctgagccttccgtgttcgtccgcactactgaggaaggtatgatccgtgtgaggaagtctaagggcaaatatgcatatctcttggagagtactatgaacgaatatatcgagcagcgtaaaccctgcgatacaatgaaggtcggcggaaatctggattctaaaggatatggtatcgccacacccaagggaagtgccctgaggacccgccaggccctgtag

SEQ ID NO: 118521 - DNA, 2721 bp, synthetic construct
  misc_feature 1..2721: note = Description of Artificial Sequence: Synthetic coding sequence
  source 1..2721: mol_type = other DNA
atgcaacacattttcgcctttttttgcacgggcttcctgggcgcagtggtcggcgccaactttcccaataacattcaaatcggaggtttgttcccaaatcagcagtcccaggagcatgccgcattcagattcgctctgtctcagctgaccgagccacctaagctcctcccacaaatcgatatcgttaatatctcagattcctttgaaatgacgtataggttctgttctcaattttcaaaaggcgtgtatgctattttcggtttttacgagaggcgtacagtgaatatgctgacttccttctgcggcgccctgcacgtatgtttcataactccaagtttcccggtggacacctctaaccagtttgtgctgcagctcagaccagagctacaggacgctctaatatctataatcgatcattataaatggcagaagttcgtgtacatttacgacgccgacagaggtctatctgtcctgcaaaaagtgctcgatactgccgccgaaaagaattggcaggtgaccgctgtgaatatccttacaactacagaagaggggtatcggatgttgttccaggatttagagaagaaaaaagagagactggttgtagttgattgtgagtcggagcggctaaacgcgattctgggacaaatcattaaactcgaaaaaaatggcatcggctaccattacattctggcaaatctgggatttatggatatcgacctcaataagttcaaagaaagtggggccaacgttactggtttccaacttgtaaactatactgataccatccccgctaaaatcatgcagcagtggaagaacagtgatgccagggaccacaccagggtggactggaaaaggccgaaatatacctccgcactcacctacgatggcgtgaaagtgatggccgaagcctttcagagcctccgccgccagcggattgacatcagccgacgaggcaacgctggcgactgtctcgccaatccggccgtgccttggggacagggtatcgacattcagagagcactgcagcaggtccgcttcgaaggtcttacgggaaatgtgcagttcaatgaaaagggaagacggacaaattatactctgcatgtaatagagatgaagcatgacggaatcagaaagattggctattggaacgaagatgacaagttcgtccccgcggctactgatgcccaggccggtggcgataatagtagtgtacagaacagaacttacatagtgaccaccatcttggaggatccctatgtgatgctcaaaaagaacgctaatcagtttgaggggaacgaccgctacgaggggtactgcgtggagttggctgctgaaattgccaaacatgtaggatactcatatcgactggaaatcgtctctgatggaaagtacggtgccagagacccagatactaaggcttggaacggaatggtcggagagctagtttacggcagggccgacgtggccgtcgctcctctgacgataacactggtgagagaggaggtgatcgacttcagcaagccattcatgtccctaggtatcagcataatgatcaagaaacctcagaaaagtaagcccggagtcttctcatttctagatcccttagcctatgagatctggatgtgcatagtctttgcatacataggtgtctctgtcgtactgttcttagtgtcccgcttttccccctatgaatggcacagcgaggagttcgaggaagggcgggaccagaccacatctgaccagtcaaacgaatttggaatatttaactctctctggttttccttaggcgcctttatgcagcagggctgcgatatttctcccagaagtcttagcggaaggattgtgggcggcgtgtggtggtttttcaccctgataatcatctcatcgtacactgcaaatcttgccgcctttcttaccgtggagcgcatggtatctccaatcgagagtgcagaagacctggccaaacaaaccgagatcgcatacgggacactagaagctggctccacaaaggaattttttcgccgatctaaaattgcggtgttcgagaaaatgtggacgtacatgaagtctgcagaacccagcgtatttgtccggacaaccgaggagggcatgatccgcgtgcgaaaaagtaagggaaaatacgcttacttactggagtccactatgaacgagtacatcgagcagcgcaagccgtgtgacactatgaaggtcggcgggaatcttgattccaaaggatacggaatcgcaacacccaagggcagcgctctcaggggacctgtgaatctagccgttctgaagttgtcagaacaaggagtgctagataaactaaagtcaaagtggtggtacgacaagggggagtgcggatctaaagatagcggatcaaaggataagacttctgccctgagcttaagcaacgtcgccggcgtgttctatatcctaattggcggtttgggcttggcaatgctcgtggctctcatcgaattttgctataagtcacgctccgaatctaagcgcatgaagggcttttgtttaattccccaacagtctatcaatgaagcaattcggacaagcaccctgcccagaaactcaggtgccggagcatctagtggtggcagtggcgaaaatggccgcgttgtgtctcacgattttccaaaaagcatgcagtctattccctgtatgagccatagctccggaatgcctctgggagctaccggtctctag

SEQ ID NO: 118522 - DNA, 2514 bp, synthetic construct
  misc_feature 1..2514: note = Description of Artificial Sequence: Synthetic coding sequence
  source 1..2514: mol_type = other DNA
atgacctatcggttttgcagtcaattctcgaaaggtgtgtatgcgatttttggcttttacgagcgcaggactgtcaacatgctcacatcattttgcggagcactgcatgtgtgctttatcactcccagttttcccgtagacacatccaatcagttcgttctccagttgagacccgaattgcaggacgccctgattagtataatcgaccactacaaatggcagaaattcgtatacatctacgacgcagatagaggtctctctgtgctgcaaaaggttcttgacactgccgccgaaaagaactggcaggtgaccgccgtaaacatcctgactaccaccgaggagggctacaggatgttgtttcaggacctggagaagaagaaggagaggttggtggtcgtggactgcgagtccgagaggttaaacgccattcttggacagataataaagctcgaaaagaacggaatcggctaccactatatcttggctaacctgggctttatggacattgacctgaataagttcaaggagtccggagcaaacgtgactggattccaactggtgaattataccgatactattcccgctaaaattatgcaacagtggaagaactcagatgccagagaccacacaagagtggattggaagaggcccaagtatacctcagccctaacatatgatggggtgaaggttatggccgaagcctttcagagccttaggaggcagcgcatcgacatctcccgcagaggcaacgctggggactgcttggcaaaccccgccgtaccatggggccaaggaattgatatccagagagcactccaacaagtgagattcgagggacttacagggaatgtgcagttcaacgagaagggacggcgcactaactatactcttcacgtcatcgaaatgaagcatgatggcatccgtaagatcgggtattggaacgaggacgacaagttcgtgccagctgccaccgatgcgcaggccggcggtgacaatagcagtgtgcagaacaggacatatatagttacaacgatattggaagacccttatgtgatgttgaagaaaaacgccaatcaatttgaagggaacgaccggtacgagggctattgcgttgagttggcggccgagattgctaagcatgtgggctactcataccggctagaaatagtctccgacggaaagtacggcgcacgcgatccggatacaaaggcatggaatggtatggtaggggagcttgtgtacggccgagctgacgtggcagtcgcacccctaactatcaccttggtcagggaggaagtgattgatttctccaaaccttttatgagcctggggataagcatcatgattaaaaagccacaaaagtctaaacccggcgtgttcagctttctcgaccccctggcgtacgaaatttggatgtgtattgttttcgcgtatatcggggtgagcgttgtgctgttcttggtctctcgattctctccatacgaatggcactcagaggagttcgaagaagggagagaccagactacctctgatcagtctaacgaattcggtatatttaactctctgtggtttagcctgggagcatttatgcagcagggatgcgatattagcccaaggtcactttccggccgcattgtcggaggggtatggtggttcttcaccctgattattattagcagctataccgccaatctggctgcatttctgaccgttgagcggatggtttcgccgatcgagtcggcagaagaccttgcaaagcagaccgagattgcatatgggaccctggaggctggatcaaccaaggaattcttcaggcggagcaagattgcagtatttgagaagatgtggacttacatgaaatccgctgagccatctgttttcgtaagaaccactgaagagggcatgataagggtgcgaaagtcaaaggggaagtatgcgtacctgttagaatcaactatgaacgagtatatcgaacagaggaagccctgcgacacaatgaaagttgggggcaaccttgactcaaagggctacggaattgccactccaaaagggtcggctctgcgcaatcccgttaaccttgcagtgttgaagctgaatgaacagggccttctcgataagttgaagaataaatggtggtacgataaaggtgagtgcggctcaggtggcggggacagcaaagataagaccagtgcactgtctttgtcaaatgtcgccggtgtcttctacattctgataggcggcctcggccttgctatgctggtcgctctgatcgagttctgctacaagtcccggtccgagtctaaaagaatgaagggattttgcttaattccccaacagtctatcaacgaggcaattcgaacctcaaccctcccaagaaacagtggggccggcgccagctctggggggtcaggggagaatggacgagtggtctctcacgatttccccaaaagcatgcagagcataccgtgtatgagccattctagtggcatgccacttggagctactgggctgtag

SEQ ID NO: 118523 - DNA, 2652 bp, synthetic construct
  misc_feature 1..2652: note = Description of Artificial Sequence: Synthetic coding sequence
  source 1..2652: mol_type = other DNA
atgcagaaaatcatgcacataagcgtccttttgagtccagtgttgtggggattgatcttcggcgtatcttccaactctatccagattggcggactgtttccgagaggtgccgaccaggagtactccgccttccgcgtaggcatggttcaattttccacttcagaattccgcctaactcctcacatagacaatttagaagtggccaacagctttgccgtgacaaacgcattctgctcccagttcagcagaggagtttacgccatttttggcttctacgataagaaaagcgtgaacaccattacttctttctgtgggaccctgcacgtttccttcattaccccctcctttcctacagatggtacgcatccctttgtgattcagatgcggcccgaccttaaaggcgccctgctgagtctgattgaatattatcagtgggataaattcgcttacctttatgattccgacagagggctgagcactcttcaggcggtgctggattccgccgccgagaagaagtggcaggtgactgccatcaacgtgggcaacataaataatgacaagaaagacgagatgtatcgatccctgttccaggacctcgaactgaagaaagagaggagggtgatcctggattgtgaacgcgataaggtaaacgacatagtcgaccaggtgattacgattggcaagcacgtgaaaggataccactacataatcgcgaatcttggattcactgacggagatctgctgaagattcagtttggcggggccaatgtgtcaggctttcagatcgtcgactacgatgacagcctggtatctaaatttatcgagaggtggagcacactggaagaaaaagagtaccctggcgcacacaccactactatcaagtatacatccgcactgacctatgacgccgtgcaggtgatgaccgaggctttcagaaatctgcgcaagcagcgcattgagattagccgaagaggcaatgctggggactgtttggctaaccctgccgttccctggggccaaggcgtagaaatcgaacgggccctgaaacaggtgcaggtagaaggcctttccgggaatattaagtttgatcaaaacggcaaaaggattaattataccatcaacattatggagctgaagacaaatgggccccggaagattggctactggagcgaggtcgacaagatggtggtgaccctcacggagctgccctctggtaatgatacgagcggcctcgagaacaaaacagtggtagtgacgaccattttggagtctccctatgtgatgatgaagaaaaaccacgaaatgctggaaggtaacgaacggtatgaaggatattgtgtcgacctggccgccgaaatcgcaaagcactgtggatttaaatataagctgactattgtcggcgatggcaagtacggcgccagggatgccgatacaaagatttggaacgggatggttggcgagctggtgtatgggaaggccgatattgctatcgctccgttgactattaccttggtgcgggaagaggttattgacttcagcaagccatttatgtctctaggaattagcattatgatcaaaaagcctcagaagtctaagccaggggtgttcagcttcctggaccccctagcttatgaaatatggatgtgtatcgtatttgcctatattggagttagcgtggttttatttttagtgtccagattcagcccctatgagtggcacactgaggagtttgaggacgggcgagagacccagtcttcagagagcacaaacgagttcgggatattcaatagcctctggttttctttgggggctttcatgcaacaggggtgcgacatctctccccggagcctgtcagggaggatagtcgggggggtctggtggttcttcacattgatcatcatttcatcatacaccgcaaacctcgccgctttcttgaccgtggagaggatggtgtctcctatcgagagcgctgaggatctctcgaagcaaacggagattgcctatggtacccttgattccggctcgacaaaggaattttttagaagatccaaaatcgctgtctttgataagatgtggacgtatatgagatcggcagagccttcagtgttcgttcggaccacagccgagggagtggcaagagtgaggaagagcaaaggcaaatacgcatatctactcgaaagtaccatgaatgaatacattgagcagaggaaaccctgcgacacaatgaaggtcgggggcaacctggatagcaaaggttatggcatagccacccctaaaggttctagcctacgtaatgctgttaacctggccgtgctcaagctcaatgagcagggtttgctggacaaattaaagaacaaatggtggtatgacaaaggggaatgtggcagcggaggaggcgacagcaaggagaagacctccgcgctgagtctatcaaacgtggccggggtcttttatatactcgtaggtggattaggtctcgccatgctcgtagctcttatagaattctgctacaagtcccgggctgaggctaagcggatgaaagtggccaaaaatgcccagaacataaatcctagtagctctcagaattcccagaacttcgccacgtataaggaaggatacaacgtgtacggcattgagtcagtcaaaatatag

SEQ ID NO: 118524 - DNA, 2652 bp, synthetic construct
  misc_feature 1..2652: note = Description of Artificial Sequence: Synthetic coding sequence
  source 1..2652: mol_type = other DNA
atgcaaaagattatgcacatttccgtgctactgtcccctgtgctttggggcctcatctttggcgtgtctagcaacagcatccagattggaggtcttttcccaagaggagctgaccaggagtacagtgcattcagagtcgggatggtgcaattttctacaagcgagtttcgacttacaccacatatagataatctggaagttgcgaactcatttgctgtcacaaatgcattctgttcacagttttcccggggagtctacgccatttttgggttttacgacaaaaaatctgtgaacactatcacctccttttgcggaacactgcacgtttccttcattaccccttccttccctaccgatggaacccacccttttgtcatccagatgaggccagacctgaagggcgccttgttgtctctcatagagtattatcaatgggacaagttcgcctacttatacgatagtgaccggggtctgtcaaccctccaggcagtgttagactctgccgcagagaagaagtggcaggtcaccgctatcaatgtcgggaatattaacaacgataagaaagacgaaatgtaccggtctctgttccaggacctcgagctgaagaaggagcgccgagtcattctcgattgtgaacgcgacaaagttaacgacatcgtggaccaagtaatcaccatcgggaagcatgtgaagggctatcactatatcattgccaaccttggctttaccgatggcgacttgctgaagattcaattcggcggggccaacgttagtggattccaaatcgtcgactacgacgactctttggtaagcaagttcattgaaagatggagtacccttgaagagaaggaatatcctggtgcccatactacgacaatcaaatacaccagtgctcttacctacgacgcagttcaggtgatgaccgaggccttccggaaccttaggaagcagaggatcgagatatctcgtagaggcaacgccggggactgtcttgccaaccccgcggtgccttgggggcagggagtggaaattgaacgagctcttaagcaggtacaggtggaaggccttagtggcaacattaaatttgatcagaacggcaagcggataaactatactattaatatcatggaactgaagaccaacggtcctcgaaaaatcggttactggagtgaggtcgacaagatggttgtcactctcaccgagctgccctcaggaaatgacacttccggtcttgagaacaaaaccgtagtggtcactacaatcttggaaagcccttacgtgatgatgaagaaaaatcacgagatgcttgagggaaatgagcgttatgagggctactgcgtcgaccttgctgccgagattgccaaacactgcggattcaagtacaaactgaccatcgtgggggatgggaagtatggagcccgcgacgccgacaccaagatctggaacggaatggttggcgaattggtctatggaaaggctgatattgccatcgccccattaacaatcacgcttgtacgtgaagaggtcatagatttttcaaagccctttatgagtctgggaatctctataatgatcaagaagccacagaaatccaaacctggtgtcttcagcttcctggatccacttgcgtacgagatctggatgtgtatcgtgttcgcttacataggcgtgtccgttgtgctattccttgtgtctagatttagcccttatgagtggcataccgaggaattcgaggatggtcgcgagacacagagcagtgagtcaaccaatgagtttgggatctttaatagcttgtggttttccctgggcgccttcatgcagcagggctgcgacatatcccccaggagcctctcaggcagaattgtcgggggagtgtggtggttctttaccctcatcataatttccagctacacagccaacctggcagcctttctcacggtcgaacgcatggtcagtccaatcgaatcagccgaagatttatcgaagcagactgagatcgcatacgggacgctcgattccggtagcaccaaggagttcttcagacgctcaaaaattgctgttttcgacaaaatgtggacatacatgagatccgcggagcccagcgtgttcgtccggacaacggcagaaggagtggcacgggtgcgcaagtccaagggtaagtacgcgtatctcctggagagtactatgaacgagtatatcgagcagaggaagccatgcgataccatgaaggtgggggggaacctggatagcaaggggtatggaatagccactcccaagggctcttccctgcgaacacctgtgaatctcgcggtgctgaaacttagcgagcagggggtcttagacaaactgaagaataaatggtggtacgataaaggtgagtgcggggctaaagactcaggaagtaaagagaagacgtcagcactatctctttccaatgtcgctggcgtcttttatattctggttggcggactgggcttggccatgctggttgcacttatcgaattctgctataagtctagggctgaggccaagcgaatgaaggtggctaagaacgcacaaaatataaatccctcttcttcccagaactctcaaaacttcgctacatacaaagagggctataatgtctacggaatagaatccgtaaagatctag

SEQ ID NO: 118525 - DNA, 2193 bp, synthetic construct
  misc_feature 1..2193: note = Description of Artificial Sequence: Synthetic coding sequence
  source 1..2193: mol_type = other DNA
atggtgcagttttccacctccgagttccggttgaccccgcacatcgataatttagaagtcgccaactcattcgcagtcaccaacgccttctgtagtcaattcagtaggggggtctacgcaattttcggcttttacgataagaagtctgtcaacactattaccagcttttgcgggactctccacgtgtcattcataacccccagctttcccacagatgggacacatccatttgttatccagatgaggcccgatctcaagggtgctctcttaagcctgatcgagtactaccagtgggacaagtttgcatatctgtatgacagtgacagagggctctcgacgctgcaggccgtgttagattccgcagcagaaaagaagtggcaagtaaccgccatcaacgtgggtaatatcaacaatgacaaaaaggacgagatgtataggagcctcttccaggatctggaactgaaaaaagaacggagagtgatcctggattgcgagcgcgacaaagtcaatgatatcgttgatcaagttatcaccattggcaagcatgtgaaaggctaccattatattattgccaacttgggcttcaccgacggagatctgttgaaaatccaattcggcggcgctaatgtctccggattccagatagtcgattatgatgattcactggtgtccaagttcatcgagcgttggtccaccctggaagagaaagagtaccccggagctcacaccaccactatcaagtacacttccgcactaacctatgatgcagtccaagtgatgaccgaggctttcagaaatcttagaaaacagagaatcgagataagccgccgcgggaacgcaggagactgcttagccaatccagctgtgccctggggacaaggcgtcgagatcgaacgcgctttaaagcaggttcaggtggagggcctttcagggaacatcaaattcgaccagaatgggaaaaggatcaactataccatcaacattatggaactcaagaccaacggccctagaaaaatcggctactggagcgaagtcgacaagatggttgtgaccctgaccgaattgcccagcggcaacgacactagtggcttagagaacaagaccgtagtggtcactactatcttggaatctccttatgtaatgatgaaaaaaaaccacgagatgctggaggggaacgagaggtacgagggctattgcgtagacctcgcagctgaaatagcgaagcattgcggattcaagtacaaactgacgattgttggtgacggcaaatacggggccagggatgcagataccaagatttggaatggcatggtgggcgagcttgtgtacgggaaagccgacatcgccattgctcctctgacgattacactggtcagagaggaagtgatcgatttctctaagccttttatgtcactcggcatctctataatgatcaagaagcctcagaagtctaagcctggagtgttcagtttcctagacccgttagcatatgagatctggatgtgcatcgtattcgcttacatcggagtctccgtagtgctgtttctggtctctcgattctctccttatgagtggcataccgaagaatttgaggacggtagagaaacacagtcttcagagagcactaatgaatttgggatttttaatagcctgtggttctctttaggtgccttcatgcagcaggggtgcgatataagtccaaggtcattgtcaggacgaatagtgggcggagtgtggtggttcttcaccctaatcattattagctcatacactgcaaacctcgcagcattccttactgtggaacggatggtgtcacctattgaatccgcggaagacctgtctaaacagactgagatcgcctacggcacactggacagcggcagtactaaggagttttttcgcaggagcaagatcgccgtgttcgataaaatgtggacctatatgcgaagcgcagaaccctcagtattcgtgcgcaccaccgcagagggagtcgctcgggtgaggaaaagcaaagggaaatacgcctacctactcgagtccaccatgaatgagtacatagagcaaagaaaaccctgcgataccatgaaggttggaggaaatttggatagcaaagggtacggcattgccactccaaagggtagtagcttgtctggtgtgaccttcaagaccctcctattcgtctgttgtgggtag

SEQ ID NO: 118526 - DNA, 297 bp, synthetic construct
  misc_feature 1..297: note = Description of Artificial Sequence: Synthetic coding sequence
  source 1..297: mol_type = other DNA
atgaacgaatatattgagcagcggaaaccttgtgatacaatgaaggttggaggtaacctggacagtaaaggatacggaattgcaactcctaagggcagttcgctttctggagtaaccttcaagacactgatttgcctcttgtggattaacgcagttaatcttgcagtactgaaacttaacgagcaaggactgctcgataagctcaaaaataagtggtggtacgacaagggtgaatgcggctctggaggaggagattctaaaaacccgagcaaatcttgcagcatcgaaacccagtag

SEQ ID NO: 118527 - DNA, 2511 bp, synthetic construct
  misc_feature 1..2511: note = Description of Artificial Sequence: Synthetic coding sequence
  source 1..2511: mol_type = other DNA
atggtgcagtttagtaccagcgaattccgcctcacacctcacatcgataatctagaggttgccaacagttttgctgtgactaatgccttctgctcccaattttccaggggcgtgtacgccatcttcggcttttatgataagaaatcagtcaacaccatcacctctttctgtggcaccctgcatgtcagcttcataacccccagcttcccgactgacggaacccatccattcgtgatccagatgcgacccgacctcaaaggtgctttattaagcctgatcgagtattaccagtgggataaatttgcctacttgtacgattctgataggggattgtccaccttacaagcagtgctggactccgccgccgaaaagaaatggcaagttacggccattaacgtggggaatatcaataacgataagaaagacgagatgtataggtctcttttccaagatcttgaactgaagaaagagagacgcgtcatcttggattgcgaaagagacaaggttaatgatatagtggaccaagttatcaccattggcaagcatgtgaagggataccactatatcattgctaatctaggattcaccgatggcgatttgctgaagatccagttcggtggtgcaaacgtgtccggatttcaaatcgtggactacgatgattccctggtcagtaaatttatcgagcggtggtctactctggaagagaaggaatatcccggagctcacactaccacaatcaagtacacctctgccctgacctatgacgccgtgcaagtaatgaccgaggcatttaggaacctgagaaagcagcgcatcgaaatttctcgtcggggaaatgctggagattgtcttgcaaatcccgcggtgccatgggggcaaggagtggaaatagagcgggcccttaagcaggtgcaggtggaaggactttcggggaatattaagtttgatcagaacggcaagcggattaattataccataaacataatggagctcaagacaaacgggccacgcaagattggctactggtcggaagtggacaagatggtggtgaccctgacagagctgccaagcggtaacgacacgtcaggcttggaaaataagacagttgtggtgactacaatcctggaatccccatatgtgatgatgaaaaaaaatcatgaaatgttggagggaaatgaacgatatgaagggtattgcgtggatctggccgctgagattgccaagcactgtggcttcaagtacaaactgacaatagtcggagacgggaagtatggagcgagggacgccgacaccaaaatctggaatggtatggttggcgaactggtttacgggaaggcagatatcgcgatcgcgccactcaccattacactggttcgagaagaggtaatcgatttcagtaaaccgttcatgagtctcggcatctccataatgataaagaagcctcagaaatctaaacctggcgtcttctccttcctggatcctctggcttacgaaatttggatgtgtattgtgttcgcctatatcggagtatctgtcgttctattcctggtctccagattcagcccctatgagtggcacacagaagagttcgaggacggtagagagacacagtcctccgaatccactaacgagtttgggattttcaatagcctctggttcagtctcggcgcatttatgcaacaaggctgcgacatctctccaagatctctgagcggacgtatagttggcggcgtctggtggtttttcacgctgattataatttcctcctacacggccaatctggcagcatttctgaccgtggaacgtatggtgtcgcctatagaaagtgctgaggacctctcaaaacaaacagaaattgcgtacggtacgttggactcgggctccactaaggaattcttccgccggtcaaaaattgccgtgtttgataaaatgtggacctacatgagatcagctgagccatcggtgtttgtccggacgacagctgagggagtagctagagtgcgcaagtcaaaagggaagtatgcatacctcttggagtcgaccatgaatgaatacatcgaacagagaaagccctgcgatactatgaaggttggaggcaatctcgatagcaagggatatgggatcgcaacacccaagggatcatcacttcgaacccccgtcaacctagccgtcttgaagctttctgagcagggtgtcctcgataaactgaagaataagtggtggtacgataagggcgaatgtggcgctaaagattcgggatcaaaagaaaaaaccagcgccctctcattgtcaaacgtggctggcgtgttctacattctggtggggggccttggtcttgccatgctggtagcgctcatagagttttgctacaaaagtagagctgaagcaaagagaatgaaggttgcaaagaacgcacagaatattaacccaagcagcagccaaaattcacagaacttcgccacttataaggagggttataatgtttacggcatcgaatccgtgaaaatctag

SEQ ID NO: 118528 - DNA, 438 bp, synthetic construct
  misc_feature 1..438: note = Description of Artificial Sequence: Synthetic coding sequence
  source 1..438: mol_type = other DNA
atggtacaatttagcacctcagagttccgactcactcctcacattgataacctcgaagttgcaaatagtttcgcagtaacgaacgctttttgcagccaattcagtagaggcgtgtacgccatttttggtttctacgacaaaaaaagtgtgaacactattacatccttttgcggcacacttcacgttagctttataacgcctagctttcctacagatggaacccacccgtttgtcatccagatgagaccagacctaaagggtgccctcctcagtcttatcgagtattaccagtgggacaaattcgcttatctgtacgactccgaccggggcctaagcacactgcaggcagtgctcgatagcgccgctgagaagaagtggcaagtaaccgcgattaatgtgggaaatatcaacaacgataaaaaggacgagatgtactag

SEQ ID NO: 118529 - DNA, 174 bp, synthetic construct
  misc_feature 1..174: note = Description of Artificial Sequence: Synthetic coding sequence
  source 1..174: mol_type = other DNA
atggttcaattttcaacctcagagtttaggttaacgccccacatcgacaatcttgaagtggcaaatagcttcgctgtcaccaatgctttctgctcccagttttcacggggagtgtacgccatctttggattttacgataaaaaaagcgtgaatacaataacatccttctgttag

SEQ ID NO: 118530 - DNA, 2511 bp, synthetic construct
  misc_feature 1..2511: note = Description of Artificial Sequence: Synthetic coding sequence
  source 1..2511: mol_type = other DNA
atggttcagttttccacctccgagtttaggttaaccccacatatcgacaatttggaagtggcaaattcctttgccgtcacaaatgccttttgttcgcagttttcccgcggggtgtacgctatcttcgggttttatgacaagaagtccgtgaacacaatcactagcttttgcggtactttgcacgtcagttttattactcctagctttccgaccgacggtacacatccttttgttatccaaatgagaccggatctcaaaggcgcactgttgagcttaatcgaatactaccaatgggacaaattcgcatatctgtacgatagtgatcggggcctcagcacactgcaagccgtattggactctgctgccgaaaagaaatggcaggtcaccgccataaatgtcgggaatattaataatgacaagaaagacgagatgtacaggtccttgttccaggaccttgagctcaaaaaagagcgccgtgttatattggactgtgagcgggacaaggtgaatgacattgtggatcaggtgatcactattggcaaacacgtaaagggctatcactacatcatcgccaacttaggatttactgacggggacctgttgaaaatccagttcggaggggctaacgtgagtggcttccaaatcgtggactacgatgactctctagtctcgaagtttatcgagcgatggtccacattggaagagaaagaatatccgggggcccatacaacaaccatcaagtacaccagcgccctgacatacgacgccgtgcaggtgatgacagaagctttccggaaccttcggaagcaaaggatcgagatatctcgccgcggcaacgctggcgattgcttagcaaatcctgctgtcccttggggccagggcgttgagattgagagggcactgaaacaagttcaggtggaaggcctgagcggcaatattaagttcgatcagaacggcaagagaatcaattatacgattaatattatggaactgaagactaatggacctaggaagattggatattggtctgaagttgataagatggttgtaacccttaccgaacttccttcaggcaatgatacaagtggtctggagaataagacggtcgtggtaactaccattctggagtctccctatgtcatgatgaagaagaatcacgagatgctcgaagggaacgagaggtacgagggatactgtgtggatctggccgccgagatcgcgaaacactgcggctttaagtataaactgaccatcgtaggagatggtaaatacggagctagagacgctgacaccaagatctggaacgggatggtcggcgaattggtgtatggaaaggccgacatcgccatagctcctctaactattacacttgttcgcgaggaagtgattgacttctccaagccctttatgtctctgggtatttcaataatgatcaagaagcctcaaaagtccaagcctggcgtgttttcttttctggatcctctggcgtacgagatctggatgtgcatcgtgtttgcttacattggcgtgagtgttgtgctgttcttggtgagcagattttccccttatgaatggcacacagaggaattcgaggatggccgagagacgcagagtagcgaatctactaacgagtttgggatttttaactccttgtggttctccctcggggctttcatgcagcagggctgtgatataagtcccagaagtctgtcaggccggatcgtgggtggagtgtggtggtttttcaccctaattataataagctcgtacactgctaacctggcggcatttttaaccgtggaacgaatggtttctcccatcgagagtgcagaggatctgtccaagcagacagaaattgcttatggcacgctcgactcaggttcaaccaaggaattctttcggcgctccaaaattgccgtatttgataaaatgtggacatatatgcggagcgctgaaccttcggttttcgtaagaacgactgccgaaggagtagctagagttcggaagagtaaaggcaaatacgcctatcttctagagtccacgatgaacgagtacatcgagcaaagaaagccctgtgacacaatgaaggtaggaggaaatcttgactctaagggttatggcatcgcaactccaaaggggagctctctgaggacgcccgtaaatctggctgtactgaaactctctgaacagggcgtcttagacaaactcaagaataaatggtggtatgataagggtgagtgcggtgctaaggattccggatctaaagaaaagacaagcgctctctccctgagtaatgtcgccggagtgttttacatattagtcggcggcctcgggttagccatgctggtcgctctaatagaattttgctacaagtcacgggcggaagccaagcgaatgaaagtcgcgaaaaatgcccaaaacatcaatccgagctcctcacagaactcccagaacttcgccacctacaaggagggctacaatgtgtacggcattgaatctgttaagatctag

SEQ ID NO: 118531 - DNA, 378 bp, synthetic construct
  misc_feature 1..378: note = Description of Artificial Sequence: Synthetic coding sequence
  source 1..378: mol_type = other DNA
atgcagaagattatgcacatctctgttttactcagtcccgtgctctggggactcattttcggggtttctagcaactcgattcagatcggaggactgtttccccggggcgccgatcaagagtattccgcatttcgggtgggcatggtgcaattttctacgagtgagttcaggctgacgcctcatatcgacaaccttgaagtggcgaactcctttgccgttaccaacgctttttgctcccaattctcaaggggcgtttacgccatcttcggattttatgataaaaaaagtgtgaatactatcactagcttttgtggtacactccatgtgagcttcatcaccccttcattccctacggacgggacgcacccttttgtttag

SEQ ID NO: 118532 - DNA, 147 bp, synthetic construct
  misc_feature 1..147: note = Description of Artificial Sequence: Synthetic coding sequence
  source 1..147: mol_type = other DNA
atgcagaagataatgcatataagcgtgctactcagtccagtgctgtgggggctcatttttggagtgtcaagcaattctatacaaataggaggcctgttccctagaggcgctgaccaggaatactcagccttccgcgttggtatgtag

SEQ ID NO: 118533 - DNA, 3030 bp, synthetic construct
  misc_feature 1..3030: note = Description of Artificial Sequence: Synthetic coding sequence
  source 1..3030: mol_type = other DNA
atggaagctctgacgttgtggctgctgccgtggatttgccagtgcgtgtctgtgagggccgattccattatccacatcggagctatctttgaggagaatgctgcaaaggacgaccgggtgtttcaattggccgtgagtgatctttcgctgaacgatgatatactgcaaagtgagaaaatcacctactctatcaaggtcatcgaagctaataatccttttcaggcggtgcaggaggcatgtgatttaatgacccagggaatcctcgcattggtaacttctacaggctgtgcctcagcgaatgctctccagagccttactgatgcaatgcacattcctcacctgtttgtccagagaaacccaggaggaagtcctagaaccgcctgccacctgaacccctccccggatggtgaagcctacaccctggccagcagacctcctgtccggctgaatgacgtgatgcttagactggtgactgagctgaggtggcagaagtttgtcatgttctacgacagtgaatatgacatccgcggtctccagtccttcctggatcaggcaagcaggctggggttggatgtgtccttgcagaaggtggataaaaatatatcccacgtcttcacctcccttttcactacgatgaaaacagaggaacttaaccgctaccgagacacgcttcgccgtgcaatactgttgttgagcccccagggcgcccactcctttattaacgaagcagtggagactaatttggccagtaaagattcccattgggtctttgtgaatgaggagattagcgaccctgaaatactagacctcgtgcattctgcacttggtcggatgacggttgtcaggcagattttcccttcggccaaggacaaccaaaaatgcacacgtaacaatcatcgaatcagtagcctcttgtgcgatccccaagagggctacctacaaatgctgcagatctccaacctttacctgtacgacagtgtcctgatgctggcaaacgcattccacagaaaactggaggatcggaagtggcactcaatggcaagcctgaattgcattcgaaagtctaccaaaccgtggaatggaggaagaagcatgcttgacaccataaagaaagggcacatcacagggctgaccggggtgatggagtttcgagaagattccagtaacccttatgtgcaatttgagatcctgggaactacatactcagagaccttcgggaaggacatgcgcaagctggctacatgggattctgaaaaagggctgaatggctcactccaggagagaccgatgggtagccgccttcaggggttgactctaaaggtcgtgacagtcctagaagaacctttcgtgatggtggccgaaaacatcctgggccagcctaaacggtacaagggattttcaatagacgtgctggacgcactggcaaaagcgctgggttttaagtatgaaatttaccaagcacctgacggacgctatgggcatcagcttcataatacgtcttggaacgggatgattggtgagctgatctccaaacgggcagatctcgcgatttctgccattacaatcacacccgagagggaaagtgtcgtcgacttttcgaaacggtatatggactactcggtgggaatcctgattaaaaagcctgaagaaaagatcagcatcttctcgctctttgcacccttcgactttgctgtgtgggcctgcatcgcagctgctattcccgtggttggagtgctgatttttgtgcttaaccgtattcaggccgtgagagcacagtccgctgcacagccgaggccaagtgcttctgccacactgcacagcgcgatctggatcgtgtatggggcttttgtccaacaagggggcgaaagctctgtgaactcaatggccatgagaattgttatgggttcatggtggctttttacactcatcgtgtgctcctcgtacactgcgaacctggccgcgttcttgactgtctctaggatggacaaccctattagaacatttcaggacctgagcaaacaggtggagatgtcatatggtactgtgcgggacagtgccgtttatgagtacttccgggcgaaaggaacaaacccactggaacaagatagtaccttcgccgagctctggcgcacaatatcaaaaaatggcggcgcggacaattgcgtctcctctccatcagaaggtattcggaaggctaaaaaaggaaattatgcttttctctgggatgtcgcggtggtcgagtacgctgccctcaccgatgacgactgtagcgtcaccgtaatcggtaatagtatctctagtaagggctatggtatcgccctgcagcatgggagcccatacagggatctgtttagtcagcgaattttggaactgcaagatacaggggatcttgacgtgctcaaacagaaatggtggccgcacatgggaaggtgtgacttaacaagccacgcctccgcgcaggccgacggcaagtcattgaagctgcatagttttgcgggcgtgttttgcatcttggccataggcctactcttggcctgcctggttgccgcccttgagctctggtggaacagtaatcggtgccaccaggagaccccaaaagaagacaaggaggtgaaccttgaacaagttcaccgccgaatgaacagtctgatggatgaggatattgctcacaagcagatttcccccgcctcaattgagctgagcgcactcgaaatgggcgggttggcaccaacacaaaccctcgagcccacccgggagtaccaaaatacacagctatcagtcagcacttttctccccgaacagtcctcgcacgggacgtctcggacactctccagtggaccatctagcaacctgccactcccactttctagcagcgctacaatgccctccatgcagtgcaagcatcggagcccaaatgggggtctgttccgccagagcccggtgaagacccccataccgatgtcttttcagcccgtgccagggggagtcctcccagaggccctcgatacgtctcatggcactagcatttag

SEQ ID NO: 118534 - DNA, 1743 bp, synthetic construct
  misc_feature 1..1743: note = Description of Artificial Sequence: Synthetic coding sequence
  source 1..1743: mol_type = other DNA
atgggttcccggctgcaaggcctgaccttgaaagtagtgactgtcctcgaagagccatttgtaatggtggccgagaatatactaggacagccaaagaggtacaaggggttctctatcgatgtgctagatgcactggctaaagctctaggctttaagtacgaaatttatcaggctcccgacgggcgttacggacaccagttgcacaatacatcctggaacggaatgataggcgagttgatctccaaaagagcggaccttgccatctctgcaattactatcactccagaaagggaatccgtggtggacttttccaagcgctacatggactatagtgtgggtatcctcatcaagaagcctgaggaaaaaataagtatcttcagcctcttcgcccccttcgattttgcagtgtgggcttgcatcgcagctgctatccctgtcgttggtgtgttaattttcgtcctaaataggattcaggccgtccgcgcccagtccgccgcgcagcctcgtcccagtgctagcgccacactgcatagtgccatttggatagtgtatggtgcctttgtgcaacagggcggcgaatcatccgtaaactctatggcaatgcgaattgtgatgggcagctggtggctcttcaccttaatcgtatgtagcagctatactgccaacttggccgcttttcttactgtgtccagaatggacaaccctatccggacattccaggacctgtcgaagcaagtggagatgtcatacggtaccgtgagagactcggcagtgtatgagtattttcgcgctaagggtaccaaccctcttgagcaggattctacatttgccgagttatggcgcaccatatcgaagaacggcggggccgacaactgtgtctcatctccttctgaaggtatccgcaaagccaagaaaggcaactacgcctttttgtgggacgtggctgttgtggagtatgctgccctgacagacgatgattgttctgtgaccgtgatcggcaactcaatctctagtaaagggtacgggatcgctctgcaacacggatctccgtaccgtgatcttttttcccaaagaatccttgaactgcaggacaccggtgacttagatgtgcttaagcagaaatggtggccgcacatgggtcgatgtgacctcactagccatgcttctgcccaggctgatggaaaatcgctcaagttgcacagcttcgccggagtcttctgcatcctggccataggattattgctcgcctgtctggtggccgcattggagctgtggtggaattcgaacagatgccaccaggagactcctaaggaagataaggaggttaatctggagcaggttcatagaagaatgaatagcttaatggatgaggacatcgcccacaaacagatcagccctgccagtattgagctatctgcgctagaaatgggtggtctggccccaactcagaccctagagccaacccgcgagtaccagaacacccagttatctgtctccactttcctgccagagcagagtagccacggaacttcaagaaccctgtcttcagggcccagcagcaacctgccacttccattatcatcttccgccacaatgccaagcatgcagtgtaagcatcggtcacctaatggcggtctgtttagacagtcccccgtaaagacaccgattcccatgagctttcagcccgtgcccggcggtgttctcccagaggcgctggacacgtcacacggaacatcaatttag

SEQ ID NO: 118535 - DNA, 3024 bp, synthetic construct
  misc_feature 1..3024: note = Description of Artificial Sequence: Synthetic coding sequence
  source 1..3024: mol_type = other DNA
atggaggttttcccttttcttctcgtcttatcagtctggtggtcacggacctgggactctgccaacgccgactcaataatccacattggagccatcttcgacgagagtgcaaagaaggacgacgaagtatttcgcacagccgtgggcgaccttaaccagaacgaggaaatattgcaaaccgagaagattacattctcagtgactttcgtggacggcaacaatccattccaagctgtacaagaggcatgtgagttgatgaaccaagggatactggcgctcgtgagtagcataggatgtactagtgcggggagcctgcaaagcctggcagatgccatgcatataccccacctgtttattcagaggagcaccgccgggacccccagatctggatgcggattgacgaggagtaacagaaatgatgactatactttgtctgttaggccgcctgtttacctgcacgatgtaatactgcgtgtggtgacagaatatgcgtggcagaaatttatcatcttttacgatagcgagtatgatattcggggtatccaggagtttctggataaagtgagccagcagggaatggacgttgcgctgcagaaggtggaaaacaacattaataaaatgattactactttgtttgataccatgcgaatcgaggagcttaacaggtatcgggacacacttcggcgagcgatcctcgttatgaaccccgcaaccgccaaatcatttataactgaggtagtcgagacaaacttagtcgcctttgactgccattggatcataattaacgaggaaatcaacgatgttgacgtacaggagttggtccggcgctccattgggaggctcacgatcatcaggcagacatttccagttccgcagaacatttcccagcgatgctttcgcggtaatcacagaatttcttcaactctttgtgatccaaaggatccatttgctcagaatatggagatttctaacctctacatctacgataccgttctcctgttggctaatgcttttcacaagaaactcgaggacagaaagtggcactcaatggcttctctgtcatgtataagaaaaaatagtaaaccatggcaaggaggacggtccatgctggagactatcaaaaaaggaggtgtttcaggtctgacgggagaattagaattcggagagaacggcggcaaccctaatgtgcatttcgaaatcctcggcacaaattacggcgaggagctcgggagaggcgtgcgcaaactggggtgctggaacccggtaactggcttgaacggatctttgacagataagaagcttgagaacaacatgcggggggtagtgctgagagttgtgaccgtgctcgaggaaccttttgtgatggtcagcgaaaatgtgctgggtaagccaaaaaagtatcagggatttagcatcgacgtgctggacgcactgtcgaattacctcggctttaactacgagatttatgtggcccctgatcacaaatacggtagtcctcaagaagacgggacctggaacgggctagtcggagagttggtctttaagagagctgatattggcattagcgctttaacaattacacctgatagagaaaacgtggtggacttcaccactcgttacatggattactcagttggggtcttgctgcgacgggctgagaaaacagtggatatgtttgcctgtttggcaccgtttgatctgtcactctgggcatgtatcgccggaacggtcctcctggtaggactcctggtgtacctcttaaactggctcaatcctcctcggctccagatgggttccatgacttctaccacgctatacaattccatgtggtttgtctacggaagtttcgtgcagcagggtggcgaggtaccctacaccacactggcgaccagaatgatgatgggagcctggtggttgttcgctctcatagtcatctcttcatatacggctaatcttgctgccttcttgacaatcacgcggatcgagtccagcattcaatcgcttcaggacctgtctaaacagaccgagattccctatggtacagtgctggactccgccgtctacgaacatgtgcggatgaagggcctgaacccctttgagcgggacagcatgtatagccagatgtggagaatgattaatagatccaatgggtctgaaaataacgtgcttgagtcccaggctggaatccagaaagtcaaatacggcaattacgcatttgtttgggacgcagctgtcctcgaatacgtggctatcaacgaccctgattgctccttctacaccatcggcaataccgtggcagaccgaggctatgggatcgccctgcagcacggatccccctatcgggacgtgttttctcagaggattctggagttgcagcagaatggcgatatggacatcctgaagcacaagtggtggccaaaaaatggccagtgtgatctgtattcctcagtggacactaagcagaagggtggggctcttgacatcaagtcttttgctggtgtcttctgtatcctggccgctggaatagtcctgtcttgttttatcgctatgctcgaaacttggtggaacaagcgaaagggatccagggtgccaagcaaagaagatgataaggagatcgaccttgagcacttgcatcgccgcgtgaattccctgtgcactgacgacgattcaccccataagcagttttctactagtagcattgacttgacacctctggacattgataccctgcctacccggcaagctctggagcagatctcggattttcgcaacacccatatcaccaccaccaccttcattccggagcaaatccagacattgtcccggacgttgagcgcaaaggccgcaagtgggtttacttttggcaatgtaccggagcaccggaccggaccctttagacaccgggccccgaacggaggattcttccggtctccaatcaaaactatgtcatcaatcccataccagccaacacccacactcgggctcaacctcggaaacgatcctgatcgcggcacatccatctag

SEQ ID NO: 118536 - DNA, 2739 bp, synthetic construct
  misc_feature 1..2739: note = Description of Artificial Sequence: Synthetic coding sequence
  source 1..2739: mol_type = other DNA
atggaggtgtttccgttcctcctggtgctgtcggtgtggtggagccggacatgggattcagcaaacgcagattcaatcatccacatcggcgccattttcgacgagagcgctaagaaggacgacgaggtgtttaggacggcagttggagatctgaaccagaatgaggaaatcctccagaccgagaagatcactttctcagtaacctttgtggatggaaataaccctttccaggcagtccaagaagacattagagggatccaggagtttctggataaagtctcgcagcaggggatggacgtcgctctgcagaaggtcgagaacaatattaacaagatgatcaccacactgtttgatacaatgaggatcgaagagctgaaccggtacagagacactcttagaagagccatccttgttatgaacccagcaacagccaaatcgttcatcacagaggttgtagaaactaatctggtggcattcgactgccactggatcatcataaacgaggagatcaacgatgtggatgtgcaagaactggtgagacggtcgataggccgcctgaccatcatcagacagacgtttcccgtgcctcagaacataagccagaggtgttttaggggaaatcacaggatttcttcaactctgtgcgaccctaaagatccatttgcacaaaatatggagattagtaatctctatatatacgatactgtcctgctgctcgcaaacgctttccataaaaagctcgaggaccgaaaatggcattctatggcctcccttagctgtattaggaagaatagcaagccatggcagggcggaaggtccatgttggagactatcaagaaggggggcgtctccggcctgaccggcgagttagagttcggcgagaacgggggaaatcctaatgtgcactttgagatcctgggaacgaactacggggaggaactgggcaggggcgtacgaaagcttggttgctggaacccggtcacaggactcaatggctctctcactgacaaaaagctggagaataacatgcggggtgtagtcctgcgtgttgtgacagtcctcgaggagccctttgtcatggttagcgagaacgtgctgggcaagcccaagaaatatcaggggttctcgatagacgtgctggatgctctgtctaattatctgggctttaactacgagatctatgtggccccagaccacaagtacggaagcccccaggaggacggaacatggaacggcctggttggagaactggtctttaaaagggccgatataggaattagcgctcttaccattactcctgatagagaaaatgtagtcgatttcaccacccgctacatggactattcagtgggtgttctgctgagaagggccgagaaaactgtcgatatgttcgcgtgcctggccccctttgatctctctctctgggcatgtatcgctgggacagtgctcctggtgggcctcctggtctatctgctgaactggctgaatccacctaggttgcagatgggaagcatgacctcaaccactctctataattctatgtggtttgtgtacgggtcattcgtgcagcagggcggagaggtcccttacacgaccctcgccacccgaatgatgatgggcgcctggtggctgttcgccctcattgttatatctagctatacagcaaatctggctgcctttctgacaattactcgtattgagtcctccatccagagtcttcaagatctgagcaaacaaacagagatcccatatggcacagtgctggactcggcagtctacgaacacgtccggatgaagggcctgaacccttttgagcgggactcaatgtacagccaaatgtggagaatgataaaccgcagtaatggaagcgaaaataacgtactggagagccaggccggcattcaaaaggtgaagtatgggaactatgcttttgtgtgggacgcagccgtgctggagtacgtagccatcaatgatcctgactgcagcttttacactatcgggaacaccgtcgcagatcgaggttatggcattgccctccagcacggatcaccttaccgcgacgtgttctctcaacggatactagaactgcagcagaatggagacatggatatccttaagcacaagtggtggcccaagaacggccagtgcgacctctattcttcagtagacacaaagcagaaaggcggagcgctcgacatcaagagctttgccggcgttttctgtattctggccgccggcatagtgttgtcttgctttattgctatgcttgagacatggtggaataagcggaaagggtctagggtgccaagcaaggaggatgataaagaaattgatctggagcacctccacaggagagtgaactccctctgcactgacgatgactcgcctcataagcagttcagtacttcttccatcgatttaacccctctggatatcgatacattgcccactcgccaggcgttggaacagatatctgacttccggaatactcacatcaccaccaccacatttatacctgagcagatacagaccttatcacgcacgctgagtgccaaggctgctagcggctttacattcggaaacgttccagagcataggaccggcccctttaggcacagagctcctaatggagggttcttcaggtccccgattaagacaatgtcctctattccgtaccagccgacccccactctgggccttaatttgggaaatgatccggacaggggtacctctatttag

SEQ ID NO: 118537 - DNA, 2763 bp, synthetic construct
  misc_feature 1..2763: note = Description of Artificial Sequence: Synthetic coding sequence
  source 1..2763: mol_type = other DNA
atggagcacggtacgcttttggcccagcctgggctctggacgagggacacctcttgggctttgctgtacttcctgtgctacatcttacctcaaacggcccctcaagttctaagaatcggagggatctttgagacagtagaaaatgagcctgtaaacgtggaggaactagcattcaagttcgctgttacttctattaaccgaaaccgtacccttatgcctaatacaactcttacctacgatatccagcggatcaacctgttcgacagcttcgaggcgtccaggcgtgcttgcgaccagctcgcgctcggagtggcagccttattcggaccaagccatagctcctcggtgagcgccgtgcaatcaatttgtaatgcgcttgaagtaccccacatccagacccggtggaaacatcctagtgtagataataaggatctgttttatatcaatctgtatccggactacgctgcaatctcaagggccattttagatttggtgttatactataattggaagactgtgactgttgtgtacgaggactccaccggtttgattaggctgcaggaattgattaaagccccatcaagatacaatatcaaaataaagattaggcaacttccaagcggcaataaagacgcaaagccactcctaaaggaaatgaagaagggcaaagaattttacgtaattttcgactgcagccatgaaaccgccgctgaaatcttaaaacagattttgttcatgggaatgatgacagagtattaccactactttttcacaacactcgatctcttcgctctcgacctggagctgtatcggtactcaggagtgaatatgaccggctttcggttgttgaatatcgacaacccacacgtttcatcaattattgaaaaatggtcaatggaacgactgcaggccccaccacggcccgagaccgggctcctggacggaatgatgactacagaagcagcattaatgtatgatgctgtgtacatggtggctatcgctagccacagggcttctcagttgaccgtgtcatcactgcagtgtcatcggcataagccatggcgactgggccccagattcatgaacttaattaaggaagcgactgcacgctgggacggcctgactggtcatattacgttcaacaaaacgaatggacttagaaaggactttgacctggacataatttcgttgaaggaggaggggactgagaaggcagccggcgaggttagtaaacatctgtacaaagtgtggaagaaaatcggtatttggaacagtaattcgggactcaacatgaccgattccaataaggataagtcgtccaacatcactgattctttggcaaacagaacccttatcgttaccacaattctcgaggagccttatgtgatgtatagaaagagtgacaaacccttatatggcaatgacagattcgaaggttactgtttggatctgttgaaagaactttctaatatcctcgggtttatttacgacgtgaagctcgtgcccgacggaaagtacggcgcccagaacgataagggcgagtggaacgggatggtgaaggaactgatagatcacagagcggaccttgcagtagcccctctgaccatcacctacgtgcgggagaaggtgatcgatttttctaagcccttcatgacactcggcatttccatactgtaccgcaaaccaaatggcaccaatccgggagtgttctcattcctgaacccattgtctccagatatttggatgtatgtcctgctcgcctgtctgggggtgagctgcgtgctattcgtgatcgcccgctttaccccctacgagtggtacaatcctcatccctgtaacccagactctgacgttgtcgagaacaacttcaccctcctgaatagtttctggtttggcgtcggggcgttgatgcagcagggaagcgaactgatgcctaaggctctttcaacccggattgtgggtgggatttggtggtttttcactttgataatcatcagttcctatactgccaatctcgccgcgttcctcaccgttgaaaggatggagtcaccgatagactccgccgacgaccttgcgaaacaaacaaaaatcgaatacggggccgtgagggacggaagcacaatgacattttttaagaagtccaagattagtacctatgagaagatgtgggcatttatgagctccaggcagcagaccgctcttgtcaggaactccgacgagggtattcagcgagtgctcacgaccgactacgccctattgatggaatcaactagtatcgagtatgtgacccagcgaaactgcaatctaacccaaattggcgggcttattgacagcaaaggttacggcgtgggcacccctattgggagtccttaccgcgacaagattacaatcgcgattctccaactgcaggaggagggcaaactccatatgatgaaagaaaaatggtggcgggggaatggttgtcctgaggaggacaataaagaagcctcagcattaggcgtcgagaatattggcggcatcttcatcgttctcgctgctggcctggtgttgagcgtgtttgtcgccataggcgaattcatttataaaagtcgaaaaaataacgatattgagcaggcattctgcttcttctacggcttgcagtgtaagcagactcacccgactaattctacaagcggtaccacattgtccaccgacctggagtgcgggaagttgatacgtgaggaaagaggtattcgcaagcagtcctctgtgcacaccgtctag

SEQ ID NO: 118538 - DNA, 2850 bp, synthetic construct
  misc_feature 1..2850: note = Description of Artificial Sequence: Synthetic coding sequence
  source 1..2850: mol_type = other DNA
atggagcatgggacacttttggcacagcctggactctggacccgagatactagctgggccctcctgtacttcttgtgctatatactacctcaaaccgctccgcaggtgcttcggattgggggcatttttgaaaccgtggaaaacgaacctgtgaacgtagaggaactcgcctttaagtttgcagtaaccagcatcaataggaataggaccctgatgccaaacaccacactgacatacgatatccagcggattaacctatttgacagctttgaagcatccagaagagcatgcgatcaactcgccctgggggtggcagccctgtttgggccttcccactcttcctccgtctcagccgtgcagagcatttgcaatgctctagaggttccacacatccagaccaggtggaagcatccttcagttgataataaggatctgttctatattaatctctatccagattacgccgcgatttcacgagccatccttgacctcgtcctttactacaactggaaaaccgtcaccgtggtatacgaggattctacaggtctcatccgactccaggagcttatcaaggcgccttccagatacaacattaagattaagatacggcaattaccttcaggtaacaaggatgccaagcccctgttaaaggagatgaagaaggggaaagagttctacgtaatcttcgattgttcacatgaaacagctgcggaaatactgaagcagattctgttcatgggcatgatgactgagtactaccactacttttttactacgctggatctcttcgcacttgacttggagttgtaccgctactcaggagtgaacatgacaggtttcagacttctgaacattgataatcctcacgtctcttctattattgagaaatggtccatggaacgcctacaggctcctccgaggcccgagaccggactcttggacggtatgatgaccaccgaagcagctctcatgtatgatgccgtgtatatggtggctatcgcttctcacagagctagccaactcacggtttcaagcctgcagtgccataggcacaagccctggagattaggaccccgcttcatgaatctgattaaggaggcaagatgggatgggctgaccggacatattacattcaacaagaccaacgggctgcgcaaggactttgacctggacatcatcagcctaaaagaggaaggcaccgagaaggccgcgggcgaagtctcgaaacacctgtacaaagtctggaagaagatcggcatctggaacagtaactctggactgaacatgacagactctaataaagacaaaagctctaacatcacagacagcctagcaaatagaacactgatcgtaaccaccatcctggaagagccatacgtgatgtaccgcaaaagcgacaaacccctctacggaaacgaccgcttcgaaggatactgtctagatctgctgaaggagctgagcaatatcctgggcttcatttacgacgtgaagctggttcccgatgggaaatatggagcccagaatgataaaggggaatggaatggtatggtgaaggagctgattgatcaccgagctgatttggcagtggctcctctgactataacctacgtccgcgaaaaggtaattgacttttctaaaccatttatgactctggggatcagtatcttatatcgcaaacccaatggaacgaatccgggggtcttctcttttctgaaccccttatctccggacatctggatgtacgtcttgctagcctgcttgggagtttcctgtgtgctttttgttatcgcacgtttcacgccctacgaatggtacaatccacatccctgtaatcccgactctgatgtggtggaaaacaatttcacactgctgaattcattttggtttggggtgggagctctcatgcagcagggatcggaacttatgcccaaggccttgagcacccgaatagtgggaggaatatggtggttctttaccctgatcattatctcctcctatacagcgaacttggctgcgtttctcacagtcgaacgaatggagtctccaattgactcagcagacgatctagcaaagcaaacgaagattgaatacggcgcagtccgggacggcagtaccatgacctttttcaaaaaatcaaaaatttctacctatgaaaaaatgtgggcttttatgtcatcaagacagcagacagctcttgtgcgcaatagtgacgaaggtatccaaagagtcctcacaactgactacgctctcttaatggagtctacttccatcgagtacgttacgcaaagaaattgcaacctgacacagatcgggggcttgattgacagcaaggggtacggcgtcggcacccccatcgggtctccttaccgagataagattaccatcgccattctccaacttcaggaggagggaaaattgcacatgatgaaggaaaagtggtggcggggcaacggctgtccggaggaggacaataaggaggcttccgcgctaggagtcgagaacataggcggaattttcatcgtgttagcagcgggtctcgtcttatctgtctttgttgctattggcgagtttatctataagagcagaaagaataacgatatcgaacaaaaggggaagtcaagcagaattcggttttattttcgcaacaaagtaaggtttcacgggcgcaagaaacagagccttggtgtcgaaaaatgtctgagttttaacgccatcatggaggaacttggaatcagtctcaaaaatcaaaagaagatcaaaaagaaatccagaaccaagggaaagagcagcttcacctctatcctgacctgccaccagcggcggacacagagaaaggaaacggtggcttag

SEQ ID NO: 118539 - DNA, 2616 bp, synthetic construct
  misc_feature 1..2616: note = Description of Artificial Sequence: Synthetic coding sequence
  source 1..2616: mol_type = other DNA
atggagcacggcactttgctggcgcagcccggattatggactcgcgacacgtcttgggcgctcctgtacttcctttgctacatcctaccacaaaccgcaccacaggtactgaggatcggtggcatattcgagactgtcgaaaatgagccagtgaatgtcgaggaacttgccttcaagttcgctgtgacttctataaacagaaaccgaacactcatgccgaacactaccctcacctacgacatccagaggatcaacctgttcgatagttttgaagcgtcccgaagagcatgcgaccaactggccctcggcgtcgccgctttgttcggcccaagccatagctctagcgtatctgccgttcagtccatttgcaacgctttagaagtgccgcacattcagactcggtggaaacacccatcggtggataataaagatcttttctatataaatctgtaccccgattatgctgccatatcaagggcgatactggaccttgtgttgtactacaattggaagaccgtgactgtggtctacgaggattccactggcctgattagactccaggagctgattaaggctccttcacgctataacatcaaaatcaagatccgacagctgcctagtggtaacaaagacgctaagcctctcctcaaagagatgaaaaagggcaaggaattctatgtgatcttcgattgttctcatgaaacagcagccgaaatcctgaagcagatccttttcatgggtatgatgacagagtattaccattacttcttcaccacactggatctcttcgctctcgatctagagttataccggtattctggagtcaacatgaccgggttccgattgttgaacattgataaccctcacgtaagcagtatcatcgaaaagtggtccatggagcgcctccaggccccacctaggcccgaaactgggctgctggatggcatgatgactacagaagctgcacttatgtatgacgccgtgtacatggtcgccatcgcctcacatagagcaagccagctaactgtgtctagccttcagtgtcatcgacacaaaccatggaggctcggcccccggttcatgaacctcatcaaagaagcacgttgggatggactcacagggcatatcactttcaataagacaaatggcctccgtaaggattttgatttagacatcataagcctgaaggaggaaggtacagaaaaagccgctggcgaagtgtctaagcacttgtacaaggtctggaagaaaatcggaatttggaactctaactctggcctaaacatgacggacagtaataaggacaaatcctccaatattacagattccttagctaatcgaaccttaatcgtcacaactattttggaggagccttacgtcatgtatagaaaatccgacaagccgctgtacgggaacgataggttcgagggctattgcctggacttgcttaaggagctgagcaacatccttggcttcatctacgacgttaagctggtgccggacggcaagtatggagcacagaatgacaaaggtgaatggaatggaatggtgaaggaactcatcgatcatagagctgatctggccgtggcacccctaaccattacatacgtgcgagagaaagtcatcgattttagtaagccattcatgacactgggcatctccatcctgtatcgaaaacccaatggaactaaccctggcgttttctcgtttttgaatcccctcagcccagacatatggatgtatgtgctcctggcttgcctaggtgtctcttgtgtcctttttgttatcgcgcgcttcacaccctatgaatggtacaatccacacccttgtaaccctgacagtgatgtggtggaaaacaattttactcttctgaactccttttggttcggagtgggcgccctcatgcagcagggctccgaactgatgccaaaggctctgtccaccagaattgtcggaggaatttggtggttctttactctaataattatcagttcctacacagctaaccttgctgcatttctcactgtggaaagaatggaatctcctatcgactcagcagatgacttggcaaagcagacgaagatagagtacggggctgtgagggacggctcgaccatgaccttctttaaaaaaagcaagatctccacctacgagaagatgtgggcatttatgtcttcacgacagcagacagcactggttcgcaatagcgacgagggcattcaacgagtgctcaccacagattacgctctcctaatggaatcaacctccatcgagtatgtcacacagaggaactgtaatctaactcagatcggtggactgatcgatagtaaagggtatggtgttgggactcccatcggctctccttatcgtgataaaatcaccattgccatactgcagctgcaagaagaaggtaagttgcacatgatgaaggagaaatggtggcgaggcaacgggtgtcctgaggaagataacaaagaggcgtctgcattgggcgtggaaaatattggtggtattttcattgtgcttgctgccggtctggttctgtctgttttcgtggccatcggcgagttcatctacaagtctaggaagaataacgatattgagcagcactactag

SEQ ID NO: 118540 - DNA, 2718 bp, synthetic construct
  misc_feature 1..2718: note = Description of Artificial Sequence: Synthetic coding sequence
  source 1..2718: mol_type = other DNA
atggaacacggcactcttctggcacagcccggtctgtggacacgggacacaagctgggccctgctctattttctgtgttatatactaccccagaccgctcctcaggtgctacgaattggtggaattttcgagactgtggagaatgaaccagtcaacgtagaagagttggccttcaaattcgccgtgactagcatcaacaggaatcgcactctcatgccaaacacaacactgacctatgacattcaacgaattaatttatttgattcgttcgaagccagccgacgagcctgtgatcagcttgcattgggcgtggccgctctctttggaccaagtcatagctcgtcagtttcagcagtgcagtcgatttgtaacgctctcgaggtcccccatatccagactcgatggaaacacccaagtgtggacaacaaggacctgttctacattaacttgtacccagactacgccgcgatatcacgtgctattcttgacctggtgctctactataattggaaaaccgtcaccgttgtgtatgaggacagcaccggactcataagacttcaagagctcatcaaagctcccagtcgctacaacatcaaaatcaaaatccgacagctgccttccggtaacaaggatgccaaaccactcctgaaggagatgaagaaaggcaaagagttctatgtgattttcgattgttcccacgaaactgctgcagaaattctcaagcagatcctgtttatggggatgatgactgagtactatcattactttttcacaactttggatctttttgccctggatctggagctgtataggtatagcggcgtaaacatgacaggctttcgcctgctgaatatcgataaccctcatgtcagttcaataatcgagaaatggtccatggagcgactacaggcccccccaaggcccgaaaccggactgctggacggaatgatgaccactgaggctgcactaatgtatgacgccgtgtatatggtcgctattgcgtcccaccgcgcctctcagcttacagtgagttcattgcagtgtcaccgtcataagccttggagactcgggccacggttcatgaatctgataaaagaagcgaggtgggacggccttacgggccatatcacctttaacaaaacgaatggcctgcggaaagactttgacctggatattataagcctaaaagaagaaggaactgaaaagattggcatttggaattccaactcaggcctcaacatgactgatagcaacaaggacaagagctcgaacatcaccgactctctggctaataggacactcatcgtcacaacaattctagaggagccgtacgtgatgtaccggaagagcgacaagcctctgtacggcaacgaccgttttgagggatattgcttagacctgctgaaggaattgtccaacatcctggggttcatctacgatgttaaactcgtgccagacgggaaatacggcgcacagaatgacaagggcgaatggaatgggatggtgaaggaacttatcgatcaccgcgctgatttagccgtggctcctctgactatcacttacgtgagggagaaggtcatagacttttccaagcccttcatgacactgggcatttccatcctgtatcgtaagcctaacgggacgaaccctggcgttttcagctttctcaatccactttcaccagacatctggatgtacgtcctcctggcctgcctgggagtcagttgtgtgctgttcgtcatcgcacgatttaccccctacgaatggtacaatcctcatccatgtaatcccgatagcgatgtggtggaaaacaactttaccctgttgaacagtttctggtttggggtgggagcactgatgcagcaagggtctgagctcatgccaaaggccttgagcacacgcatcgtgggtgggatctggtggttctttacgttaattatcataagcagctacactgccaatcttgcagcgttcctcaccgtggagcggatggaatctcccatcgactctgcagatgatttggctaagcagactaagatagagtacggtgccgtgcgcgacggttctacgatgacttttttcaaaaagagtaagatttccacttatgagaagatgtgggcgtttatgtcttcccgccaacagactgccctggtgcgaaactcagacgaaggtattcagcgagtactgactaccgattatgcccttcttatggaatcgacctcgatagagtacgtcacgcagagaaactgcaatctcacccagattggcggactcatcgacagcaagggatacggggtcggaacccctattggctcgccgtaccgtgacaagattactatcgcaatcctgcaactgcaggaggagggtaagcttcacatgatgaaggagaagtggtggcgggggaatggatgccctgaagaggataataaagaagccagtgccctcggcgtggagaacattgggggaatctttatagtgctggccgccgggcttgtcttgtctgtgtttgtggccatcggcgagttcatctacaaatcaagaaaaaataacgatattgaacaatgcttatcttttaatgcaattatggaggaactgggaatctctctaaaaaatcaaaagaagatcaagaagaaatcgcgcaccaaaggcaaatcatcctttacttctattctcacatgtcaccagaggcggacacagaggaaggaaacagttgcctag

SEQ ID NO: 118541 - DNA, 2757 bp, synthetic construct
  misc_feature 1..2757: note = Description of Artificial Sequence: Synthetic coding sequence
  source 1..2757: mol_type = other DNA
atggaacatggcacactgctggcacagcctggactgtggaccagagatacgtcatgggctctgttatacttcttgtgttatatccttcctcagactgcccctcaggtattacggatcggcggaatcttcgaaacggtggaaaatgaaccagtcaatgtggaagagttagctttcaaattcgccgtgacaagcataaatcgtaatcgtactctgatgccgaatactacgctgacgtatgacatccaacggataaatctgttcgattccttcgaggcctcaagacgtgcctgcgatcagctggccctcggtgtagctgcgctcttcggccccagtcattcatcttccgtatcagctgtccagtctatctgcaacgccctggaggtgccacacatccaaacacgctggaagcatccctcagtcgataataaggaccttttctacattaatctctaccccgattacgccgcaataagccgggctatccttgatctggtcctttattataactggaagaccgtaacagtcgtgtacgaggattctaccggcctcatccgacttcaggaactgatcaaggccccttcccgctacaacatcaaaatcaagatcagacaactgccaagtggcaataaggatgctaaacctctgctgaaagagatgaagaagggaaaagagttttacgtgatctttgattgtagtcatgagaccgcagccgagatcttgaagcagatactgttcatgggcatgatgaccgaatattaccattactttttcacaaccctggacctattcgcactggatttggaattataccggtactctggagtaaacatgaccggctttcgactccttaatatcgataatccccatgtgtcatccattattgaaaaatggtccatggagagattgcaggctcccccacggccagagaccggacttctggacggcatgatgaccaccgaagcagcgctgatgtacgatgcggtttatatggttgcaatcgctagtcatagagcctcacagttaacagtgagctctctgcagtgccataggcacaagccatggagattgggaccaagattcatgaacctgataaaagaagcgcgatgggacggacttaccggccatatcacttttaataagactaacggtctgcgcaaagacttcgacctcgatataatctccctgaaagaagaggggacagaaaaagccgctggagaagtgtcaaagcacctctataaggtctggaaaaagatcggaatttggaacagtaactcgggactaaacatgactgattccaacaaggacaagagctccaatatcaccgactccctcgccaataggactctcatcgttactaccattctggaggagccctacgtcatgtataggaaatctgacaagcctctgtatggcaacgaccgctttgaaggatactgcctcgatctgctgaaggaattaagtaatatcctgggtttcatctacgatgtcaagcttgttccagacggaaagtatggtgctcaaaatgacaagggagaatggaacggaatggtgaaagaactgatagatcacagagcagacctcgcagtagccccacttactataacatatgtgagagaaaaagtgattgatttttcaaagccctttatgactcttggaatttcaattctctatcgaaagccaaacgggacaaacccaggcgtcttttcttttctgaatccactgtcccctgacatttggatgtacgtcctcctcgcgtgtttaggagtgtcatgcgttctgtttgtaatcgcccgatttaccccatacgaatggtataacccccacccctgtaatcctgattctgatgtggtggaaaataatttcaccctgctgaattcattctggttcggagtcggtgccctcatgcagcagggaagtgagttaatgcctaaggcactgagcacgcgcatcgtgggcggcatttggtggttcttcacactgattattatttcctcatacactgccaatttggcagcctttctgactgtggagcgtatggaatccccaatcgacagcgcagacgatcttgcaaaacagacaaagattgaatacggagccgtccgtgacggctccacgatgactttcttcaaaaagagcaaaatcagtacttacgaaaagatgtgggcattcatgagtagcagacagcaaactgcccttgtaaggaactccgatgaggggatccaacgggtcctcactaccgactatgccctactgatggagtcaacgtcgattgaatatgtgacccagcgcaattgcaatcttacccagatcgggggactcatagactctaagggctacggtgtgggcactccgataggttcaccctaccgcgacaaaataaccattgctatccttcagctgcaggaagaaggtaagttgcacatgatgaaagagaaatggtggcgaggcaatggatgccccgaagaggacaacaaggaggcaagtgctctcggcgtggaaaatattggcggaatatttattgtgctggctgccggactagtgctctctgtgtttgtggctatcggcgaatttatttataagagtcggaagaataatgacattgagcaggccttctgttttttttatggactgcagtgcaagcagactcacccaactaactctacatctggaacaaccctgtcgacagacctcgagtgcgggaagctgattcgggaagagcgaggcatcaggaaacagtcttccgttcatacagtttag

SEQ ID NO: 118542 - DNA, 2712 bp, synthetic construct
  misc_feature 1..2712: note = Description of Artificial Sequence: Synthetic coding sequence
  source 1..2712: mol_type = other DNA
atggaacacggtaccctattggcacaaccaggattgtggacccgggacacaagctgggccctgctgtacttcttgtgctacatccttcctcaaacggcgccgcaagtgctccgaattggtgggatctttgaaaccgtcgaaaatgaacccgtcaatgtggaggaactagctttcaagtttgctgtcacttcaatcaaccgaaacaggacactgatgcctaacacaacactcacgtatgatatccaaaggataaacttatttgattctttcgaggcctcgcggcgggcctgtgaccagctcgctctgggcgtcgctgccctgttcggcccttcacacagcagtagcgtcagcgccgtacagtcaatatgtaacgccctggaggtcccccacattcagacccggtggaagcacccatcggtcgataataaggatttattctacattaacctataccccgactatgctgccatatccagggcgattctggacctggtgctgtactataattggaagaccgttactgttgtgtacgaagatagcaccgggctcattcgcctgcaagaactcatcaaggcccccagtaggtacaacataaagattaagattcggcagttgccatccggcaataaagacgcgaagccactccttaaagagatgaagaagggcaaagaattttacgtgattttcgattgctcgcacgaaaccgcagctgagatcctgaaacagattcttttcatgggcatgatgacagaatattaccactattttttcacaaccctggacttgtttgccttggacttggagctataccgatactcaggtgtgaatatgacagggttccgcctgctgaatattgacaatcctcacgtttcctcaattattgagaagtggagtatggaaagactgcaagcacctccacgccctgaaactggccttttagatggcatgatgacaacagaagcagctctgatgtatgacgccgtgtacatggtagccatcgccagtcaccgggcaagccagctgaccgtctccagtctccaatgccaccgccacaagccatggcgtcttggcccccgattcatgaacctaattaaagaagctcgctgggatggcctgacaggacatattacatttaataaaaccaacggcttgaggaaagactttgatctggacatcatttccctgaaagaggaggggaccgaaaagattggtatatggaactccaactctggactaaatatgaccgacagcaacaaggataagagttccaatatcactgatagtctcgcaaataggacactgattgtgaccacaatcttggaagagccttatgttatgtacagaaaatctgataagcctctgtatggcaacgataggtttgaaggctactgtttagatctgctcaaagagttgtcgaacatcctgggtttcatctatgatgtgaagctggtgcctgacggcaaatacggagcacagaacgacaaaggggagtggaacggcatggtcaaggaacttattgatcatcgagctgacctggctgtggcacccctcaccatcacctacgtgcgagagaaagtgatcgacttttcaaaacccttcatgacactcgggatttccatcctctacaggaagccaaacggtacaaatcctggtgtgttctcctttctcaatccactgtcacctgatatttggatgtatgtgcttctcgcatgtctcggtgtttcttgtgtactgttcgtgatagctagattcaccccctacgagtggtacaacccccacccctgtaaccccgatagcgatgtggtggaaaacaattttaccctgctgaatagtttctggtttggcgtgggcgcgctcatgcaacagggtagcgagttaatgcccaaggccctgtcaacgcggattgtgggcggtatctggtggttcttcacgttgatcatcatctctagttataccgcgaatctggcagcgttcctgacagttgaacgaatggagagtcctatcgactccgctgatgatcttgcgaagcagaccaagatcgagtatggggctgtccgtgatgggtccacaatgaccttctttaaaaagagcaaaatcagtacgtacgagaagatgtgggcatttatgtccagcagacagcagaccgccctggttcgcaactcagacgaaggcatccagagggtactgaccaccgactacgctctgctaatggaaagcacatcgattgagtacgtgacacagagaaactgcaatttgactcaaattggcggactaattgactccaagggatacggtgttggaacgcctatcggttctccttacagagataaaattactatcgcaattcttcagctacaggaggagggaaagttgcacatgatgaaggagaagtggtggcgcgggaatggatgcccagaggaggacaataaggaagcgagcgccctcggagttgagaatattgggggcatctttattgtgttggcagcgggattagttctgtccgtattcgtggcgattggagaattcatctataagagtcgaaagaacaacgatattgaacaggcgttttgtttcttctatggtctgcagtgtaagcaaactcacccaacaaacagtacatctggcacaacactgagcacagatctcgagtgtgggaaactgatccgggaagaacgagggatccggaagcagtcctctgttcacacggtgtag

SEQ ID NO: 118543 - DNA, 2763 bp, synthetic construct
  misc_feature 1..2763: note = Description of Artificial Sequence: Synthetic coding sequence
  source 1..2763: mol_type = other DNA
atggagcatggtaccctcctggcccaaccaggtctgtggacaagagacacttcctgggccctactttattttctgtgttacattctcccgcagaccgctccacaggtgctcagaataggtggcatcttcgagaccgtggaaaacgagcccgtgaatgtagaagagctcgcttttaaattcgctgtgacaagtattaacaggaaccgcaccctgatgcccaatacgaccctcacctatgatatccaaagaatcaacctcttcgattcctttgaagcgagccggcgcgcctgcgaccagctggcccttggggtcgcagcactctttgggcccagtcactcgtcatccgtgtcagcagttcagagtatatgcaatgccctggaggtgcctcatattcagactcgctggaaacaccctagtgttgacaataaagacctgttctacatcaacctgtaccctgactacgccgcaatttcacgcgcgatccttgacctggtgctatattataattggaaaacagtaaccgtcgtgtacgaggattccacaggtctaatcaggcttcaggagttgattaaggcgccttctagatataacattaaaataaaaatccgacagttacccagcggcaacaaagatgcaaagccattattaaaagagatgaaaaaggggaaggagttttatgttattttcgactgtagccacgagactgccgctgaaatactgaagcaaatcctttttatgggcatgatgaccgaatactaccactatttctttaccacattagacctgttcgcactggacttggagctgtacagatacagtggcgttaatatgacggggttcagactcttgaatatagacaatccgcatgtgagctcaatcatcgagaagtggagtatggagagacttcaggctcccccaaggcccgaaaccggtctgctggatggaatgatgacgaccgaggccgcacttatgtacgacgccgtgtacatggtggcaatcgcgagtcaccgtgctagtcaacttactgtctccagtttacagtgtcaccggcataaaccttggagacttgggcccaggttcatgaatctcattaaagaggctcgctgggacgggctgactggccacatcacctttaacaaaactaatggtctccggaaggactttgaccttgacataatatctctgaaggaggagggaaccgaaaaagcagcaggggaagtgagcaagcacctgtacaaagtgtggaagaaaattgggatttggaacagcaattccggactgaacatgaccgacagtaacaaggacaaaagctcgaacatcaccgatagtcttgccaaccgtactctgattgtcaccaccattctcgaagaaccgtacgtgatgtatagaaaatccgacaagccactatatggcaacgaccgcttcgagggatactgtcttgacctgctcaaggagctgtctaacatcctcggttttatctatgatgtaaagctggtccctgatggcaagtatggagcccagaacgacaagggcgagtggaacggcatggtcaaagagctgatagatcatagggccgaccttgccgtggcccctctcacaatcacctatgtccgtgagaaagtgatcgacttttcaaagcctttcatgacgctcggcataagcatcctttaccggaagcctaatggaacaaaccccggggtcttctccttcctgaaccccctcagtcccgacatctggatgtacgtgctgctggcttgtcttggtgtgagctgtgtcctgtttgtgatagcgcgatttaccccatatgaatggtacaacccccacccttgcaatccagatagcgatgtggtggagaataacttcacactcctgaatagtttttggttcggcgtgggcgctcttatgcagcagggtagtgagctgatgccaaaggctctgagcacccggatcgtgggcgggatctggtggtttttcacattaatcatcatatccagttataccgcaaatttggcagcattcctaaccgttgaaaggatggagtccccaattgattctgcagatgacttggctaaacaaacgaaaatcgagtacggcgccgttcgcgacgggagcactatgactttctttaagaaaagcaagattagcacatatgagaaaatgtgggccttcatgagtagccggcagcagaccgcactggttcgcaattcagatgaaggcatccagagggtgctgactacagactatgctctacttatggaatctacaagcattgagtatgtaacccaaaggaactgcaacctcacccagattggcggccttattgactctaaagggtatggagtgggaacgcccattgggagcccataccgtgataagatcacaatcgcgatcttgcagcttcaggaggaggggaagctccacatgatgaaagagaagtggtggcgcggaaatggttgtcccgaagaggacaacaaggaagcctccgcattgggcgtggagaacattggcggcattttcatcgtgctcgcagcaggactggtgctttcagtgttcgtggcaattggtgaattcatctataagtcgcgtaagaataatgacatagagcaatgtctttcttttaacgctataatggaggaattaggcatttctctcaagaatcaaaaaaagatcaaaaagaaatcacggacaaagggcaagtctagttttacctcgatcctcacctgtcatcagcgcaggactcagcgcaaggaaactgtagcttag

SEQ ID NO: 118544 - DNA, 2805 bp, synthetic construct
  misc_feature 1..2805: note = Description of Artificial Sequence: Synthetic coding sequence
  source 1..2805: mol_type = other DNA
atggaacatggcaccttgttagcacagcccggactgtggacacgtgacacctcttgggcattgctctatttcttatgctacattctccctcagacggcaccccaggtgctgaggatcggcggtattttcgagactgtggagaacgagcctgtgaatgtagaagagttggccttcaagttcgccgtgacttcaatcaaccggaacagaacacttatgccgaatactacactcacttacgacatccagcgcattaatctgtttgattcttttgaggcttccaggcgcgcctgcgatcaactggccctgggggtcgccgctctcttcgggccatctcactctagtagcgtttcagctgtgcaaagcatttgtaacgcgctcgaggtgccacacattcagactcgttggaagcaccccagcgtggataacaaagatttgttttacatcaacttataccccgactatgctgcaatttccagggcgatcctggatctggtcctgtattacaactggaaaacagtcaccgtggtgtacgaggactccacaggcctgattagactgcaggagcttatcaaggcaccaagcaggtacaatattaagatcaaaatccgccagctcccatctggcaacaaagacgccaaacctctgttaaaggaaatgaagaaaggcaaggagttctacgtgatctttgactgcagccacgaaacagccgcggagattttaaaacagatcctgttcatgggcatgatgaccgagtattaccattacttctttactaccctggatctctttgctctggatctggagctctacagatattccggcgtgaacatgactgggttcaggctgctcaacatcgataatcctcacgtgtcaagcattatcgagaagtggagcatggaaaggctccaggcacccccgaggccggaaaccggtctgctggacggcatgatgacgaccgaggccgctctcatgtacgacgcggtctacatggtggccatcgcatcccatagagcttctcagctgactgtttcctctctgcaatgtcaccgccataaaccctggcggttgggcccccgatttatgaatctgattaaggaggctcgatgggatgggctgacgggccatatcacattcaataagaccaatgggctaagaaaggacttcgacctcgatattatttccctgaaagaggaaggcacggagaagataggcatatggaactctaattccggcttaaacatgaccgattcaaataaggataaatcgtcaaatataacagactccctagctaaccgaaccttaatcgtgactaccattcttgaagaaccatacgtgatgtataggaagtcagataagcccctatacggcaatgataggtttgagggatactgtttggacctgctgaaagagctgtccaatatacttggatttatttatgacgtcaagctcgtgccggacggaaagtatggggctcaaaacgataaaggagagtggaacggcatggtaaaggaactgattgaccatcgggccgatctggccgtggccccactcacaatcacatacgtacgggaaaaagtgattgacttttctaaaccgttcatgactttgggcatctccattctctatagaaaaccaaatggcacaaatccgggtgtcttctcttttctgaatcccctttcccctgacatttggatgtacgtactgctcgcatgcttaggcgtctcatgcgtcctgtttgtgatcgccagatttacgccttacgagtggtataatccccatccttgcaatcctgactccgatgtagtcgaaaacaacttcacacttctgaatagcttctggtttggagtgggcgctctcatgcagcagggaagtgagttgatgcctaaagctctgagcaccagaatcgtggggggaatatggtggttttttactctaatcatcatctcgtcttacaccgcgaatctagccgccttcttgaccgtggaacgcatggagagtccaattgactccgctgatgatctggccaagcaaactaagattgagtacggcgccgtacgggatggtagcacaatgactttttttaagaagagcaaaatcagcacctacgaaaagatgtgggccttcatgtcgtcacgccagcaaaccgccctggtccggaattcagacgaaggaattcaacgtgtgttaaccacggactacgcattgttgatggagtccaccagtatcgaatatgtgactcagcggaactgtaacctcacacagattggcggattgatagattccaaaggttacggggtggggacccctatcggctctccttatagggataagatcaccattgccatcttacaactgcaggaggaaggcaaattgcacatgatgaaggaaaagtggtggcgcgggaacggatgccctgaagaagataacaaggaagcaagcgcgctcggcgtagagaacatcggaggaatctttatagtgctggctgccggtttggttctttcggtttttgtggcgatcggagagtttatctacaagagccgcaagaacaatgatatcgaacaaaagggaaagagttcaagaattagattttattttaggaataaggttagatttcatgggcggaagaagcagtctttaggcgtggagaagtgcctcagtttcaatgccatcatggaggagctaggtataagtctcaaaaaccagaaaaaaatcaaaaagaagtcaagaacgaaaggcaagagctcattcacatccatcctaacatgccaccagaggagaacccaaaggaaggaaaccgtggcttag

SEQ ID NO: 118545 - DNA, 2769 bp, synthetic construct
  misc_feature 1..2769: note = Description of Artificial Sequence: Synthetic coding sequence
  source 1..2769: mol_type = other DNA
atggaacacggtacgttacttgcccagccggggctgtggacacgagacacttcttgggcgctgctgtattttctctgctatatcttaccccagacggccccacaagtactgcgaatcggcggtatcttcgaaaccgtggagaatgagccggtaaacgtggaagaactggcattcaaattcgccgttacctccattaacaggaatagaaccttgatgcccaacacaactctgacctacgatatacagagaatcaatctgtttgacagcttcgaggcctcccggcgagcgtgcgatcaactggctttgggagtggctgccctattcgggcctagtcatagttcatctgtgtctgccgttcaaagtatttgtaacgctttggaggtgccccatatccaaacccggtggaagcacccctctgtggataataaagacttgttttatataaatctgtaccccgattacgcagccatctccagggcgattctcgatctggtgctgtactacaattggaagaccgtcacagtggtgtatgaggattccactggcctgatacggttacaggaactgatcaaggcaccctcacggtacaacataaagatcaagataagacagctgccatccggcaacaaggacgccaagcccctgctgaaagaaatgaaaaaagggaaagagttttacgtgatttttgactgctcacacgagactgccgctgagattctcaagcagattctgttcatgggcatgatgactgagtattaccattatttcttcaccaccctcgatctttttgccctggacctggaactttatcgttattcaggcgtgaatatgactgggttcagactactcaatatcgataacccgcatgtgagttccatcatcgaaaaatggtctatggagcgactccaagcgccacccaggcccgaaaccggcttgctggacggcatgatgactacagaagcggcgctaatgtacgatgcggtgtacatggtggccatcgcaagccaccgcgcttcccagttaactgtaagctcactgcagtgtcaccgacataagccttggcgtttaggtcccaggtttatgaatctgattaaggaagccacggcacggtgggatgggctgaccgggcatatcacatttaacaagactaacgggctcaggaaagattttgaccttgacataataagcttgaaagaggaaggcacggagaaagcggctggagaagtgtctaaacacctgtacaaggtgtggaaaaaaattgggatttggaatagcaactcgggcttaaacatgactgacagcaacaaggacaaatcttctaacatcacggatagcttagccaatagaacactgattgtcacaaccatcctcgaagagccatatgttatgtaccggaaatcagataaacctctgtatggaaatgaccgcttcgaggggtattgccttgacctattaaaggagctctctaacattcttggctttatatacgacgtgaagctggtccctgatggaaagtacggcgcccagaatgacaagggggagtggaatggcatggtgaaagagctcatagatcatcgggctgacctcgctgtcgctccactgaccatcacttacgtccgagagaaggtgatcgatttcagtaagccttttatgacacttgggatttctattctgtaccgcaagcctaacgggaccaaccctggagtcttctcttttctgaaccctctgtcacccgatatttggatgtacgtgctgctggcctgcctaggggtatcttgcgtgctctttgtgatcgcgagatttaccccatacgaatggtataatcctcacccttgcaatccagattccgacgtggtggaaaataactttacactgctcaatagcttttggttcggagtgggagcattgatgcagcagggaagcgaactaatgcctaaggccctgtccaccaggattgttggcgggatctggtggttcttcacactcatcattatatccagctacacggctaatcttgccgcatttctgactgtggagcggatggaatcacccattgactctgccgacgatctagctaagcagacgaaaatcgaatatggcgcagtcagggatggtagcaccatgacgtttttcaaaaaaagcaaaatctctacttatgaaaagatgtgggcctttatgtcttcgcggcagcaaaccgctctcgtgagaaactcagatgaaggcatccaacgggtgctgaccacagattacgccctgcttatggagtccacctctatcgaatacgtgactcagcgcaattgcaacctgacacagatcggcggtctaatcgactcgaagggctacggcgtaggaacacccatagggtcaccttaccgagacaagattacaatagctattctgcaacttcaagaagagggaaaacttcatatgatgaaggaaaagtggtggagggggaatggatgccccgaagaagataataaggaagcctctgccctgggagtggagaacataggcgggatctttatcgtcctagcagctggattggtgttatccgtttttgtcgccatcggcgagtttatttacaaaagtaggaagaataacgacatcgagcaatgcctgtccttcaacgccatcatggaggagcttgggataagcctcaagaaccagaagaaaattaagaagaaaagccgtaccaaaggcaagtcgagcttcacttcgatactgacctgccatcagcggagaacccagcgaaaggagacagtggcttag

SEQ ID NO: 118546 - DNA, 2247 bp, synthetic construct
  misc_feature 1..2247: note = Description of Artificial Sequence: Synthetic coding sequence
  source 1..2247: mol_type = other DNA
atggaacatggaacgttgctggcgcagccagggctgtggacgcgcgacacttcctgggccctgctgtacttcctgtgttatattctcccacagacggccccacaggttctccggatcgcctgcgaccaactggctctaggagtggcggccctgttcggcccatcgcacagcagctctgtcagcgccgtgcagtctatttgtaacgccttggaagtgcctcacatacagacccgctggaagcaccccagtgtggacaataaagacttgttttacatcaatctgtaccccgactatgccgcaatatcaagagctatcctggacctggtactttactataactggaagacggtgactgtggtttatgaagactctactggcctgatcaggctccaggagctcataaaggctcctagccgctacaatatcaaaattaagattagacagctgccctcaggtaacaaagacgcaaagccacttttgaaagaaatgaaaaaaggaaaagagttctacgtcatcttcgactgctcacatgaaacagccgccgagattctaaaacagatcctgtttatgggcatgatgaccgaatattatcactacttcttcactaccctggatctgttcgcactggacctagaactctatagatattctggcgtcaatatgactgggtttagattgctaaacatcgacaacccccatgtcagcagcatcatcgagaaatggagcatggaaagacttcaggcccccccacgcccagagactggactgctcgacggaatgatgacaaccgaggccgctctgatgtacgatgctgtctacatggtggccatcgcgtcacatcgagcctcacagttgacagtgtcctctctacagtgtcatcggcacaagccttggcgacttggcccacggttcatgaacctcataaaggaggcgcggtgggacgggctgaccggccacatcacattcaataagaccaatggcctgcggaaagattttgatctggatattattagcttgaaggaagagggcacagagaagattggcatatggaatagcaactctggcctgaatatgacagactcaaacaaggacaaatcatctaacattaccgactcgctggccaaccgcacgctgattgtgacaactatcctgcgggccgatctcgcggtcgcgccacttaccattacctacgtcagagagaaagtgatagacttctctaagcctttcatgaccctggggataagtattctgtatcgcaaacctaatggaaccaacccaggggtcttttctttcttaaatcccctgagtccggatatttggatgtacgtgctactggcatgtctaggcgtctcctgtgtgttgttcgtgatagcccggttcaccccatacgagtggtacaacccccatccctgtaaccctgattctgatgtcgtcgagaacaattttacactcctcaactccttttggtttggcgtgggagccctcatgcagcagggttcagagctcatgccaaaagcactgtcaacccggatagttggggggatctggtggttttttacactcatcatcatttcctcttacacagctaacctggcagctttcttgaccgtcgagcgaatggagtctcctatcgacagtgctgatgacctcgctaaacaaaccaagattgagtatggcgcagtgcgggacggttctacgatgaccttcttcaagaagtccaaaatcagcacatacgagaagatgtgggcttttatgtcaagccgccagcagaccgctctggtgaggaacagtgacgaaggcattcaacgcgttctgaccaccgactacgccttgttgatggaaagcacctccattgaatacgtgacacagcgaaattgcaatctcacacagataggcggcctgatagactcaaaggggtacggagtggggactccaatcggtagtccctaccgagacaaaattaccatcgcaatcttgcagttacaagaggaaggaaagctccacatgatgaaggaaaaatggtggagaggcaatggatgtcccgaggaagacaacaaggaagcttcagcattaggcgtggaaaacatcgggggcatctttatagtgttagccgctggattagtattgtccgttttcgtcgctatcggggaattcatctataagagcagaaagaataacgatattgagcagtgtctcagtttcaacgctatcatggaagaactcgggatatccctgaagaaccaatag

SEQ ID NO: 118547 - DNA, 2610 bp, synthetic construct
  misc_feature 1..2610: note = Description of Artificial Sequence: Synthetic coding sequence
  source 1..2610: mol_type = other DNA
atgaagattatattccctatcctgtctaacccagtcttccgccgtacagttaaactactcctttgtttgctgtggattggctactcgcaaggcacaacccacgtcctgcgcttcggaggaatcttcgagtatgtcgagagtggacctatgggcgcagaggaactggcctttcggttcgccgtgaataccatcaaccgtaaccggactctattaccaaatacaaccctcacctacgacacccaaaagatcaatttgtatgattccttcgaggcttctaaaaaggcatgtgatcagctgtctctaggtgttgcggctatcttcgggcctagtcatagttcttcagctaatgcagtacagtcaatttgtaatgctctgggcgtgcctcatattcagaccaggtggaagcaccaggtatcagacaacaaggacagcttctacgtgagcctgtacccagatttctcgtccctgtcgagagcaatactggatctcgtccagttcttcaagtggaagaccgtaacagttgtctacgatgactccactgggctgattcgactgcaagaacttattaaggccccctcccgctataacctgcgcttgaagattcggcaactgcctgccgacactaaagacgcgaagccactcctcaaagagatgaaacggggcaaggagtttcacgtgatcttcgactgcagccacgagatggccgcaggcatactgaaacaagctttggcgatgggcatgatgaccgaatattaccattacattttcaccacactggacctcttcgccctggatgtcgagccttacagatacagcggcgtgaacatgacaggttttagaattctgaacactgaaaatacacaggtgagtagcatcatagagaaatggtcaatggaaaggctgcaagcccctcctaaaccagatagcggactgctcgacgggtttatgacaactgatgcagctctgatgtatgatgcagtccatgtagtgtcagtcgccgtgcagcaatttcctcagatgacagtgtcctctctacagtgtaacagacataaaccctggcgatttggcacccggttcatgtccctcattaaagaggcacactgggagggcctaactggacgcattactttcaataaaaccaacggtctgcgcacagatttcgatcttgacgtgatctcgctgaaagaagaaggactcgaaaagatagggacctgggatcccgcttccggtctgaacatgactgaaagtcagaagggcaaacctgctaacatcactgactccctatcgaatcgaagcctgatcgttaccaccattttggaagaaccttatgtgctgtttaaaaagagtgataaacctctctacggcaacgatcgatttgaggggtattgtatcgacttgttaagggagctcagtactatattaggtttcacctacgagatccgcctggtggaggatggaaaatacggcgcgcaggacgacgccaatgggcagtggaatggcatggtcagggaacttattgaccataaggctgacctggcagtggccccgctggcgatcacttacgttagggaaaaggtcatcgacttctccaagccctttatgaccctgggcatcagcatcctgtaccggaaacctaacggcactaaccctggggtgttctctttcctaaatcccctgagtcccgatatttggatgtacatcctcttggcgtatcttggagtgagctgcgtgttgttcgtcatcgcccgcttcagcccttatgagtggtataatccgcacccgtgcaaccccgacagtgatgtggtggaaaacaatttcaccctactgaattctttctggttcggcgtgggagccctgatgcagcagggttctgaattgatgcccaaagcgctttctacccgcatagttggaggtatctggtggttcttcaccctcatcatcatttccagctacaccgcaaatcttgctgcgtttcttacagtggagcgcatggagtctcccatagactccgccgatgatctggccaagcagacgaagatcgaatacggagctgttgaggacggtgccaccatgaccttttttaagaaaagcaagattagcacctacgacaaaatgtgggccttcatgtcttcgcgccggcaatctgtgctagtgaagagcaatgaggagggcatacagcgcgtgctaacaagtgattacgcctttctcatggagtccactacaatcgaatttgtgactcaacggaactgtaacctcacccaaattggagggctaatagattcaaagggatatggtgtcggtacccctatgggcagtccttacagggacaagattacaatcgccattctgcaactgcaggaggagggcaaattgcatatgatgaaagaaaagtggtggcggggtaacgggtgccccgaagaagaatctaaagaggccagcgcactcggcgttcagaacatcggcggcattttcattgtacttgcagcaggactggtcctgtcagtgtttgttgctgtcggtgagttcttatacaaatcaaagaaaaacgcacagctcgagaaagaaagcagtatttggctagtccctccttaccaccctgatactgtgtag

SEQ ID NO: 118548 - DNA, 2580 bp, synthetic construct
  misc_feature 1..2580: note = Description of Artificial Sequence: Synthetic coding sequence
  source 1..2580: mol_type = other DNA
atgggggccgaagaattggccttcagattcgccgtgaatacaattaaccgcaatcgaacccttctgcccaatacgacactgacatacgacactcaaaagataaatctttatgacagctttgaagctagcaaaaaggcctgtgatcaactttctcttggcgtagcggccattttcggtccaagccactcttcctcagcgaacgcagtccagagcatctgcaatgcactcggcgtgccacatattcagaccagatggaagcaccaggtgtccgataataaagacagcttttacgtctcattatacccggactttagtagcctgagccgggcaattctcgatctagtacaattctttaagtggaaaactgtgaccgttgtttacgacgattcaactggactcatccggttgcaggaacttataaaagccccctcaagatataatctccggctaaaaatcagacagttgcccgccgacactaaagatgccaaacctcttctgaaggaaatgaagcgcggtaaagagttccacgtgatcttcgattgtagccatgaaatggcagctggtatcctgaagcaggcactggccatgggcatgatgaccgagtactatcactacatcttcaccactcttgacttgttcgcactggacgtggagccttatagatattccggagtgaacatgactggctttaggatccttaatacagagaacacgcaagtgagctcgatcatagagaaatggtccatggaaaggctgcaagcgcctcctaagcctgactctggcctgctagacggcttcatgacaacggacgctgcccttatgtacgacgccgtgcacgtggtgtcagtggctgtgcaacagttccctcagatgaccgtaagttctctgcagtgcaacaggcataagccttggagattcggcacccggtttatgagcctgattaaggaggcccactgggagggacttactggcaggatcacatttaacaagacgaacggacttcgtaccgattttgacttagacgtcatttccttgaaggaggagggcctggagaaaattggaacttgggacccagccagcggactgaacatgactgaaagccagaaggggaagccagcaaatatcacagatagcctctccaatagatcactgattgtgacgactatcctggaagaaccttacgtgctgtttaagaagagcgacaaacctctgtacggaaacgaccgttttgagggatattgcatcgatctcctgagagaactgtcaactattctgggtttcacctatgagatacgtctcgtggaagatgggaaatacggggcgcaggatgatgccaatggtcagtggaacggaatggtccgagagttgattgatcacaaggccgacctggcagtagcccccttggctattacttatgtacgcgagaaagttatcgacttctctaaaccctttatgaccttaggcattagtatactataccgcaagcccaatggtacgaatccgggcgttttttccttccttaacccactgtccccggacatctggatgtatatcctgctggcatatctcggcgtcagctgtgtgctgttcgtgatagctagattcagcccttacgagtggtacaacccccatccttgtaatccagattccgatgtggtggaaaacaattttactctgttaaattccttctggttcggagtgggagccctgatgcagcaaggttcagaactgatgcccaaggctttgagcaccaggatcgtcggggggatctggtggtttttcacactgatcatcatatcctcttataccgccaacctggccgcgttcctaacagtggagagaatggagtctcccatcgacagcgccgacgatttagccaaacaaaccaagattgagtacggcgcagtggaagacggcgccactatgacgttttttaaaaagtctaaaatcagtacctatgataagatgtgggcatttatgagcagtcgaaggcagtcggtccttgtgaaatctaatgaggagggcatacagcgggttttaacaagcgactatgccttcttaatggagtccactacgatcgaatttgtgacccagcgaaactgcaatctcacccagatcgggggccttatcgattccaagggctacggggttggcacgccaatgggcagcccttatagagacaaaattaccattgccatcctccagctccaggaggagggaaagctccatatgatgaaagagaagtggtggcgtggcaatggctgtccagaagaagaatcaaaggaggctagcgccctgggggtccagaatattggagggatcttcatcgtgctggcagccgggctcgtcctgtctgtgtttgtggcggtcggcgaattcctctacaaatcgaaaaaaaacgctcaactggaaaaacggagtttctgtagcgccatggtcgaggagctcagaatgtctctcaagtgtcagcgccgactcaagcacaagccgcaggcaccggtgattgtcaagacggaggaggtcatcaacatgcacaccttcaatgaccggcgcctacccggcaaggaaactatggcatag

SEQ ID NO: 118549 - DNA, 2499 bp, synthetic construct
  misc_feature 1..2499: note = Description of Artificial Sequence: Synthetic coding sequence
  source 1..2499: mol_type = other DNA
atgaaaataatattccccatcctgagtaatcccgtatttaggcggacagtgaaattgttactgtgcttactctggattggctactctcagggaaccacccatgttctcagattcggcggcatttttgaatatgtggagagtgggccaatgggcgcagaggagctcgctttcaggtttgctgtgaatacgatcaacaggaatagaaccctactgcctaacacaacgttaacttacgacacacagaagattaatttatatgattctttcgaggcttcaaaaaaggcctgcgaccagttgtccttgggagtggccgctatctttgggccttcgcattcgtccagcgccaacgctgtccagtccatttgtaatgcacttggcgttccacacatccagactcgctggaaacatcaggtttctgataataaagactccttctacgtatccctatacccggactttagctcgctgtcccgcgcaatccttgatctggtccagttctttaagtggaaaactgtgactgtggtgtacgatgatagcacaggcctgatccgcctgcaggagctgatcaaggcccctagccggtacaatctgcggctgaaaatccgtcagttgcccgccgatacgaaggatgcaaagcctctgctaaaagagatgaagcgcggtaaggagtttcacgttatttttgactgctcgcatgagatggcagccgggattctgaagcaggctctggccatgggtatgatgaccgaatactatcactatattttcactaccttagacttatttgcactcgatgtcgaaccatatcgttacagcggcgtgaacatgaccggctttcgcatccttaatactgaaaacacacaggtcagctctattatcgaaaaatggagcatggaaagattgcaggctccacctaaaccggactctgggcttttggatggcttcatgacaactgacgctgctttaatgtatgacgcagtacacgtggtttctgtggccgtccagcagtttccacagatgacagtgagtagtcttcaatgtaaccgacacaagccgtggcgatttgggacccggttcatgtctctaattaaggaagcccactgggagggactcacgggccgtatcacttttaacaaaacaaatggtctccggacagacttcgatctcgatgtgatctctctgaaggaggagggactcgagaaaataggcacatgggatcctgcgagtggcctgaacatgaccgagagccagaagggtaagcccgcaaacatcactgactctctcagtaatcggtcgttaatcgtaacaacaattttggaggaaccatatgttctgttcaagaagtccgataagcccctttatggaaacgatcgcttcgagggctattgtatagacctgttaagggagctctcgaccattctcggttttacatatgaaatcagactcgtcgaggatggaaagtacggagcacaggatgacgccaatggccaatggaatggaatggtcagggaacttatcgatcacaaggctgatttggctgtagcccccctggctatcacttacgtacgagaaaaagtcatagattttagcaagccttttatgacgctggggataagtatcctttatagaaagcccaacggtagtgagctaatgcctaaggccctgagtacacgcattgtgggtggcatctggtggttctttaccttaataattatttcgtcctacaccgccaatctggcagcctttttgaccgtagaaagaatggagtccccaattgatagcgccgatgacctggcaaaacagaccaagatcgagtacggcgcagtggaagacggtgcaacgatgactttttttaaaaaatcaaagatctccacctatgacaagatgtgggccttcatgtccagcaggcgacagagtgtcctagttaaatccaatgaggagggaattcagagggtacttacctcggactatgcctttttgatggaatccaccactatagagtttgtcactcagcgcaattgtaatttaactcagataggtggcctaattgatagcaagggatacggagttggcacacctatgggaagtccttaccgcgacaagataaccattgctatcctccagctacaggaggagggcaagctacatatgatgaaagaaaaatggtggcggggcaatgggtgtcccgaagaggaatcaaaggaggcttcagctctcggcgtgcaaaatatcgggggaatttttatagtgttggccgctggattagttctcagtgtcttcgttgccgtgggagaattcctgtacaaatctaagaagaatgcccagctcgaaaaacggagtttttgctcagccatggtggaagagctgagaatgtctttaaagtgtcagcgcaggctaaagcacaaaccgcaggcccccgtgattgtgaagaccgaagaggttattaatatgcacaccttcaacgacaggaggcttcccggcaaagagactatggcctag

SEQ ID NO: 118550 - DNA, 2679 bp, synthetic construct
  misc_feature 1..2679: note = Description of Artificial Sequence: Synthetic coding sequence
  source 1..2679: mol_type = other DNA
atgaaaattatcttccccattctttctaatccagtgttcaggcgcactgtcaagctgttgctgtgccttctctggatcggctactcgcagggaaccacacacgtcctgcgatttggggggatttttgagtacgtggaatcagggccaatgggcgctgaggagctagcattcaggtttgccgtgaataccattaaccgcaaccgcaccctcttgccaaatactaccttaacctacgacactcaaaaaatcaacctctatgactcctttgaagctagtaaaaaggcatgtgaccagctctccctgggggttgccgcaatttttggcccctctcattcttcttcagctaacgcggtgcaatccatctgtaatgccctcggggtgccacacattcaaacacgatggaaacatcaagtttccgacaataaggattccttttacgtatctttataccccgatttctcaagcctgagtagggcgattctggatcttgttcaatttttcaaatggaaaacagttaccgtcgtttacgacgactctactggccttatcagactgcaagagctaatcaaggctccgtcccgctacaatctccggttgaaaatcaggcagctacccgccgataccaaggacgccaaacctctgctgaaggagatgaaaagggggaaagaattccacgtgatcttcgactgctcccacgaaatggcagccgggatcctcaagcaagcacttgctatgggtatgatgactgaatattaccactatattttcactactctagacctctttgcccttgacgtggagccctaccggtactccggcgtcaatatgacaggattcagaatcctgaatacagagaacacacaggtgtcctctattatagaaaaatggagtatggaaagactgcaagcccctcccaagcccgacagtgggcttctggatggcttcatgaccaccgatgccgccctaatgtacgacgccgtacacgtagtaagtgtcgccgtccagcagttccctcagatgacagtcagctcactccagtgtaatcgccacaaaccctggcgctttggaacacgcttcatgagccttattaaggaggcacattgggaggggctgaccggtcgcatcactttcaataagactaacgggctccggaccgattttgatctggatgtgatttccctaaaagaagaaggcctcgaaaagatcggcacgtgggatcctgcctccggcttaaatatgaccgagagccagaaagggaagcccgctaacattaccgactccctcagcaacagatctcttattgtaaccaccatcctcgaagagccttatgttcttttcaaaaagtctgataagccactgtatggaaacgatcgcttcgagggatattgcatagacttattgagagagttgtcaactattctgggctttacatacgaaattcggctggtggaggacggtaaatacggggctcaagacgatgctaacggccaatggaatgggatggtacgggaactgatcgatcacaaagcagatttagccgtcgctcctctggcaatcacctatgtgagagaaaaggtaatcgacttctcgaagccattcatgaccctagggataagtattctttaccgcaaacccaacggaactaaccccggggtctttagtttcctgaaccctctgtctcctgatatctggatgtatattctcctcgcataccttggtgtgtcatgcgttctgtttgtcatcgcccgcttctcaccttacgaatggtataatcctcacccatgcaatccggactctgacgtggtggaaaataacttcacattgctcaattcattttggttcggtgtcggcgcactcatgcagcaaggtagtgagctgatgcctaaggcgctctcaacacgaatcgtcggcgggatatggtggttctttacgctgattattatcagctcatacacagccaacttagcggcttttctcactgtcgagcggatggaaagcccaatcgactctgcagacgacctggctaaacagaccaagatcgagtacggcgctgtcgaggacggagccacgatgaccttcttcaagaaatccaaaatatctacttatgacaaaatgtgggcttttatgtccagcaggagacagagcgtattagtgaagagcaacgaagaaggaattcagcgcgtcttgaccagcgattacgcgtttctgatggagagtacaacaattgagttcgtcacacagcgcaactgtaatttaacacagataggtggcctgatcgactcgaaggggtacggcgtcggcactcctatggggagtccataccgagacaagattactatagcgattctgcagctgcaggaagaaggcaagctgcacatgatgaaagagaagtggtggcgcggcaatgggtgtcccgaggaagaatccaaggaagcttctgccctgggcgtccaaaacatcggcggcatcttcatcgtgcttgctgctggcctcgtgctgtcagtgtttgtcgctgttggcgaattcctatacaagagtaagaagaacgcccagctggaaaaaagagcaaagacaaaactccctcaggactacgtgttcttaccaattcttgagagcgtttccatctccactgtgctctcctccagtccaagctccagttccttatcaagctgttcttag

SEQ ID NO: 118551 - DNA, 1755 bp, synthetic construct
  misc_feature 1..1755: note = Description of Artificial Sequence: Synthetic coding sequence
  source 1..1755: mol_type = other DNA
atgaagatcatcttccctatccttagcaacccagtttttcggcgtactgtgaagctgctcctctgtctgctctggattggctactcacagggcaccacccacgtcttgcgctttggcggcatattcgagtatgttgagagcggacccatgggggctgaagaactggcatttcggttcgcggtgaacaccattaaccggaatcgcacacttctccctaacaccacattgacatatgacacccagaaaattaacttatatgacagctttgaggcgtccaagaaagcttgtgatcagctgagcttaggtgtcgccgccattttcggacccagccatagttcatctgccaatgcagtgcaatctatctgtaatgctctgggagtcccccacatccaaactcgctggaagcaccaagtgtccgataacaaagacagtttctacgtcagcttgtatccagatttcagcagtctgagtagggctattttggatctagtgcagttctttaagtggaaaactgtgacggtggtctacgacgatagtacgggactgatccgactgcaggaactgataaaagccccatcccgctacaatctcaggcttaaaattaggcagctccccgctgataccaaggacgccaagcccctgctgaaggagatgaagcgtggcaaagagtttcatgtgattttcgactgctctcacgaaatggctgccggcattcttaagcaggctttagccatgggtatgatgacggaatactaccattatatcttcaccacccttgacctgtttgccctagacgttgagccctaccggtactcaggcgtcaatatgactggattccgcatattgaacaccgaaaacacccaggttagttcgatcattgaaaaatggagcatggagaggctgcaagccccccccaagccagatagcggccttttagatggtttcatgactactgatgcagccctgatgtatgacgccgtgcatgtggttagtgttgctgttcagcaattcccccagatgactgtgagcagcttacagtgtaatcgacacaaaccctggcgttttgggaccagatttatgtcactgatcaaggaagcccactgggaaggactgactggacggattacctttaataagaccaacggcctgcgcaccgacttcgatctggatgtcatttctttaaaagaagaaggactcgaaaaaatcgggacgtgggacccagcatccggactgaatatgacagaatcacagaagggcaagcccgcaaatataactgactctctctctaaccgatccttgatcgttacaactattctggaggagccatacgtgctcttcaaaaagagcgacaaacctctgtacggaaatgatcgctttgagggatactgcatcgatctgctgcgcgagcttagcacaatcttaggttttacctatgagatccggctggtggaggacggcaagtacggggcacaggacgatgctaatggacaatggaacgggatggtgcgcgaacttatagatcacaaagcagatcttgctgtggccccccttgctattacgtatgtcagggaaaaagtcattgatttcagcaagccatttatgaccttagggatttcgatactctaccggaagcccaatggaactaaccctggagttttctcattcctgaatcctctgtctcctgatatctggatgtatatcttgcttgcatatttgggagtgagctgcgtgctgttcgtgatcgcccggttttag

SEQ ID NO: 118552 - DNA, 2610 bp, synthetic construct
  misc_feature 1..2610: note = Description of Artificial Sequence: Synthetic coding sequence
  source 1..2610: mol_type = other DNA
atgaagatcatattcccgatcctttcaaacccagtgtttcgccggaccgtaaagctcctgttgtgcttactgtggattggttacagccagggaaccacacacgttttacgttttggtgggatcttcgagtacgtagagtccggtccaatgggagctgaagagttggctttccgctttgctgtcaatacaatcaacaggaaccggacacttctgcctaacacaactctgacatatgatactcagaaaatcaatttatacgactctttcgaggcttccaaaaaggcatgcgaccaactgtcgttaggggtcgcagcgatttttggcccctctcattctagttcagcgaatgctgtgcagagcatatgcaacgccctaggggtaccacatatccagacccgctggaagcaccaggttagcgataacaaagattctttctacgtgtcactctaccccgatttctcctcgctctcacgggccattttggaccttgttcagttttttaaatggaagactgtgacagtggtgtatgatgattctacaggactcatacggctacaggaactgatcaaggcaccgtctcgatacaacctgaggctcaagatcagacagctcccggccgacacaaaagacgcaaagccactgcttaaggagatgaaacgaggcaaagagttccatgtcatcttcgactgctcacatgaaatggcggccggcattctcaaacaagcactcgctatgggcatgatgacggagtactatcactacatcttcactactctcgatctgttcgcccttgacgtagaaccttatcgctatagtggagttaatatgacaggtttcagaatcctcaatactgaaaacacacaggtgagctccatcattgagaaatggagcatggagaggctacaggcccctcccaagccagatagcgggctgctcgatggatttatgaccacagacgccgcccttatgtatgacgccgttcacgttgtcagcgtcgcggtccagcaatttccgcaaatgacagtgagctccctacagtgtaataggcacaaaccctggcgcttcggaactcgcttcatgtcgctcattaaagaggcacattgggagggcttaacgggacgcataacctttaacaagaccaatggcctacgaactgacttcgacctggatgtaatcagtctgaaagaggaggggctggagaaaataggcacatgggaccctgcttccggcctcaatatgaccgaaagtcagaaagggaagcctgccaacatcactgacagcctgagcaatcggagcctcattgtgacgaccattcttgaagagccgtatgttctgtttaaaaagtcagacaaacctttgtacggcaatgaccgcttcgagggatattgcattgatttgctgcgggagctctcgaccatcttaggctttacatatgaaatccgcctcgtcgaagatggaaagtatggggctcaggacgacgctaatggtcagtggaacggtatggttcgcgagttaatcgatcataaggctgacttggcagttgcgccactggccattacttatgtgagagagaaggttatcgatttcagcaaaccgttcatgacacttggcatctccattctgtaccgtaagccaaatggcactaacccgggggttttctcgtttctaaatccactgtcccctgatatctggatgtacatcctgctggcgtacctgggagtgtcctgtgtgctgttcgtcattgcaagattcagcccttacgagtggtacaacccacatccctgcaaccccgactctgacgtggtggaaaataatttcacactactgaacagtttctggtttggtgtgggggctctgatgcagcagggcagtgagctgatgcctaaggctctgagcaccaggatcgtaggggggatttggtggtttttcacgctaataatcatctcttcatacacagctaacctggccgccttccttaccgttgagcggatggaaagtcctatcgactctgcagacgacctggcaaaacaaacaaagattgaatacggagccgtggaagacggtgctactatgacattcttcaagaagagcaaaatctctacttatgacaagatgtgggcctttatgagctcacgtcgtcagagcgtgttggtgaaatccaatgaagagggcatacagcgcgtactgaccagcgactacgccttcctcatggagtccacgacaatcgaatttgtgactcagcgcaactgtaacctgacacagattggtggcctgattgacagcaaagggtatggagtcggaacacctatgggaagcccataccgcgacaaaatcaccatcgcaatcttgcagcttcaggaagaggggaagttgcacatgatgaaagaaaaatggtggagaggaaacggttgtccagaggaggaatcaaaagaggctagcgctctaggtgtacaaaatataggaggaattttcattgttcttgccgcgggcctggtgctgagtgtgttcgtggccgtgggcgagttcctctataagtccaagaagaatgcccagctggagaaagaaagctccatttggctggtaccgccgtatcatcctgacacagtgtag

SEQ ID NO: 118553 - DNA, 2727 bp, synthetic construct
  misc_feature 1..2727: note = Description of Artificial Sequence: Synthetic coding sequence
  source 1..2727: mol_type = other DNA
atgaaaattatattcccgatcctcagtaatcccgtcttccggcggactgtcaagttgctgctgtgcttactgtggattggctattctcagggcacaacccacgtgcttagattcggggggatcttcgaatatgtggagtccggtcccatgggcgcagaggaattagcattccgatttgccgtcaacacaattaatagaaatagaacactgctccctaataccacactaacatacgacacccagaaaatcaacctctacgatagcttcgaggccagcaagaaggcctgcgaccagctttccctaggcgtggccgctattttcggaccatcacatagctcctctgcgaacgccgttcagtctatttgcaacgcacttggggtaccacacattcaaactcgatggaagcatcaagtgtccgataacaaggacagcttctatgtgagcctttatcctgatttctctagccttagcagggctatcctggatctggtccaattcttcaaatggaaaacggtcacagtagtatatgatgattctacaggattgatccggctccaagaattgataaaggctccctccagatacaatttgagattaaaaattcgtcagctccctgccgacaccaaagacgcaaagccactgttaaaggaaatgaagaggggaaaagagtttcatgtgatctttgattgctcacatgaaatggccgctgggattctgaagcaagcgctggctatgggtatgatgactgaatattaccattatatcttcactacacttgacttattcgccttagacgtcgagccctatcgctatagcggtgttaatatgacaggcttcaggatcctcaatactgagaatacgcaagtgagtagtattatagagaaatggagcatggagcgtttgcaggccccccctaaacctgattcaggactgctcgacggctttatgacaacggatgccgctctcatgtatgacgctgtgcatgtcgtttccgttgccgtgcagcaatttccccagatgacagtctcatctctgcagtgtaataggcacaaaccttggcggtttggtactagattcatgtccctgattaaagaggcccactgggaaggtttgaccgggcgtatcacttttaacaaaaccaatggcctgcgcactgatttcgacctggacgtcatcagtttgaaggaagaaggcttagagaagatcggcacatgggacccagcatcaggacttaatatgaccgagagtcaaaaaggaaaaccggctaacataaccgacagtctttccaatcgctccttgatagtcacaactatcttggaagaaccttacgtactcttcaaaaaatcggataagccgctttatgggaacgatcgtttcgaaggctattgtattgacttacttcgagaattgtcaacaatcttgggatttacctatgagataaggcttgtggaggatggtaaatacggagcccaggatgacgccaatggtcagtggaatgggatggtgcgcgagcttatcgatcataaggccgatctggcagtggcccctttggccattacgtacgtgagagagaaagtgatcgatttcagcaaaccgttcatgactcttgggattagcatcctgtaccggaaacctaatggaaccaatcccggcgttttctcattcctgaacccgttgagtcctgacatctggatgtatatccttctggcttatctaggggtgtcctgcgtgcttttcgtgattgcccggttttcaccgtacgagtggtacaaccctcatccgtgtaaccccgattcagatgtagttgagaacaattttaccctcctgaactccttttggttcggcgtgggagccctgatgcagcaaggttcggagcttatgccaaaagccttatccacaagaatagtgggcggaatatggtggtttttcactctcattataataagtagctatacagctaatctggccgcatttctcacggtggaaagaatggagtcacctatcgatagtgccgatgatttagcgaaacaaaccaaaattgaatatggagccgtggaggatggagctacgatgacattcttcaagaagtctaaaatctccacatatgataaaatgtgggcctttatgagttcgaggagacagtctgtgttggttaagagcaacgaagaggggattcagcgggtactgaccagcgattatgcctttctcatggagtcgaccaccattgaattcgttacccagagaaattgtaatctgactcagatagggggattgatcgattctaaggggtacggggtgggcacccctatgggctccccataccgggataagataacaatcgccattctgcagctccaggaagagggcaaattgcatatgatgaaggagaaatggtggcgtggcaacggctgtcccgaggaagaatccaaggaagccagcgccctaggagtgcagaacataggggggatctttatcgttctggcggctgggctggtgcttagcgtctttgtggcagttggagagttcctgtataagtccaagaagaatgcccagctggaaaagagatctttttgcagcgccatggtcgaggaactgagaatgtcgctgaagtgccagaggcgccttaagcacaaaccccaggctccagtgattgtgaaaacagaagaagtcatcaacatgcacactttcaatgatcgcaggctcccgggaaaagagaccatggcctag

SEQ ID NO: 118554 - DNA, 1935 bp, synthetic construct
  misc_feature 1..1935: note = Description of Artificial Sequence: Synthetic coding sequence
  source 1..1935: mol_type = other DNA
ggcggtatcttcgaatatgtggagagcggacctatgggagcagaagagctggctttccggttcgcagtcaacacaataaaccgcaataggaccctgctgcctaataccaccttaacgtacgatactcagaagatcaacctgtacgacagcttcgaggcttccaaaaaagcttgcgatcagctttctctgggcgtggccgctatctttgggccttcacatagctcatccgctaatgcagtccaatccatctgcaacgcccttggtgttccacacattcagacacggtggaaacatcaggtgtccgataacaaggactctttctacgtgagtctctatcctgacttcagctccctctcccgtgcaatccttgatctggtgcagttttttaagtggaagaccgtgaccgtggtctatgatgacagtaccggtcttattcgcttgcaagagctgattaaggctccctcacggtacaacctgcgattgaaaattcggcaactgccggctgatacaaaagatgccaagcccttgctgaaggaaatgaagagggggaaggagtttcatgtcattttcgactgctcacacgagatggcggcgggcattcttaaacaggcccttgcaatggggatgatgaccgagtactaccattatatctttactactctggatctgtttgccctagacgtggagccgtaccgttacagcggcgtgaatatgacgggcttccggattttaaacaccgaaaacacacaggtgagttccatcatcgaaaagtggtccatggagagactgcaggcaccacctaagcctgactccggtctcctcgatggatttatgactaccgacgccgcgctgatgtacgacgccgtgcacgtcgtgtctgtcgccgtacagcagttcccacagatgactgtatccagcctgcagtgcaacaggcacaaaccatggcgatttggcactcgcttcatgagtctcattaaggaagcgcattgggaaggcctgaccggcaggatcactttcaataaaacaaacggtctgcgtacagacttcgatctggacgtcattagcttgaaggaggagggccttgagaagatcggtacctgggaccctgctagcgggctgaacatgaccgaatcacagaaggggaaaccagccaatattacagactctctgtcaaatcgatctctgatagttaccactatcctggaagagccttacgtgctgttcaagaaatctgacaagccactgtacggaaacgacagatttgagggatactgtattgatctgttgcgggagttatcaacaattctgggcttcacatacgaaatccggctcgtcgaagatggcaaatatggtgcccaggatgacgcaaacggccagtggaacgggatggtacgggaactaatcgatcacaaatcaaagatctcaacctatgacaagatgtgggcttttatgagcagtcggagacagtctgtcttagtgaagagcaatgaggaggggattcaaagggtgcttacctcagactatgccttcttgatggagtccaccaccatcgagttcgttacacagcgtaactgtaatctgacccagatcggtggactgattgacagtaagggttacggagtcggcacaccgatggggagtccctatcgcgacaagattacgatcgcaatcctgcagcttcaagaagagggaaagctgcatatgatgaaagaaaaatggtggcgcggaaacgggtgcccagaggaagaatctaaagaggcgagtgccctgggagttcagaacatcggaggtatcttcattgtgttggccgccggactcgttctatctgtgttcgtggctgtgggtgagttcctatataagtccaagaaaaacgctcagctggaaaaggagtcctccatttggctagtcccaccctatcacccagatacggtttag

SEQ ID NO: 118555 - DNA, 2760 bp, synthetic construct
  misc_feature 1..2760: note = Description of Artificial Sequence: Synthetic coding sequence
  source 1..2760: mol_type = other DNA
atgaccgctccctggaggcgcctgcgcagtttggtgtgggagtactgggccggactactggtttgtgctttctggatccctgacagtcgtggcatgccccacgtgatccgaatcggagggatcttcgagtacgcggacgggccgaatgcccaagtcatgaatgcagaagaacacgccttccgcttctcagctaatatcatcaacagaaatcggacactccttcctaataccacactcacatacgacatccagagaattcattttcatgatagtttcgaggcaaccaaaaaggcatgtgatcagttagcattgggggttgtggcaatatttggacccagccaaggatcttgcaccaatgccgtgcaaagcatttgcaatgccctggaagtgcctcatattcaacttaggtggaagcatcacccacttgacaataaagatactttttatgtgaacctgtatccagattatgcctccctatcacacgctattctcgaccttgtgcagtatttaaagtggcggtccgctaccgttgtttacgacgacagtacaggtcttatcaggttgcaagagctgatcatggcgccatcacgttacaacatccggcttaagattagacagctgcccatcgactctgatgatagcaggcctctgctgaaggagatgaaaagaggacgagaattccgtatcatatttgattgcagtcacaccatggccgcgcagatactgaaacaggccatggcaatgggaatgatgaccgagtattatcactttatttttaccaccctggatctatacgccttagatctggagccatatagatattctggcgtaaatctgactggatttaggatcctgaatgttgacaatccccatgtgagtgcgatcgtggagaaatggagtatggaacggcttcaagccgctccgagaagtgagtctggactgcttgatggtgtgatgatgacagacgccgccttgctgtacgacgctgtccatattgtgtccgtctgttaccagagagcgccccagatgacggtgaatagcttgcagtgccatcgacacaaagcgtggcgattcggaggtagatttatgaatttcattaaggaagcccagtgggaaggtttaacgggacggatcgtgttcaataagacttcaggcctccgcaccgactttgatcttgatatcatctctcttaaggaagacggtctggaaaaagtaggcgtgtggtcccccgctgatgggctcaacattacagaagtcgcaaaggggcggggccccaacgttaccgactctcttaccaaccgcagtctgatcgtgactaccgtgctggaagagcccttcgtgatgttccgaaaaagcgaccgcacgttgtacggcaacgatcgctttgaggggtactgcatcgatctgctgaaagagcttgcccatatcctgggcttctcctacgaaataagactcgtagaggatggaaaatatggagcccaggatgataaaggacagtggaatggtatggttaaagaattgatcgatcacaaagctgatcttgccgtggctcctttgacgataacccatgttcgtgagaaggccatagatttttctaagccctttatgacactgggagtctcaatcctttaccgtaaacctaacggaacaaacccgtccgtgttttcattccttaaccccctcagtccagacatatggatgtacgtgctactggcctacttgggtgtcagttgtgtgttgttcgttatagcacggtttagtccttacgagtggtatgatgcacacccctgcaacccgggctcagaggtggtggaaaataatttcactcttctgaattccttctggttcggcatggggagtctaatgcagcagggcagcgagctgatgcctaaggcactaagtacaaggataatcggtgggatctggtggttctttactctgattattatcagcagctacaccgctaatctcgctgccttcttgaccgtggagcgaatggagtcgcccatcgattctgctgacgacttagccaaacagaccaaaatcgagtatggggctgtcaaggacggcgcgactatgaccttcttcaagaagtccaaaatttcaactttcgagaaaatgtgggcattcatgtctagcaagcctagcgcactggttaaaaacaacgaggagggcattcagcgcgctctcacagctgattacgccttgcttatggagagtacaactatcgagtacgtgacccagcgcaattgcaatctgacccagatcgggggtctgatcgatagcaaggggtacggaatcggcaccccaatgggttctccttaccgcgacaaaatcacaatcgctattctgcagctccaggaagaggataaactgcacattatgaaagaaaagtggtggagaggctcgggatgccccgaggaagagaataaggaggctagtgctctcgggatacagaagatcggtggtatatttatagtgctggcagccggcctcgttctgtccgtgctggtggcagtgggcgagtttgtgtataagctcagaaagactgctgaaagggaacagcggagcttctgctcaaccgtggctgacgagatacgattctctttaacgtgccagcgcagagtcaaacacaagcctcaaccaccaatgatggtgaagacggatgcggtcattaacatgcacacgtttaatgataggcgcctgcctggtaaggattccatggcttgttctaccagccttgcccccgtctttccttag

SEQ ID NO: 118556 - DNA, 2619 bp, synthetic construct
  misc_feature 1..2619: note = Description of Artificial Sequence: Synthetic coding sequence
  source 1..2619: mol_type = other DNA
atgaccgccccttggcgtcgccttaggtcactggtctgggagtactgggccggcctgctcgtatgtgcgttctggattcctgattcaagggggatgccccatgtcatccggattggcggcattttcgagtacgctgacggcccaaacgctcaagtgatgaacgcagaggagcatgcatttcggttcagcgcaaatattattaaccgtaatagaactctgctgcctaacacaacattgacatatgatatccagaggattcacttccacgacagtttcgaggccacaaaaaaggcttgcgatcaattggctctgggtgtcgtcgcaatattcggcccatcacaaggttcctgcactaacgcggttcagtctatctgcaatgccttggaagtgccccacattcagctgcgttggaaacaccatcccctggacaataaagatactttttacgtgaacctttaccccgactatgctagcttgagccatgccatcctggatcttgtccagtacctgaaatggcggagcgcaaccgtcgtgtatgacgattcgactggcctgatcaggctgcaggagttgatcatggcgccgagtagatacaacattcggctgaaaatacggcagctaccgatcgactccgatgattcccggcctctgttaaaggagatgaaaagaggacgagagttcagaatcatctttgactgttcacacactatggcagcccagattcttaaacaggcaatggcaatgggcatgatgaccgagtactatcattttatcttcactactctggatctgtacgctcttgatctcgaaccttatcggtactccggagttaacctcaccggcttccggattcttaacgttgacaatccacatgtgtccgctatcgtcgaaaaatggtccatggagcgcttgcaggctgcccccaggtctgaatccggtctgcttgacggggttatgatgaccgatgccgccctgctctacgacgccgtccacatagtgagcgtttgttatcagagggccccccaaatgacagtcaactctttgcagtgccaccggcacaaagcatggcggttcggaggccgattcatgaatttcatcaaggaagctcagtgggaaggattgacaggtagaatcgtgttcaataagaccagcggactcaggacagatttcgatctcgatattatctcgctgaaggaggatggattagaaaaggtgggagtctggtctcccgctgatggacttaacattactgaggtggccaaaggccgaggcccaaacgtaaccgattcacttacaaaccgatcccttatagttaccaccgtgctggaagagccgttcgttatgtttagaaagagcgatagaaccctatatggcaacgaccggttcgagggttactgtatcgacctcttgaaagaactggctcacatactgggattttcctacgagatccgactggtagaagacgggaagtacggcgcccaggatgataagggtcagtggaacgggatggtgaaggaactgatagaccacaaagcggacctggctgtagccccgctcaccatcacacatgtgcgggagaaggctatcgattttagcaaaccgtttatgaccctgggggtgtccattctttaccgcaaaccgaacggaaccaacccatcagtctttagcttcctgaacccactttccccggacatctggatgtatgtgctcctcgcatatctgggggtgtcctgtgtgctgttcgtcatcgcgcgtttctctccatacgagtggtacgacgcacacccatgtaaccctggctcagaagtagtagaaaacaacttcacgcttttgaattccttctggttcggcatgggctcacttatgcaacagggttccgagctgatgcctaaagccctttccaccaggattattggcgggatctggtggttctttaccctcattattatctcaagctacaccgccaatctagccgcctttttaactgtggagcgtatggagagtccgattgattccgcagatgacctggcgaagcagactaagatcgagtatggcgccgtgaaggatggagcaactatgaccttttttaaaaagtctaaaatctcaacgttcgagaagatgtgggcctttatgtcatcaaagccttccgcactggtcaagaacaacgaggagggtatccaaagggctctgacagcagattatgcactcctcatggagtctactactatcgaatacgtgactcagcgtaactgcaatttgacacagatcggaggactgatcgattccaagggctacgggattggcacacccatgggctctccttaccgagacaaaattaccattgcgatcctgcagctccaggaggaagacaagttacacattatgaaagagaagtggtggcggggctccggttgtcctgaggaagaaaacaaggaagccagtgcccttggtatccagaagattggaggaatctttatcgtgttggctgccggcctcgtattgagcgtcctcgtggctgtcggcgagtttgtctacaagctgaggaagacagccgagagggaacaagttagcctgcgggcctggtcattgcatcggatgggcaatggcgactctcggtag

SEQ ID NO: 118557 - DNA, 2871 bp, synthetic construct
  misc_feature 1..2871: note = Description of Artificial Sequence: Synthetic coding sequence
  source 1..2871: mol_type = other DNA
atgccccgggtgtccgcaccattggtgctgcttcctgcttggctggtcatggtcgcgtgttccccacattctctcaggatcgccgccattttagacgatcctatggaatgtagccgtggggagcgactgtcaatcaccttagcaaagaaccggattaaccgggctcccgagcgcctaggtaaagcgaaggtggaggtcgatatattcgaactgctgagagactccgagtacgagactgccgagaccatgtgtcaaattctgcccaaaggagtggtggctgttttgggcccatccagcagtccggcgtcctcttcaatcattagcaatatttgtggtgagaaggaggtgccccacttcaaggtggcccccgaggagtttgttaagttccaattccagaggtttacaactctaaatctgcacccctctaataccgatatttctgttgccgtggccggaattttgaatttcttcaactgcacaaccgcatgcctgatctgtgccaaggccgaatgtctcctgaatttggagaaactcctgcgtcagtttctgatcagtaaggatacattgtctgttagaatgctcgacgatactcgcgatcccacgccactgctgaaagaaattagggacgacaagactgccaccatcattatccatgcaaatgcgtccatgtcccacaccatcctcttgaaagccgctgagcttggcatggtgtccgcatactacacatatatctttacaaacttggaattctctcttcagcgcatggactccttggtcgatgaccgggtgaacattttggggttttccattttcaaccaaagtcatgccttttttcaggagtttgcccagtcgctcaaccaaagctggcaagaaaattgtgaccacgtgccatttacaggacccgctctgagctctgcattgctgtttgacgcggtgtatgccgtagtgacggcggtccaggagcttaacaggagccaagagattggggtgaaaccactatcatgcggatcagctcagatatggcagcacggcaccagcctcatgaattatttacggatggtagaactggagggcctgactggtcatatcgagttcaattctaagggacaacgttccaattatgctctcaagattcttcaattcactagaaacggctttagacaaatcgggcagtggcacgtggccgaagggctgtctatggactcccacctgtatgcaagcaacatctcagatactctgtttaacacaacccttgtggtgaccacaattctggaaaacccatatctcatgctcaaaggcaaccatcaggaaatggagggtaatgaccggtatgaaggcttctgcgtggatatgctgaaagagttggcggagatccttcgatttaattacaagatcagattggtcggcgatggagtgtatggtgtgcccgaggctaatggcacatggacagggatggtgggggagttgatcgcccggaaggcggatctggctgttgccggtcttaccatcaccgcagagcgggagaaagtgatagacttctctaagcctttcatgacacttggaatctccatcctgtatcgggtccatatgggtcgcaagccagggtactttagtttcctggatccctttagcccaggagtgtggttatttatgctcctcgcctacttggctgttagttgtgtcctattcctcgttgcgaggctgactccctacgaatggtattcccctcatccctgcgcgcagggccgatgcaatctgcttgtgaaccagtattccctgggcaactctttatggttccctgtagggggcttcatgcagcagggaagcactattgcaccacgtgccctgtccacacgatgcgtgtccggagtctggtgggcgtttactctgattattattagctcctacacagctaaccttgcggcgtttctgacagttcaaagaatggatgtacctattgagagcgtagatgatctggccgatcagaccgccattgaatatggaactatccacggtggatccagcatgaccttttttcagaattcacgctatcagacgtaccaaaggatgtggaactatatgtactccaaacagccttctgtgttcgttaagagcactgaagagggcatcgcacgagtgctcaattccaattatgcatttctcctcgagagcaccatgaacgaatactatcggcaaaggaattgtaacttgactcagattgggggcctactcgacactaaagggtatgggatcggcatgcctgttgggtctgttttccgcgacgaatttgacctggcaattttacagctccaggagaacaaccggctggagattttgaaaagaaagtggtgggaaggcgggaaatgtccaaaagaggaggaccatagagcgaaggggctgggtatggaaaacatcggcgggattttcgttgtactaatctgtggactgatagtcgccatttttatggccatgcttgagttcctgtggaccttgaggcactcagaggccacagaagtgtcagtctgtcaggagatggtcacagagctgagaagtattatattatgccaggattccatccatccgagaaggagacgggcggcagttccaccccccaggcctccgataccagaggagcgccggcctcgcggcaccgcaactctctcaaatggaaaactctgtggcgcaggagagccagaccagttggcccagcgtcttgcacaggaggctgcgctggtggccagagggtgcacccatatacgagtttgtcccgagtgtagaaggtttcagggccttcgtgcccggccaagcccagccagatccgaggagagcttggaatgggagaagacaacaaactctagtgagcccgaatag

SEQ ID NO: 118558 - DNA, 2871 bp, synthetic construct
  misc_feature 1..2871: note = Description of Artificial Sequence: Synthetic coding sequence
  source 1..2871: mol_type = other DNA
atgccgagagtgtctgcaccgctggtactgctcccagcgtggttggtgatggtggcgtgttcgccccactcattgcgcattgccgccattctggatgacccgatggagtgctcaaggggggagcggctgtccataacacttgccaaaaataggatcaatagggcgcctgagagattgggaaaagctaaagtggaggtggatatcttcgaactgctgcgggactcagagtacgaaacagcagagactatgtgtcagattctgccaaagggagtagtggccgtgcttggcccttcatcttcaccagcctccagcagtatcatcagtaatatttgcggggaaaaagaggtcccacattttaaggttgcacccgaggagtttgtgaaattccagtttcagcgcttcacgaccttgaacctgcatcccagtaatacggatattagtgtcgccgtggctggcattctcaactttttcaactgtaccaccgcttgcctgatctgcgctaaggctgagtgtctcctcaaccttgagaaactcctgagacagttcctaattagcaaagacactcttagcgtgcgtatgctggacgacacccgcgaccccactccccttctcaaggagatccgtgatgataagaccgctactatcatcatccatgcaaacgccagtatgagccacaccatcctgttgaaggccgccgagctagggatggtttccgcgtattacacctacatctttaccaacctggaattctctctccagcggatggattcacttgtcgacgaccgagtgaatatccttggcttctccattttcaatcaatcacacgcgtttttccaggagtttgcccagagcctgaatcagagttggcaagaaaattgtgaccacgtcccatttaccggtccagccttgagtagcgcgctgctgtttgacgccgtgtatgcagtggtgaccgctgtacaagagctgaatcgaagccaggagatcggcgtcaaaccactgagctgtgggtccgcccaaatctggcaacacggtacttctttgatgaattatctcagaatggtggagttggagggattgaccggacacatcgagtttaatagtaaggggcagagaagcaattacgccctgaaaatcctacagttcacacggaatgggttccgccagatcgggcaatggcacgtcgcggagggccttagtatggattcccatctgtacgcatccaacatttcagacacattattcaataccactcttgttgttaccacaatcctcgaaaacccttacctcatgttaaaaggtaaccaccaggaaatggaagggaacgacaggtacgagggtttctgcgtcgatatgctgaaagaactcgcagaaatcctccgctttaactataagatcagactggttggcgatggtgtctacggtgtgcccgaagctaacggcacttggaccggtatggttggagaactgattgcgcgaaaagcagatctcgccgtggcagggctgacaataactgcagagcgggagaaagtgattgatttttccaagccttttatgacactgggcatctcaatcctttatcgtgtccatatggggcggaagcccggctatttcagttttctcgaccctttcagtcctggagtctggctatttatgcttttggcttacctggctgtgagctgcgtgctcttcctcgttgctcgcctgactccctacgaatggtattcccctcacccgtgtgcccagggccgatgtaacctgctagttaaccaatacagtcttggaaatagtctgtggttcccggtgggtggttttatgcagcagggctctacaatcgcccctagggcactgagcacacgctgcgtgtccggcgtgtggtgggcctttaccctgataatcatttcctcttataccgccaatctggctgccttcctgaccgtgcaacgtatggacgtgccgatagagtctgttgacgatctggccgaccaaactgccattgagtacggcaccatccacggcgggagcagcatgaccttctttcagaattctcggtaccagacataccagaggatgtggaattacatgtactcaaaacagccctccgtctttgtgaagtccacagaggaaggcatcgccagagttctaaactcaaattatgcgtttttgctagaaagcacaatgaacgaatattataggcagcggaattgcaacctgactcaaatcggtggcttacttgacaccaaaggttacggaatcggcatgcctgtgggcagcgtgttccgcgacgagttcgatttggccattctgcagttacaggagaacaacagattggagattttgaagagaaaatggtgggagggagggaaatgtcctaaggaggaagaccacagggcgaaggggctcgggatggagaatattggtgggatctttgtggtgctgatttgtggcttaatcgtcgccatattcatggctatgctggagtttctttggactttgagacacagcgaagcaaccgaggtgagcgtgtgtcaggaaatggtcaccgaactgcgttcaattattctgtgccaggattctatccatccgagacgccgacgcgctgccgtccctccacctcgcccgccgattcccgaggagcgacgtcctagaggaaccgccaccttgagtaacggcaagctatgcggagcaggggaacccgaccagttagcccagcgactcgctcaggaggctgccctggtggcacggggctgtactcatatcagggtgtgtcccgagtgtagacgctttcaaggactccgtgcacgacccagcccagctcgatctgaagaaagcctggagtgggagaagacaaccaattcctctgaacccgaatag

SEQ ID NO: 118559 - DNA, 2943 bp, synthetic construct
  misc_feature 1..2943: note = Description of Artificial Sequence: Synthetic coding sequence
  source 1..2943: mol_type = other DNA
atgcccgctgaattgttgctcttgttgatagtggcgttcgctagcccatcttgccaggtgctgtcttctttgcggatggccgcgatcctggacgaccaaacggtctgcggcaggggagagcgtttggccttggccctggccagagagcagatcaatggcatcatagaagtgcctgccaaagctcgggttgaggtcgacatcttcgaattacagcgggacagtcagtacgagaccacagatacaatgtgtcagatcctgcctaaaggagtcgtctctgtgctgggcccctcctcgtcgccggcctccgcctctactgtgtctcatatctgcggcgaaaaggaaattccacatatcaaagtaggtccggaagaaactccccgactccagtacttgcgttttgctagcgtgagtctctatccaagtaatgaggatgtgagtctggctgttagccggatcctcaaaagcttcaactatccgtccgcatctctgatatgtgcaaaggccgagtgcctcctcagactggaggagctcgtacgaggctttctaatttccaaagagaccttatctgtgcggatgttggatgacagcagggatcctacccctttgttaaaggagattagggacgacaaagtgagcacaatcattatcgacgccaacgcctctatttcccacttgatcttgcggaaagccagcgaattgggaatgaccagcgccttctacaaatatatcttgacgacaatggacttccctattctgcatcttgatgggatcgttgaggatagctcaaacatcctgggatttagtatgttcaatacgagccaccctttttaccctgaattcgtgcgctctctgaacatgagttggcgagagaattgcgaagcctcaacatacctgggtccagcccttagcgccgccttgatgttcgacgccgtgcacgttgtcgtgagcgcagtgagggagctcaacagatcccaggagattggggtgaagccactggcctgtacatctgcgaacatatggccccatggaacttcacttatgaactacctacgcatggtggagtatgatggcttgacaggcagagtcgagttcaacagcaagggtcagcggacgaattataccttgcgtattctggaaaagtcgaggcaaggacacagggaaataggcgtgtggtattctaaccggactctggctatgaatgctaccacccttgacattaatctgtcacagaccctcgcaaataaaacattagtggttacaaccatacttgaaaacccatacgtcatgcgacgtcccaacttccaggcgttgagcggcaacgaacgctttgagggcttctgcgtcgacatgctaagggagcttgccgaactcctgaggttccggtacaggttacgactggttgaggatggactttatggcgctcctgagccaaatggcagctggaccgggatggttggcgagctgattaatcgaaaggccgatctggccgtggctgccttcacaattaccgctgagagagagaaggtcatcgacttcagtaaaccattcatgacactggggatctccatcctttaccgggtgcacatgggtagaaagcctggttatttcagctttcttgatcctttctctcctgctgtttggttgttcatgctgctggcctaccttgccgtcagctgtgtcctcttcctcgctgcccgactttccccctatgaatggtacaatccacatccctgcttacgcgcccgtccccacatactcgagaaccaatacacgctcgggaactctctttggttcccggttggaggttttatgcaacagggaagcgagatcatgccacgtgccctgtctacgcgatgcgtctctggcgtgtggtgggcctttacgttgattataatcagttcctacacggctaacctggcggcatttctgaccgtgcagcggatggaggtacccgtagaaagtgccgatgacctcgccgaccagaccaacattgagtacgggacaatccacgcgggcagcacaatgactttctttcagaacagccgctaccagacttaccaaaggatgtggaattacatgcagtcaaagcaaccttctgtgtttgtaaagtcgaccgaagagggcatcgctcgcgtcttaaactcccggtacgcctttcttctcgaaagcactatgaatgagtatcacaggaggctcaattgcaacctcacgcagatcggaggcctgctcgacaccaaggggtacggcatcggtatgccactggggagcccattcagggacgagattacgctagcgatactgcagcttcaggagaacaatagactggaaattctcaagaggaaatggtgggagggaggccgctgtccaaaagaggaagatcacagagccaaaggacttgggatggaaaatatcggaggcatctttatagtgttaatctgcgggctcattatcgctgtctttgtggcagtgatggagttcatatggagtacgagacgctccgctgagtccgaggaggtctcggtatgccaggagatgctgcaggagctaagacacgcagtatcctgcaggaaaacttctcgatcacggaggagaagaagacctggaggcccaagccgggctttactgagcttgcgcgcagtacgcgagatgcgacttagtaatggcaaattgtactctgccggcgccggaggggatgcaggctctgcgcatggcggccctcagcgtctcctcgacgacccaggccctccttcaggtgcaagacccgcagcgcccacgccatgtacacacgttcgcgtctgccaagagtgtagaaggatccaggctcttagagctagtggagctggcgctccacctcggggattgggggtgcccgcagaggctactagtccaccaaggcctcgcccaggtcctgccggaccacgtgaactggccgaacatgaatag

SEQ ID NO: 118560 - DNA, 2946 bp, synthetic construct
  misc_feature 1..2946: note = Description of Artificial Sequence: Synthetic coding sequence
  source 1..2946: mol_type = other DNA
atgccagcggagctgctgctgcttttgatagtcgcgtttgcaagcccaagctgtcaagtactgagcagcctgcggatggccgccatactcgatgaccaaactgtctgtggcaggggagagagacttgctttagctctagctcgcgaacagataaatggcatcattgaggtgcctgccaaggcccgggtcgaggtcgacatttttgagctccagagagatagtcaatacgaaacaacagataccatgtgccagattctccctaagggagtcgtgagcgtgcttggtccgagcagttcccccgcctccgcctctaccgtgtctcacatctgcggggaaaaggagataccccacattaaggtgggacctgaggagactccaagattgcagtacctcagatttgcatccgtcagcctgtatccttcaaacgaggatgtgtcacttgccgtgtccagaattctgaagagcttcaattatccctccgcctctctgatttgcgccaaagcagaatgcctgcttaggctggaagaactggttagaggtttcctgattagtaaggaaaccctctccgtgaggatgttggacgattcccgggatcctactccccttcttaaggaaattagggatgataaggtgtctactatcatcatagacgccaatgcaagcatctctcacctcattcttagaaaggccagtgagcttgggatgactagcgcattttataagtatattctgacaacgatggactttccaatcctccatctcgatggcatcgtcgaagattcgagtaacatcctaggtttttccatgtttaacacctcccaccctttctaccctgagttcgttcgctccctgaacatgtcctggcgggagaactgtgaagcctccacgtatctcggccctgcactgtctgctgcgctgatgtttgatgcggtgcacgtggtggtatccgctgttcgggagctgaaccggtcacaggagataggcgtgaagcccctagcctgcacctccgccaatatctggcctcacggaaccagtctcatgaattatctgcggatggtggagtacgacggcctaaccggtagggtcgagtttaattcaaagggccagagaacgaattacactcttcgcatacttgaaaagtctcggcagggccatagagagattggggtctggtatagcaacagaacactggctatgaatgccaccacgcttgacatcaatctgagtcagacgctggcaaacaagaccctcgtggtgacaaccatccttgagaacccctacgtaatgcgccgccctaatttccaggcgctgtccggaaatgagcgctttgaaggcttttgtgtcgacatgttgcgagagctcgccgaactcctgaggttccgttaccgattacggcttgtggaggacggcctttacggcgccccagaacctaatgggtcttggaccggcatggtgggcgaattaattaaccggaaggccgatttggccgtggcggctttcacaataacagcagagagggaaaaagtgattgactttagcaagcctttcatgacacttgggataagcatcctgtaccgagttcacatgggaaggaagcccggatacttcagctttcttgacccattttctccagccgtttggctctttatgttgcttgcttacctcgccgtttcctgcgtcttgttccttgctgcgcgtctgtcaccctatgagtggtacaacccacacccctgtcttcgcgcccgcccacatatactggagaatcagtacactttaggaaacagcctctggtttcccgtgggcggcttcatgcagcaaggaagcgagattatgccacgtgccctgtctacacgctgcgtaagcggtgtgtggtgggcatttacgttgatcatcatttcaagctataccgccaacctggcagctttcctcacggttcagcggatggaagtgccggtcgagagcgccgatgatctggccgaccaaactaatattgaatacggcaccattcacgctgggagcactatgacatttttccagaacagccgttatcagacctaccagcgaatgtggaattatatgcagtcaaaacaacctagcgtgttcgtcaagtctaccgaggagggaatcgcccgcgtgcttaatagccggtacgcctttctactggagtcaacaatgaatgaataccatcggaggctcaattgcaaccttactcaaatcggcggcctgctcgatacgaaggggtacggtattggaatgcccctcggcagccctttccgagacgaaatcacgcttgccattctgcagcttcaggagaacaaccggctcgaaatattgaagagaaagtggtgggaaggtggaaggtgcccgaaggaagaagatcacagagctaagggtttggggatggagaacatcggcggcattttcatcgtgctaatatgcgggctgatcatcgctgtcttcgtggccgtcatggagtttatctggagcaccagaagatccgccgaatccgaggaaactccggccctccatcccgccgcctgccagtgctccgctctcggacctcggacccccttgaaggaacctagcatgcttctcgttaaggttccttctacacgggtgcaggtggcgtttagccgtacctcactgcgccaggtgtgccccttcctccttcagcaccaactgtccagtttgtattggatccaggcgacgaatgttcagatttgttgtcacttcagctccctgaaaccatctcctgaccttacatttcccccatcgcatcggcccctgtcctcactgctctttactgcactagcggccgtgggcgggctccctgacgcctcgtcgttcttcttcccacccatcagctcctgtccacctttgcaaagcggtatcggaccatgccatagcactgaagcaacccttgtcaccagcaatttccatgtgtag

SEQ ID NO: 118561 - DNA, 1077 bp, synthetic construct
  misc_feature 1..1077: note = Description of Artificial Sequence: Synthetic coding sequence
  source 1..1077: mol_type = other DNA
taatgggcatttaccttgataatcatatctagctacacagcgaacctggccgctttccttacggtgcagagaatggaggtgcctgtggagtctgcagacgaccttgctgaccaaaccaacatcgagtatgggacaatccatgcggggtccacgatgacattttttcagaattcccgctatcagacatatcagcgaatgtggaattatatgcaatcaaaacaacccagtgtgtttgtcaaatccaccgaggaaggaattgcaagagttctcaatagtcgatatgcctttctactagagagcaccatgaacgaatatcacaggagactgaactgtaacctgacacagatagggggcctcctggacactaaaggctatggaattggcatgccactcggaagccccttccgagacgaaatcactctggcaatactgcaactgcaagagaataaccgtctggagatacttaagaggaaatggtgggaaggaggaagatgtccgaaggaggaagaccacagggctaaaggactcgggatggaaaatatcggcggcatcttcattgtgctcatttgcggtctgataattgccgtgtttgttgcggtgatggaatttatctggtcaactcgcaggtcggcggaaagcgaggaaaccccagcgctgcaccccgctgcatgccagtgttctgcattagggcctcgcacaccacttaaggagccttccatgttgcttgtcaaggttccatctactcgggtccaagtcgccttttctcgaaccagcctgcggcaggtgtgccctttcttgcttcagcaccaactgagttccctctactggatccaagcgaccaatgtacagatatgctgccacttttcttcgctgaaaccatctccagatctcaccttccctccttcacatcgtccactgtcatcccttcttttcaccgcactggccgccgttggtgggctgcccgacgctagcagcttcttcttccctcccatatcttcttgtccgcctctgcagagtggcatcgggccctgccattctacagaggctacactagtgacgtctaacttccatgtatag

SEQ ID NO: 118562 - DNA, 2769 bp, synthetic construct
  misc_feature 1..2769: note = Description of Artificial Sequence: Synthetic coding sequence
  source 1..2769: mol_type = other DNA
atgtctaccatgcgcctgctgactctggcccttttgttcagttgctctgtcgcaagggccgcctgtgacccaaagatcgtgaatattggagcagttctttccaccaggaagcacgagcagatgttccgggaggcggtgaatcaggcaaacaaacgacatgggagctggaaaatacagctcaatgctacttcagtgacccacaagccgaatgctattcagatggctttatccgtctgtgaggaccttattagctcccaggtctacgcaatcctggtgagccacccccccacccccaatgaccattttacaccaactccggtctcctacacagccgggttttatagaatcccagtcctaggacttacgactagaatgtccatttatagcgataagagtatccacctgtcttttctgaggactgtgcctccatactctcaccaaagttcagtgtggtttgagatgatgagagtgtacagttggaaccatatcattctgttagtatctgacgatcacgagggaagagccgcccagaagcgcttagagaccctgttggaagaacgggaatcaaaagccgaaaaagttctgcagtttgaccccggcaccaaaaacgtgacagccctgctgatggaggcaaaggagctggaggccagagtgatcatcctaagcgcttcagaagatgatgcagcgactgtgtatagggctgccgctatgctgaacatgacaggctccggatacgtgtggttggtgggagaaagagagattagtggcaatgccctaaggtatgccccggatgggatcctggggctgcaactgatcaacggaaagaatgaaagcgcccacatctctgacgccgtgggcgtggtcgcgcaggccgtccatgagctcttggaaaaagagaatatcactgatccaccccgagggtgcgtgggaaataccaatatttggaaaactggacccctgttcaaacgcgttctgatgtctagtaagtatgccgacggcgtgaccggacgcgtcgagtttaacgaggatggggaccgaaaatttgctaattatagtattatgaacctccagaatcggaagctcgtgcaagttggcatctacaacggtacacacgttatacctaatgataggaaaattatttggccaggcggggagactgaaaaaccccggggctatcaaatgagcaccagactgaaaatcgtgacaatccatcaggagccttttgtctacgtaaagcccaccctgtccgacggcacctgcaaagaggaatttaccgtgaacggagaccccgtgaagaaagtcatatgtactggtccgaatgacaccagccccggtagtcccagacacaccgtacctcagtgctgctatggcttttgcatcgatctgttgattaaacttgcaagaacaatgaacttcacttatgaggtacatctcgttgcagacgggaagttcggcacgcaggaacgtgtgaacaactcaaacaagaaagagtggaacggcatgatgggcgagctcctttcaggtcaggcagacatgatagtggctccccttactatcaacaacgaacgcgcacaatatattgaattcagtaagccgtttaaataccaaggacttacaattcttgttaagaaggaaattccaaggagtactctggattcatttatgcagcccttccagtccacactgtggttgttggtggggttgtcagtgcatgtggtcgctgtgatgttgtacttactcgatcggttctcccccttcggccgtttcaaagtaaactctgaggaagaagaagaagacgctctgactctgtcatccgctatgtggttctcgtggggcgtgcttctgaactccggaattggggagggcgcccccaggagcttctccgctcgcatactcggcatggtttgggcggggttcgccatgataattgtggcctcctataccgccaatcttgccgccttcctggtactggacagaccagaggagcggataaccggcatcaatgacccaagactcaggaatccgtcagacaagttcatctatgcgactgtcaaacagtcaagcgtggatatttatttccgccgtcaggtggagcttagcaccatgtacaggcacatggagaagcacaattatgagtcagctgccgaagcaattcaggcagtccgcgacaacaagctccacgccttcatctgggattcagcagtgttagaatttgaggcctcgcagaagtgcgacctggtaacaactggcgaactgttttttcgcagtggcttcggcataggaatgcgaaaagattcgccttggaaacagaatgtgtctcttagcattctaaagtcgcacgagaatggattcatggaagacctggacaaaacgtgggtgcgctatcaggaatgcgattctcggtctaacgctccagcaaccttaacttttgagaacatggcgggcgtgtttatgcttgtggccggcggaatcgtggccggaatttttctgatttttattgagatcgcttataagaggcacaaggacgctcggcgcaaacagatgcagctggccttcgctgctgtcaacgtctggaggaagaatcttcaggatagaaagtccgggagggccgagcccgaccctaaaaaaaaagcaacattccgagcgattacatccaccttagccagttcattcaaacgcagacggtctagcaaggacacccagtatcacccgacagacattacaggccctctgaacttaagtgacccatctgtaagtacagtcgtatag

SEQ ID NO: 118563 - DNA, 2730 bp, synthetic construct
  misc_feature 1..2730: note = Description of Artificial Sequence: Synthetic coding sequence
  source 1..2730: mol_type = other DNA
atgtctacaatgcggttactgaccctggctctgctcttttcctgttccgtggcgcgcgccgcgtgcgatcctaagatcgtgaacatcggagccgtcctgtcaactagaaaacacgagcaaatgttcagggaagcagtaaaccaagccaacaaaaggcatggatcttggaagatccaactgaacgcgaccagcgtgacccacaagccgaatgcgatccaaatggccttgtctgtgtgcgaggatttgatttcctcgcaagtgtacgctattctggtgtctcatcctccgacgccaaatgatcacttcacccctacccccgtctcttacacagctggcttctacagaatccctgtgttaggtctgactacccggatgtctatctacagcgataagtcaattcatttgagctttctgagaacagtcccaccctattcacaccagagctccgtctggttcgagatgatgcgtgtatactcatggaatcacatcattctgcttgtctctgacgaccacgaaggtagagccgcacagaagagactggagacacttctggaggagcgcgaatcgaaggcagagaaagtccttcagtttgatcctgggaccaagaatgtgacagccttgttaatggaagccaaagaactcgaggcaagagtcattatcctttccgcgtcagaagatgatgccgccaccgtatacagagctgctgcgatgttgaacatgacaggcagtggctatgtctggcttgtgggagaacgtgagatttccggcaatgctctgcggtatgcaccagacggaattctgggcctgcaactgataaatggtaaaaacgagagtgcgcatatttccgatgcagtgggggttgttgcacaagctgtgcacgagttgctcgagaaagaaaatatcactgacccaccaagaggatgtgtgggcaatacgaacatctggaaaacgggacctttatttaagagggtcttaatgtcttccaagtacgcggatggagtgactggccgagtggaatttaacgaagatggtgataggaaattcgccaattatagcataatgaatctgcagaaccgcaagttggtgcaggtaggcatatataacggtactcatgtgattcccaacgatcggaagatcatttggcccgggggcgagaccgagaagcctagagggtatcagatgtccacccgacttaaaatagttaccatccaccaggaaccattcgtatatgtgaagccaactctaagcgacggcacatgcaaggaggaattcaccgtgaatggcgaccccgttaagaaagttatctgcactggacccaacgacactagccccggttccccacggcatacagtcccccaatgttgttacggcttctgcattgacctgctgattaaattggcgcgcacaatgaactttacatatgaggttcacctcgtggccgatggaaaatttggcacacaggagcgggtcaataatagcaataagaaagaatggaacgggatgatgggtgagttgctgtccggacaagctgatatgatcgtggcaccgctgactattaataatgaacgggcgcagtatatcgagttctcaaaaccatttaagtaccaaggactcaccatattagtaaaaaaggagatccctcgaagcaccctcgactcctttatgcagccctttcagagcacactgtggttactggtcggcttgtcagttcatgtggttgccgtgatgctctatctgctggatcgcttctcacctttcgggagattcaaggtgaatagtgaagaagaggaagaggatgctctgacactgagcagtgctatgtggttctcctggggagtcttgttgaacagcggaatcggggagggagcccctagatccttttcagcccggatcttagggatggtttgggccggcttcgcaatgatcatagtggcaagttacacagccaacttagccgccttcctcgtgcttgatcggcccgaggaacgaatcactgggattaatgaccccagacttcggaatccaagcgataaattcatatatgcaacagtgaagcagagttcagtggatatttacttcaggcgacaggtcgaactcagtacaatgtatcgacacatggagaaacataattacgagagcgctgcagaagctatccaggctgtgagggacaacaaacttcatgcattcatttgggattcagctgtgctggagtttgaagcctcacagaagtgtgatctggtcactactggagagctgttctttagatcgggctttggtattggaatgcgcaaagattcaccttggaagcagaatgtgagtctatcgattctcaaatcccatgagaatggtttcatggaggatttggataaaacctgggtccggtatcaagagtgtgacagtaggtccaatgcccccgcaactctgacatttgagaatatggctggcgtcttcatgttggttgccggtggcattgtcgcggggatttttctcattttcatagagattgcttataaacgccacaaggatgccagacggaaacagatgcaacttgcgttcgctgccgtcaatgtttggagaaagaacctgcaggtcggacaggctaccctgcggggactggtgcccagagccagacccgggcacgggccacctccgagtcctaaggccgtcgcactggcactggcactggtggggcgcactggggcccgatcacatggtcagggtcagtggtag

SEQ ID NO: 118564 - DNA, 2832 bp, synthetic construct
  misc_feature 1..2832: note = Description of Artificial Sequence: Synthetic coding sequence
  source 1..2832: mol_type = other DNA
atgagcactatgagactgttgactctagccctgcttttcagctgttcggtggcccgcgcagcatgtgatccaaagatagtgaatatcggtgcagttctttccacaagaaagcacgagcagatgtttagggaagccgtgaatcaggctaataagagacatggatcctggaaaatacagttaaatgctactagcgtgacccataagcccaatgccatccagatggccttaagtgtgtgcgaggacctgatttctagccaggtgtatgcgattttagtgtctcatccaccgacccccaacgatcacttcacccccacccctgttagctacacagccggcttttatcggattccagttctggggctaaccacacgaatgagtatctatagcgacaaatcaatacacttgagctttctgcggacagttcctccctatagccaccagagcagcgtatggtttgagatgatgcgcgtatactcctggaatcatattatcctcctcgttagcgatgatcacgagggcagagccgcgcagaaaaggctggagactctcctggaggagcgggagagcaagagtaaaaagagaaactatgaaaacctggaccagctctcctacgacaataaaagaggtccgaaagctgagaaggttctgcagttcgaccctgggactaagaacgtcacagctctgctgatggaggcaaaggagttggaggcacgggtgattatattgtctgcatccgaggatgatgcagccactgtatatagagctgctgcaatgctcaacatgaccggttctggttacgtgtggctcgtgggagaacgagagatcagtggcaacgccctacgctacgcacctgatgggattctggggttgcaactaatcaatggcaagaatgagtcagcacatatctctgatgcagtgggggtagttgcgcaagccgtgcacgaactactcgaaaaagagaacattacggaccctcctcggggctgcgttggcaacacaaacatctggaagactggaccactgtttaaacgtgtgttgatgtccagcaaatacgctgacggggtaactggcagggtcgagttcaatgaagacggcgataggaagttcgccaattattctattatgaacctgcagaatcggaaactggtgcaagtcggaatttacaacggaacacatgtcattccaaacgacagaaaaatcatatggccaggtggtgaaactgagaaacccaggggctaccagatgtccacgcggctgaagatcgtgaccattcaccaggaaccattcgtgtatgtcaagcccacactgtcagatggaacgtgtaaggaagagttcactgttaatggcgacccagtaaaaaaagtgatctgtaccggtccaaatgatacttctccaggttcaccacggcacaccgtaccacaatgttgctatggcttctgtatcgacctgctcatcaaactggccaggacaatgaactttacctatgaggtccatctggtggctgacggcaagtttgggacccaggagcgcgtgaataattcaaataagaaagagtggaacggtatgatgggcgagctcttgagcggacaggctgacatgatagtcgcccctttgactattaacaatgaaagggcccagtacattgagttcagtaaacctttcaagtaccaaggcctgaccatcctggtcaagaaagagattcctagaagtacgttagatagctttatgcagccattccagagtactctttggctacttgtgggtctcagtgtgcatgtggtcgctgtgatgctgtatctgctggataggttttcaccattcggaaggttcaaggttaacagcgaggaggaggaagaagacgctctaacgctttccagcgccatgtggttctcctggggggtcctccttaatagtggaatcggggagggtgcacctaggtcgttcagcgcgcgaattttaggaatggtttgggcgggcttcgctatgataatcgttgcctcctatacggctaacctcgccgcattcctggttttggatcgacctgaggaacgcatcacgggaattaatgatccgaggcttagaaacccctctgataagttcatctatgccactgtgaaacagagctccgtggacatctactttcggcggcaggtggagctgagcacaatgtatcgccacatggaaaaacacaattatgagtctgccgccgaagccatccaggcggtgagagataacaagctacacgcctttatatgggactctgctgtgctggaatttgaggcatcccagaagtgtgatctggttacaacgggcgagttattctttaggagcggctttggtattggcatgcgcaaggactccccctggaagcagaatgtgtccctgtctatcctaaagtcccacgagaacgggtttatggaagaccttgataaaacatgggtgaggtatcaggagtgtgactcgcgctcaaatgcccccgcaacactcacctttgaaaacatggcgggtgtatttatgctggtggccggggggatcgtggccggaatcttcttaatattcattgaaatcgcttacaaaagacacaaagacgctagacgcaaacagatgcagctagcattcgctgcagtaaacgtgtggcgaaagaatttacaggaccgcaagtccggccgcgcggagccagaccctaagaaaaaggctacgtttcgggcgatcacctccactttggcgtcttctttcaaaagaagacggagctctaaagacactcaataccacccaaccgatatcaccgggcctctgaacctctctgacccctcagtttctactgttgtgtag

SEQ ID NO: 118565 - DNA, 2769 bp, synthetic construct
  misc_feature 1..2769: note = Description of Artificial Sequence: Synthetic coding sequence
  source 1..2769: mol_type = other DNA
atgagcactatgcgcttgttaaccctagccctcttgtttagttgcagtgtcgcccgcgccgcttgcgaccctaagatcgttaacatcggagccgttttgtcaacaagaaaacacgagcagatgttccgcgaggcagtgaatcaggcaaacaaacggcatgggtcctggaaaatacagttgaacgccacatccgtgacgcacaaaccgaacgctatccaaatggcattgtcggtgtgtgaagatctcatttcttcccaggtgtacgcaatcctggtgtcacaccctcccactcccaatgaccactttacgccaactcctgtgtcatatactgccggcttttacaggatccccgtgctcggcctgacaacacgcatgtctatatattccgacaagagcatccacctgagtttccttcgcacagtgccaccctattctcaccagtctagcgtttggttcgagatgatgcgggtctatagttggaatcacatcatactattagtctctgacgaccacgaagggcgcgccgcacagaagcgtttagaaacattactagaggagagggagagtaaaagcaaaaagcgcaattatgaaaatctggatcagctgtcctacgataacaagcgcggccccaaggccgagaaggtgctccaattcgatcccgggaccaagaacgttaccgcccttttgatggaggctaaagagctggaggcccgcgtgattatactttccgcaagtgaagacgatgccgcaacagtgtacagggctgccgccatgctaaatatgactggctcaggctacgtgtggcttgtaggagagcgggagatttcgggaaacgccctgaggtacgccccagacggcatcttgggcctgcaactgataaatggtaagaatgagtcagcccacatatccgacgccgtgggcgttgtagctcaggcagtacacgagctgctggagaaggagaacatcacagacccccccagaggttgcgtgggtaacacaaacatttggaaaacagggcctttatttaagagagtgcttatgagctcaaagtacgcagacggcgtgactggcagggtggaatttaatgaagacggagataggaaattcgcgaattactccatcatgaacctgcaaaatagaaagctggtgcaggtcggaatttacaacggcacccatgtgatccccaatgatcgtaagatcatttggcctggtggggaaacagagaagccccgtgggtaccaaatgagcactagattaaaaattgtgacaattcaccaggagcccttcgtgtacgtgaaaccaactctgagcgacggaacttgcaaagaggagttcacagttaacggagaccctgtgaagaaggtgatctgcacagggcccaacgataccagtccaggtagcccgcggcatacggtcccccagtgctgctacggattctgtatagacctcctgattaagttagcacgcacgatgaactttacgtacgaagttcacttagtagccgatggaaaattcgggacccaggagcgcgtgaacaacagtaataaaaaggagtggaatggtatgatgggtgagcttctgtctgggcaggccgatatgattgtggcgccgctgacaatcaacaatgagagagcacaatatattgagttttctaagcccttcaagtatcagggattaactattctggtgaaaaaggaaatacctaggtcgacgctggattcattcatgcaaccattccaatcaacgctgtggttactcgtcggtctcagcgttcacgtagttgcagtgatgctttatctgttggatcgcttttcccctttcggcagatttaaggtaaactccgaagaggaggaagaggacgccttgactttaagtagcgctatgtggttctcttggggcgtgctgctcaactccggaatcggggaaggcgctcctcgatcattttccgctcggatcctcggaatggtgtgggccggttttgcgatgatcatagtggcatcatacacagctaatctggctgccttcctggtgctggatcggcctgaagagagaatcaccgggatcaatgaccccagactcagaaaccccagcgacaagtttatctatgcaaccgtcaagcaatcttcagtggatatctatttccggcggcaggtagagttatccacaatgtatagacacatggagaaacacaattacgagagcgcagccgaagctattcaagctgtacgggacaataaactgcacgcatttatctgggacagcgctgtcctagagtttgaggcatcacagaagtgtgacctggtcactacaggggagttgttctttcgatctggtttcggcataggcatgcgtaaggactcaccttggaaacaaaacgtttctttatcaattttgaagagtcatgagaatggctttatggaggatttggacaagacttgggtccggtaccaggagtgcgactctaggagcaatgccccagccactctgacgttcgagaacatggctggcgtcttcatgctggtcgccggcggcattgtggccggtatctttctgattttcattgagatcgcatataagcgccataaggatgcccggagaaagcagatgcagctggcctttgccgctgtgaacgtttggcgcaagaatctgcagtcaacaggaggcggcagaggcgctctgcagaatcagaaagacacggtcctcccccggagagctatcgagcgagaggaagggcagctgcagctgtgtagccgccatcgcgaatcttag

SEQ ID NO: 118566 - DNA, 2721 bp, synthetic construct
  misc_feature 1..2721: note = Description of Artificial Sequence: Synthetic coding sequence
  source 1..2721: mol_type = other DNA
atgagtaccatgcgactgctaacacttgccctcctgttttcatgctccgtggcaagggcagcttgtgatcccaagattgtgaatatcggcgctgtgctctctacccggaagcacgagcagatgtttcgggaagccgtcaatcaggcgaacaaaaggcacggcagctggaagatccagcttaacgctacgagcgtcacacataagcccaacgctatccaaatggccctttccgtctgcgaagacctgatcagcagccaggtgtatgcaatcctcgtctcccatccacctactcctaacgaccacttcacacctacaccggtgagttacactgccgggttttatcgcatacccgtcctgggtcttacaacccgcatgtccatctactccgacaaaagcatacatctctcatttctgagaactgtccccccatatagccatcagtcaagcgtctggttcgaaatgatgagagtatacagttggaatcacattatcctccttgtgtctgacgaccatgaaggtcgcgcggcacagaagcgactagagacactgctcgaggagcgggaatccaaaagcaagaaaaggaactatgaaaacctcgatcagctgtcctatgacaataagaggggacctaaagcagagaaagtgctgcagtttgaccccgggactaagaatgtcacggcattactgatggaggccaaagagctggaagcaagagttataattctaagcgcgtcagaggacgacgctgctaccgtgtatagagcggctgcaatgttgaatatgactggttccgggtacgtttggctggtgggggaacgcgagatctccggaaacgctctgagatatgccccggatggcattctgggattgcagctgatcaacggaaaaaacgagagtgcccatatatcagacgccgtaggcgtggtggcccaggccgtgcatgaattactggaaaaagaaaacattactgatcctccaaggggatgtgtgggcaatacaaatatttggaagactggacctctcttcaaacgtgtcttgatgtcctccaagtacgccgacggcgtgactggccgcgtcgagtttaacgaggatggagatagaaagtttgctaactactccattatgaatctgcagaataggaagttagtccaggtgggtatttacaacggaacccacgttatccccaacgacaggaagattatttggcccgggggtgagaccgagaaaccaaggggatatcagatgagtactcgattgaagatcgtgaccattcaccaagagccctttgtgtatgtcaaacctacactgtctgacggtacttgtaaagaggagtttaccgtgaacggcgatccggtgaagaaggtcatctgtactggtcccaacgatacatctcccggcagcccgcggcatacagttcctcagtgctgctacggattctgcatagacttgctcattaagctggctcggactatgaacttcacctatgaagttcatctcgtggccgatggaaagttcggcacacaggagcgggtgaataacagtaacaagaaggagtggaatggcatgatgggagagctgctgtcaggccaggctgatatgatagtggctcctctgacaattaacaatgagcgggcacagtatattgagttctctaaacctttcaaataccagggcttgaccattctcgtgaaaaaggagattcccagaagtaccttggattcctttatgcagcctttccaatctaccttgtggttgctagtcgggctgtctgtccacgtggtcgctgtgatgctctacttgctcgatcgctttagtccattcggccgctttaaagtcaacagtgaagaagaagaggaagatgcgctgactctcagcagcgccatgtggttcagctggggagtgctgctcaattctggcattggcgagggcgctcctaggagttttagcgcgaggattctgggcatggtctgggccgggtttgccatgataatcgttgcatcttataccgcaaatctggccgcctttctcgttctggaccgccctgaagaaaggattaccggaattaatgacccaagactgagaaacccttccgataaattcatttacgccactgtcaagcagagcagcgtcgatatttatttcagacggcaggtggagctcagcacaatgtatagacacatggaaaaacataattacgagagcgcagcagaggcgattcaggccgtcagagataacaagctccacgctttcatttgggatagtgccgtcttggaatttgaggccagtcagaagtgtgatctcgtgacaaccggagaactcttttttcggtctgggttcgggatcggcatgagaaaggactccccctggaaacagaacgtgtctctctccatcctgaaatcccacgagaatgggttcatggaggacctggacaagacttgggtacgataccaggagtgcgactccaggtcaaacgcccccgcgaccttgacgttcgagaacatggcaggagtgtttatgttggtggcaggcggcatcgttgccgggattttcctcatttttatagagatcgcctacaagcgacacaaagatgccaggagaaagcagatgcagttggcttttgcagctgtgaacgtttggcggaagaatctgcagcagtaccaccccacagatataacaggcccactgaacctgagcgacccgagcgtaagcactgtggtgtag

SEQ ID NO: 118567 - DNA, 2817 bp, synthetic construct
  misc_feature 1..2817: note = Description of Artificial Sequence: Synthetic coding sequence
  source 1..2817: mol_type = other DNA
atgtctacgatgcggctcctgactctggccctgctcttctcgtgtagcgttgcccgggcagcatgtgacccaaaaatagtgaatatcggggctgtgctttccactagaaagcacgagcagatgtttagagaagccgtgaaccaggcaaacaagcgacacgggagctggaagatccagctcaatgcaacaagtgtgactcacaaacccaatgccatccagatggctctttctgtctgcgaggaccttatttctagccaggtctacgcaattttagtgagtcacccgcccacccccaacgatcactttaccccgacacccgtgtcctataccgcgggtttttatcggatcccagttctcggactgaccactaggatgtccatttattccgacaaatctatccacttatcgtttctgaggacggtgcccccatatagtcaccagtcctctgtgtggttcgaaatgatgcgtgtgtattcctggaaccacattattctgctggtgagtgacgatcatgaaggtagggctgcccagaagcgtctggagaccctccttgaagagagggagagcaaagccgaaaaagtactccagttcgaccccggcaccaagaacgtaaccgctctccttatggaagctaaagagctcgaggccagggttatcatcctaagcgcgtccgaggatgacgctgctactgtgtacagggccgctgctatgttaaacatgactggctctggatacgtgtggcttgtgggagagcgtgaaatcagtggcaatgccctcaggtacgctccagatgggattttaggcttacagcttatcaacggaaagaacgagtccgcacacatctccgatgcagtcggcgttgtagctcaggccgtgcacgagctcctggagaaggaaaatattacagacccccctcggggctgtgtgggtaacaccaatatctggaagacggggcccctttttaagcgggtcctgatgtcaagcaagtatgccgatggtgtcactggcagagtagagttcaacgaggacggagaccgaaaatttgctaactattccatcatgaaccttcagaacagaaaactcgtccaggtcggtatctacaacggtacacatgttattccaaacgacaggaaaatcatttggcccggcggtgaaaccgaaaagcccaggggatatcagatgagcacacgcctgaagattgtgacaatccaccaggagccatttgtgtacgttaagcccacactgtcagacgggacttgcaaagaggagttcactgttaacggggatccagtgaaaaaagttatctgtaccggaccaaatgacacttctcccggatctccaagacacactgttcctcagtgctgctacggattctgcatcgacctgctgattaaattagcacggacgatgaatttcacatatgaagtccatttggtcgctgacggtaaatttggtacccaggagcgcgtgaataactccaataagaaagaatggaatggaatgatgggtgagcttctgagtggccaggcagatatgattgtggccccgctaactatcaataacgaaagagctcagtatattgagttctccaagccttttaagtatcagggactaactatcctcgtgaaaaaggagatcccaaggtctacactggacagttttatgcagcctttccagtccacattgtggcttttggtggggctttcagtgcacgtggtagccgttatgctatacctgctagaccgtttctcaccctttggaagattcaaggttaattccgaggaggaagaagaagacgctttgaccctctcctctgccatgtggttttcctggggcgtcctcctcaattctggtatcggggaaggagcccctagatccttttcagcccgaatcttgggaatggtgtgggcaggatttgccatgatcatagtggcatcctacacagcaaatctcgccgcatttttagtgcttgacagaccggaggagcgaatcacagggattaacgatcccaggttgcggaacccgtctgataagttcatttacgccactgtgaaacaatcgtctgtcgacatttactttcgtagacaggtggagcttagtactatgtaccgccacatggaaaaacacaactacgagtcagccgccgaagccatccaagccgtgcgagataacaagctgcatgcttttatttgggacagcgcggtcctggagttcgaggcatcccagaagtgcgatctggttaccaccggggaactgttttttcgcagcggctttggcattggcatgcgcaaagattctccgtggaagcaaaacgtctctctctccatcctgaaaagtcacgaaaacggctttatggaagatctggataaaacctgggtcaggtatcaggagtgtgatagccgtagcaacgccccagccactcttaccttcgagaatatggcaggtgtgtttatgcttgtggcaggcggaatagtcgcaggcatttttctcattttcatcgaaattgcctataaacggcataaggatgccagaagaaagcagatgcaactggccttcgcggcagtcaatgtgtggcggaagaaccttcaggatagaaagtcaggacgcgcagaacccgaccccaagaaaaaggcaactttccgggctatcacatcaaccttggcatcttcgttcaagaggcgaaggtctagtaaggatactagtaccggggggggacgaggcgcactacagaatcaaaaagataccgttctccccagaagggccattgaaagggaggaagggcagctccagctgtgctctcgccatcgggagtcttag

SEQ ID NO: 118568 - DNA, 4395 bp, synthetic construct
  misc_feature 1..4395: note = Description of Artificial Sequence: Synthetic coding sequence
  source 1..4395: mol_type = other DNA
atgggtagagtagggtattggaccctgctcgttctgcccgcactgctggtgtggaggggtcccgcacccagtgccgccgcggagaaggggcctcctgctttgaacattgccgtaatgctgggccactcccatgatgtcaccgagagagagctgcgaaccctgtgggggcccgagcaggcagccgggctgcctctcgatgtcaatgtagtcgcgttacttatgaacagaacagatcctaagtctttaatcacccacgtctgcgatttgatgagcggtgcccgaatccacgggctggtatttggtgatgacaccgatcaagaagcggtggcccagatgttggatttcatttcaagccacactttcgtgcctatcttgggaattcatggaggtgcatccatgattatggccgataaggaccccacatcaacattctttcagttcggggcaagcattcagcagcaggctacggttatgttgaagatcatgcaggattacgattggcacgtgttcagccttgtcacaacgatattccccggctacagagaatttatttcatttgtgaaaacaactgtcgacaatagtttcgtaggctgggatatgcaaaatgtgatcacccttgacactagcttcgaggatgccaagacgcaggtgcagctaaagaagatccactcaagcgtgattcttctgtactgcagcaaagatgaagcggttttgatactctcagaagctcgttccctgggcctgaccggctatgactttttttggatagttccaagcctggtgagtggcaatacagagctgatcccaaaggagtttccatcaggactcatttccgtgagctacgacgattgggactacagtctcgaggcccgggtcagagatggtatcgggatcttgaccactgccgcttccagcatgctcgagaaattttcttacatccctgaggccaaagccagttgctacgggcagatggaaaggcccgaggtccctatgcacactttacaccctttcatggtcaacgtgacatgggacggcaaagatctctccttcacggaagagggataccaggtccaccccaggctcgtagtgattgtgctgaacaaagatagagagtgggaaaaggtggggaaatgggagaaccatactctgtctctgcgccatgccgtttggccaagatataaaagcttcagcgactgtgaaccggacgataatcacttgtcgattgtcacactcgaggaagccccgttcgtcatagttgaagacatagatccacttacagagacgtgcgtacgaaataccgtgccttgtcggaaattcgtcaaaatcaataacagtacaaatgaaggtatgaatgtgaagaaatgctgtaagggcttctgtatcgatatcttgaagaagctgagccgcactgttaagtttacatacgacttgtatcttgtgacaaatggcaagcacggcaagaaggtgaataacgtctggaatgggatgatcggagaggtggtgtatcagcgggcagtcatggccgtggggagcctgaccataaacgaagaaaggtctgaggttgtagacttctcggtgccattcgttgagactgggatctctgtaatggtttcacggagtaatggcacagtctcccccagcgcgtttctcgaaccttttagcgcctccgtttgggtcatgatgtttgtgatgctactgatagtgtccgcgattgccgtctttgtcttcgaatacttttctcctgtcggctataaccgaaacctcgctaaaggtaaagcaccacacggacccagtttcactatcggaaaggccatctggctcctgtggggcttagtgttcaacaactccgtacctgtgcagaaccctaaggggactacaagcaaaattatggttagtgtctgggcattctttgccgttattttcctcgcatcatacacagcaaatctggccgcctttatgatacaagaagagtttgtggatcaggtgaccgggctgtctgacaagaaatttcaaagaccacacgattacagtcctcctttccgttttggaactgttcccaacggcagcactgaaagaaacatccgcaataattacccctatatgcaccagtacatgacaaaattcaatcaaaaaggggtagaagatgcattggtcagtctgaagaccggcaaactggatgccttcatatatgacgcagcggtgctaaactataaggcggggcgggacgagggctgtaagctcgtgacaatcggctctggatacatttttgccacgactggctatggaattgcccttcagaaagggagcccttggaagagacagattgacctggcattgctccagttcgttggcgatggcgagatggaggaacttgagacactgtggctaacaggtatctgtcataatgagaagaacgaagtaatgtcgagccaactggacatcgacaacatggccggagttttttatatgttggctgcggctatggcgctgtccctgattaccttcatttgggagcatcttttttactggaaactgagattctgtttcacaggcgtgtgcagtgaccgaccagggttactattcagtatcagtcggggcatctacagctgtatccatggagtgcacatcgaggaaaagaaaaaatcgccagattttaacctaaccgggtcccaaagcaacatgctgaagttgctgcgcagtgcgaaaaatataagtagtatgtcaaacatgaatagtagtaggatggatagccccaagcgagccgccgattttattcagcgtggctccctgataatggatatggtctctgacaaaggcaatttaatgtactccgataaccgcagcttccaggggaaggagagcattttcggcgataatatgaacgagttacagacttttgttgctaataggcagaaggataacttgaacaattatgtcttccagggccagcatccgttgaccctgaacgagagcaatcccaatacggtcgaggtggctgtcagtaccgagtctaaagctaactcaaggcctcgccagctgtggaaaaaatctgtggacagtatcaggcaggacagcctgagtcagaacccagtgtctcagagagatgaggcgaccgctgaaaacaggacccatagcttgaaatcaccccggtacctccccgaagagatggcacactcagatatttcggagacatccaatcgggcaacctgtcatcgggagccagataattccaagaatcacaagaccaaagataacttcaagcgttcagtcgctagcaaatatccaaaagactgctcagaggtcgagcggacatacctgaagaccaagtcatccagtccgcgtgataagatttacaccatcgatggtgaaaaggaaccgggcttccacctcgacccaccacagttcgtggaaaacgtcactctgcccgagaatgttgatttcccagacccgtatcaggatccatccgaaaacttcaggaaaggggattccacactgcccatgaataggaatccgctccataacgaggagggactttcgaataacgatcaatacaagctgtacagtaagcattttaccctcaaagataaaggatccccccactcagaaacatccgagcgatatcgtcaaaattctacccattgtaggagctgcctgtccaacatgcccacatacagcggccattttacaatgagatctcccttcaagtgtgacgcttgccttagaatgggcaacctgtatgacattgatgaggaccagatgctgcaggagacagggaatccggctactggggaacaggtgtaccaacaggactgggcacagaataatgccctccaactacaaaagaacaagttgagaatcagccgccaacattcttacgacaatattgtggacaagcctcgagagttggaccttagtagacccagcaggtcaatctctctgaaggaccgggaacggctgctcgaagggaatttttacggatccttgttctcagttcctagctctaaactgtctggcaaaaaatcatctctgttccctcaaggattggaggacagcaagaggagcaagagtcttcttccagatcacacgtccgacaatccttttctgcacagtcatagggatgaccagcgcctggttattggcaggtgcccctcagatccctacaagcattccctcccctcccaagcggtgaatgacagctatctgcgctctagtctcagaagtaccgcctcatactgctcccgagatagcaggggccataacgacgtttacatttcagagcatgtgatgccttacgcagccaacaagaacaatatgtactcaaccccacgcgtactcaacagctgttctaacagacgagtatacaagaagatgccatctatagaatctgatgtctag

SEQ ID NO: 118569 - DNA, 4395 bp, synthetic construct
  misc_feature 1..4395: note = Description of Artificial Sequence: Synthetic coding sequence
  source 1..4395: mol_type = other DNA
atggggcgtgtcggatactggaccctgctggtgctgcccgcgctcctggtttggcgaggtccggctccaagcgcggccgctgaaaagggaccaccggcactgaacatcgccgtcatgctgggccactcacacgacgtgacggaacgcgagttgagaacattgtggggccccgagcaggccgctggattacctctggatgtgaatgtggtggccttgttgatgaatcgcacagaccccaaatccctcataacacatgtttgtgacctgatgagcggagctcggattcacgggctggtttttggcgatgataccgaccaggaggctgtcgcccagatgctagattttatttcatcacacactttcgtgccgattctcggcattcacggcggagctagcatgatcatggctgacaaggatcccacttcaactttctttcagttcggagccagcattcagcagcaggcaacagtcatgcttaaaatcatgcaggattacgactggcatgttttcagtctggtcactacaatcttccccggttaccgggaatttatctcttttgtcaagaccaccgtagataacagctttgtgggctgggatatgcagaacgttattactctggacactagcttcgaggacgctaaaacacaagtgcagctgaaaaaaatccattcatccgtcatacttctgtactgtagcaaggacgaggccgtcttgatattaagcgaggctagatccctagggctgacgggttatgatttcttttggatcgtgccatctctggtgtccggtaatactgagttgatccccaaagagtttccttccggacttatctccgtgtcttacgatgactgggattatagtcttgaggcacgagtgcgtgacggaatcgggatactgacaaccgcagcctcctccatgctggaaaaattctcctatatccccgaggctaaggccagttgctacggccaaatggagaggccagaggtgcctatgcatactctccatccttttatggtgaacgtgacctgggatggaaaggatctatctttcacagaagagggataccaagtgcacccaagactcgtggtaattgtgctcaataaggacagggagtgggaaaaagtgggcaagtgggaaaatcatacactcagtctgagacatgccgtgtggccacgctataagtctttctctgattgcgaaccagacgacaaccatttaagtatcgtcaccctggaggaggccccctttgtgatcgttgaggacattgacccgctgaccgagacctgtgttcgaaatactgtgccatgccggaagttcgtgaaaatcaataattcaactaacgagggcatgaacgtaaaaaaatgttgcaaaggattctgcatcgacattctgaaaaagctcagccgaactgtaaaattcacttacgacctttatctcgttactaatggaaagcatggtaaaaaggtaaataacgtgtggaacgggatgatcggagaggtggtgtatcaacgggcggtcatggccgtgggaagcttgactataaacgaagagcggtccgaagttgtggactttagtgtgcccttcgtggagaccggcatctcggtgatggtgtctagatccaacggaacagtttccccctccgcttttctggagcccttttccgccagtgtgtgggtgatgatgtttgtcatgttacttatcgtatccgctattgccgtttttgtgtttgaatatttcagccccgtgggatacaatcggaacctagccaaagggaaggctccacatggaccctcattcaccataggtaaggctatctggctgctgtggggcttagtctttaataattctgtgccggtgcagaaccctaaaggcaccacaagcaagatcatggtgtcagtgtgggcctttttcgctgtcatttttctggccagctatacagcaaaccttgccgctttcatgatccaagaggaattcgtggatcaggtcaccggcctcagcgacaagaaatttcagcggccgcacgattattcccctccattcagattcggcacagtgccgaacggatcaacggagcggaacattaggaataactatccttatatgcaccagtacatgacaaaattcaaccaaaaaggagtggaagatgctctagtcagcttgaaaactgggaaattagacgccttcatctatgatgccgccgttctgaattacaaagccggccgcgatgagggatgcaaactcgtcaccatcgggtctggttacatattcgctactaccggctacgggattgctctacagaaaggcagtccctggaagcggcagatagacttagccctcctgcagttcgtcggtgacggtgagatggaagagcttgaaacactgtggctgactggcatctgtcataacgaaaagaacgaagttatgagttctcagttggatatagataacatggccggcgtgttttacatgctcgccgcggcaatggctttgtcactgatcaccttcatttgggaacatctattctactggaagcttcggttttgtttcacaggcgtctgttctgataggcctggcctgctcttttccattagcaggggaatctactcgtgcatccacggggtacacatcgaggaaaaaaagaagagcccagacttcaacctcacaggatcacagagcaacatgctgaagctgctccgatctgccaagaatatcagctccatgagtaacatgaatagcagtaggatggactcccccaaaagggccgccgattttattcagagaggctcgttgatcatggatatggtaagcgacaaaggcaatctcatgtacagtgacaacagatctttccagggcaaggagtcaatattcggtgacaacatgaatgaactgcagacctttgtggcgaaccggcaaaaagataatttgaacaactacgtgttccaggggcagcatcctctcactcttaacgagtctaatcctaacacagtggaggttgctgtgtctacggagtcaaaagctaatagccggccgcgacaactctggaagaagtcagtggattctatcaggcaagattccctgtcccagaatcctgtgtcccagcgggatgaggccacggccgagaatcggactcactcccttaagtctcctaggtatctcccagaagaaatggctcattctgacatctctgaaactagtaatcgcgcgacgtgtcatagagaacccgataacagcaaaaatcataaaaccaaagacaacttcaagcgatcagtggccagcaagtatcccaaggactgcagcgaggtggagcggacgtacctgaagactaagtcgtcttcaccccgagacaaaatctatacaatcgacggtgaaaaagaaccagggttccacttggatcctccccaattcgtcgaaaacgtgaccctaccggaaaatgtggactttcccgacccgtatcaggaccccagcgagaatttccgcaagggcgactcgaccctacccatgaatagaaaccctctgcacaatgaggaagggctctcaaacaacgatcagtacaagttgtactcaaagcactttaccctcaaagataaggggtctccccactccgaaacatccgagcggtacaggcagaatagcacccactgtcgcagttgtctaagtaacatgccaacatactcaggccatttcacaatgcgctcgcctttcaaatgcgacgcatgtcttagaatgggcaacctctacgacatcgatgaggaccagatgcttcaagagaccggtaaccccgccaccggggagcaggtctaccagcaggactgggctcagaacaatgcattacagctgcagaaaaataagctcaggatctccagacagcacagctatgataatatcgtggataaaccccgggaactggacctgagcagaccttctagaagcatttccctgaaggatcgggaacgcctgcttgaagggaatttctatggctctcttttttctgtgcccagctccaagctgagcggaaaaaagagttcgctctttccccaggggctggaggatagcaagaggagtaagtccctgctcccagatcacactagcgataatccctttcttcactctcaccgggatgatcagcgcttggtcattgggcgctgtccttctgacccctacaagcatagtctgccatctcaagccgtgaatgatagctatctccgctcttcgctcagatcaactgcttcatactgctcacgggacagtcgcggccacaacgatgtgtatatttcggagcatgttatgccatacgctgcgaataaaaataatatgtatagtacccctcgtgtgcttaattcatgttccaatcgaagggtgtacaagaagatgccatcaatcgagtcagatgtttag

SEQ ID NO: 118570 - DNA, 4395 bp, synthetic construct
  misc_feature 1..4395: note = Description of Artificial Sequence: Synthetic coding sequence
  source 1..4395: mol_type = other DNA
atgggccgggttggatactggaccctacttgtgctccccgctctgttggtttggagaggtcccgcccccagtgctgccgccgagaagggccctccggcattaaacatcgccgtgatgctgggtcactcccacgatgttacagaaagggagcttcgtacactgtgggggcccgaacaagccgcaggattaccattggacgtaaatgtggtcgctctcttaatgaaccgtaccgaccctaagagccttataactcatgtatgcgatctgatgtctggagccaggattcatggactcgtctttggtgacgatactgaccaagaagccgtggctcagatgctggatttcatctccagccatacctttgtgcccattctcggcatccacggcggggcctccatgataatggccgacaaggacccaacgtccacattttttcagtttggcgcttcaattcaacagcaagctacagttatgttgaagataatgcaggactatgactggcacgtctttagcttagtgaccaccatattccctggttaccgggagttcatctctttcgtgaagacgactgtggacaattcttttgtgggatgggacatgcagaatgtcattacgcttgacacaagcttcgaagatgcaaagacccaggtgcaactgaagaaaattcacagcagcgtaattctgttgtactgctccaaagacgaggccgtgttaatactctctgaagcaaggtcactggggctgactggctacgactttttttggatcgtgccaagcttggtgtctggtaatacagagttgattcccaaggaatttcccagcggactaatcagcgtctcttacgacgactgggattacagcctggaagccagagtccgggatggtattggaatacttaccaccgctgccagcagcatgttggagaagttctcgtacattccggaagctaaggccagctgctatggtcagatggagcgacccgaggtcccaatgcatacattgcacccttttatggtaaatgtgacatgggatggaaaagacctttctttcacggaggaaggctatcaggtgcacccacgactggtcgtgattgtgctcaacaaggaccgcgagtgggaaaaggttggtaaatgggaaaaccataccttaagcctaaggcatgctgtgtggcctaggtataagtcgttttccgattgtgaaccagatgacaatcacctgtccatagtcacactggaggaagccccatttgtcattgtcgaggacattgatcccttaactgaaacctgtgtgaggaacactgtgccttgtcgaaaatttgtgaaaattaacaattctaccaacgaaggcatgaacgtcaagaagtgttgtaagggcttttgtattgatatcctaaagaagttgtcccggaccgtgaaatttacctacgacctgtatctcgttacaaacggcaagcacggtaagaaggtgaacaatgtctggaacggcatgattggtgaagtggtgtatcagagagcagtgatggctgtggggtctctgacaatcaacgaagagcggtctgaggttgtggatttttccgtgccttttgtcgagacagggatttctgtgatggtgagccgatccaatggcaccgtgtcacccagcgcttttcttgagccattttcagcttcagtgtgggtgatgatgtttgtaatgcttttaatagtctctgcaatcgccgtgtttgtgttcgaatatttctcaccggtcggttataacaggaacttggctaaagggaaagctccacacggtcccagttttactattggcaaggctatatggctcctctggggattggtcttcaataattctgtaccagtccagaatccaaagggtaccaccagcaagattatggtgtccgtctgggcattttttgcagtcattttcctcgcttcctacactgccaatctggcagctttcatgattcaggaagagtttgtggaccaggtgacgggactgtcggacaagaagttccagaggccccacgactactcacctccgtttcggtttggtactgtgccaaacgggtcaactgagagaaatattcgcaataactatccatacatgcatcagtatatgacaaagttcaaccaaaaaggggtggaggacgctctcgtctccctgaaaactggtaagctcgatgcttttatatatgatgctgccgttctgaattacaaggccgggagggacgaaggctgtaaactcgtgacaatagggagcggatacatctttgctacaaccgggtatggcatcgcccttcaaaaaggcagcccttggaagagacagatcgatctggccctgctgcagttcgtgggagatggtgagatggaagagctggagactctgtggctcacaggcatatgtcacaacgaaaagaatgaggttatgagctctcagctggacatcgataatatggctggcgtattctacatgttggctgcagctatggcactctccttgattacatttatttgggagcacctgttctactggaaactgcgcttttgtttcactggggtgtgctcagataggcctggcctgctgttcagcataagtcgcggaatctatagttgtatccatggagtgcacatcgaggaaaagaaaaaatctccggacttcaacctcaccggctcacagtcaaatatgctcaagctattgaggtccgccaagaacattagctcaatgagtaacatgaatagttccaggatggacagtccaaagcgcgcagcagactttatacaaaggggctcgttaatcatggatatggtttcagacaaaggaaatcttatgtacagcgacaatcggtcctttcagggcaaagagtccatttttggtgacaacatgaatgaattacagacgttcgtggctaacaggcagaaggataacttaaataactacgtgtttcaaggccagcacccgttgaccctgaacgaatcaaatccgaacaccgtggaggtcgcagttagcaccgagagcaaggccaacagcagaccgaggcaattgtggaagaagagcgtagacagtatcaggcaggactctctgtcccagaatccagtttctcagcgggacgaggcgaccgcagaaaatcggacgcactcactgaaaagcccccgatacctgccggaagaaatggcccacagcgacatctccgaaacatcaaatcgagccacctgccatcgtgagcccgacaactctaagaaccataagacgaaagacaactttaaaaggagcgtcgccagcaagtatcccaaggactgttcagaagtggagaggacctatctaaaaaccaagtcatcaagccctagagataagatctatacaatcgatggcgaaaaagagcctggatttcacctcgaccccccgcagttcgtagagaacgtgaccttgcctgagaatgtagacttcccagacccataccaggaccccagcgaaaattttaggaaaggcgactcaacactgccgatgaataggaatcccctgcacaacgaagaggggctctccaataatgatcaatataagctgtactctaaacacttcaccctcaaggacaagggctcccctcattccgaaacatcagaacgttacagacagaactcaacccattgtagatcctgtttatccaacatgcctacttattcagggcactttacgatgcgaagtccttttaagtgcgacgcttgcctgagaatggggaatctttatgatatcgacgaagatcagatgctgcaagagaccggtaacccagcaacaggtgagcaggtctaccaacaggactgggcccagaataacgctctacagctacaaaaaaataaattacggattagccgccaacatagttacgataatatcgtggacaagcctcgagagctggacctttcgcggccctccagatcgatctcactgaaggatagggaaaggctgctggagggcaacttttacggatcccttttctccgttccttcaagcaagctgtcggggaagaaatcgagcctgtttcctcagggtttagaggacagcaagaggagcaagtcactgctcccagatcatacatccgacaacccgttcttacactcccaccgcgacgatcaacgtttggttattggtaggtgcccaagcgatccatacaaacacagcctgccatctcaggctgtgaacgactcatacttgagatcatctctcaggagcactgccagttactgttcccgggattcccgtggccataatgatgtgtatattagcgaacatgtgatgccttatgcagcaaacaagaacaatatgtactcaaccccaagggtcctgaattcatgtagtaacagaagagtttacaaaaaaatgccgtctatcgaaagtgacgtctag

SEQ ID NO: 118571 - DNA, 3846 bp, synthetic construct
  misc_feature 1..3846: note = Description of Artificial Sequence: Synthetic coding sequence
  source 1..3846: mol_type = other DNA
atgggacgtgtgggttactggactctcttagtgctccccgcactgcttgtctggcgagggcctgccccatctgctgcagccgaaaaaggcccacctgctctcaacattgccgttatgcttggccatagtcacgacgtcaccgagagggagctgcgtactttgtggggtccagagcaggccgccgggctgcccttagacgtcaatgtcgtggccttgctaatgaatcggacagaccctaagagcttgataacccatgtctgcgatctaatgagcggagcccgaatccatggactggtgtttggtgacgatactgatcaggaagcagtagcacagatgctggatttcatttctagccatactttcgtgccgatactcgggatacacggcggcgcttccatgattatggcagataaggacccaacctccacattttttcagtttggggccagtattcagcagcaggctactgtgatgctgaaaatcatgcaagactacgattggcacgtcttctctctggtaactaccatcttcccaggctatcgggaatttatttcctttgtcaagacaaccgtagacaatagttttgttggctgggacatgcagaatgtgataaccctggatactagctttgaggacgcaaaaacccaagtccaactgaaaaagatccatagctctgtgatcctgctgtactgttctaaggacgaagcggtcctaatactcagcgaggctcggagtcttggcctgacaggctatgattttttctggatagtgccctcgctggtctcagggaatacagaacttatccctaaagaattccctagtggattgatttcagtctcctatgacgactgggattactctcttgaagcccgggtcagggatgggatagggattcttaccaccgcagcatctagcatgctggagaagttcagctacatccccgaggccaaggcatcatgttatggccaaatggagcgcccagaggtgcccatgcataccctccatccattcatggtgaacgtcacttgggacgggaaagatttatccttcactgaggaaggctaccaggtccaccctcgtctggtggtgatcgtgctaaataaagatcgagagtgggagaaagtgggaaagtgggagaaccatactttgagccttcggcatgcagtttggccacgatacaaaagtttcagcgactgtgagccagacgacaatcacctgtcgatcgtgacactagaagaagcgccttttgttatcgtcgaggacatcgaccctctgacagaaacctgtgttcggaacacagtaccatgccgtaaatttgttaagattaataactccaccaacgagggcatgaatgtgaagaaatgctgtaagggcttttgcatagacattctgaaaaagctgtcaaggaccgtgaagttcacctatgatctctatctagtgacgaacggcaaacacggtaaaaaggtgaacaacgtgtggaatgggatgattggcgaggtcgtttaccagcgggcggttatggctgtcggctccctgaccatcaacgaagagcggtctgaggtggtggatttctcagttccctttgtcgaaacgggcattagtgtaatggtatcccggagcaacggtaccgtatctcctagcgccttcttggagcctttcagtgctagcgtctgggtcatgatgttcgtgatgctgttaatcgtgagcgcaattgcagtgttcgttttcgaatactttagccctgtcggatacaaccgtaacctggcaaagggaaaggccccccatggaccctctttcacaattggaaaggctatctggttgctctgggggctggttttcaacaactctgtgccagtgcagaaccctaagggcaccaccagtaaaatcatggtgagcgtctgggccttttttgccgtgattttcttagcctcttacacagctaacctcgcagccttcatgatacaggaagaatttgtagatcaggtcaccggcctgagtgataaaaagtttcagcggcctcacgactattccccacccttcaggttcggcactgtgccaaacggctcaactgagcgcaacatccggaacaattacccctacatgcatcagtacatgactaagtttaatcaaaaaggtgtggaagacgccctggtctccctgaagaccggcaagctagatgctttcatttatgacgccgcggtactgaactataaagccggcagagacgaaggttgtaagctggtgacaatcggctccggctacattttcgcaactacgggttatggaatagcccttcagaagggaagcccgtggaagcgacaaatcgacctggcccttctccagttcgtgggagatggcgaaatggaggaactcgagaccctgtggctgaccggaatatgccacaacgagaagaacgaggtcatgagcagtcagctggacatagataatatggcgggcgtgttctatatgctggctgctgctatggctctgagtttgattaccttcatctgggaacatctcttttactggaaactccgtttctgtttcactggcgtgtgtagcgaccggccagggctgctgttctccatttctcgtggaatctattcttgcatccacggagttcatattgaggagaagaagaaaagtccagacttcaatctgacgggaagccaaagcaacatgctaaagttgctgcggtcagccaaaaatatctcttccatgtcgaacatgaattcaagcaggatggatagtcccaaacgagctgcagacttcattcagcggggctcactgataatggacatggtttccgataaggggaatctgatgtacagcgataaccggtcctttcagggtaaggagagcatctttggcgacaatatgaatgagcttcaaacattcgtggctaacagacagaaagacaatcttaataactacgtctttcaagggcagcaccccctcacacttaatgagtctaatccaaataccgtagaggtggctgtctcaactgaatcaaaggcaaacagccgcccaagacagctctggaagaaatccgtcgactccataaggcaggactccctgtctcagaacccagtgtctcagcgtgatgaggcaaccgccgagaaccgcacccactcgttgaagagccccagatacctgcccgaagagatggcccactcggatatatcagaaacctctaatagggctacctgtcacagagaacctgacaattccaagaaccacaagaccaaagataatttcaagcgatctgtggcaagcaagtaccccaaagactgctccgaggtagaaaggacctacttgaagaccaagtcttcgtctccacgggacaagatttacacaatagacggtgaaaaggaacccggctttcacctggatccgccacagtttgtggaaaacgtaacgctgccagaaaacgtggatttcccagacccctaccaggacccctcggagaactttcgcaaaggcgattctaccctgcccatgaacaggaatccgttgcacaacgaagaaggattatctaataatgaccaatacaaactgtactcaaagcactttacgttaaaggataaagggtctccacacagcgaaacgtccgagcgctatcgccagaactccactcactgcaggtcatgcctgtccaacatgccaacttacagcggccactttacaatgcgctccccctttaagtgcgacgcttgtctgagaatgggcaatctgtacgacatcgatgaggatcagatgctacaggaaacggggatgaccaatgcttggctgctgggagacgcccccaggaccctaaccaacaccaggtgccatcccaggcgctag

SEQ ID NO: 118572 - DNA, 3375 bp, synthetic construct
  misc_feature 1..3375: note = Description of Artificial Sequence: Synthetic coding sequence
  source 1..3375: mol_type = other DNA
atgctgaagatcatgcaggattatgattggcacgtcttcagtctggtgactaccatttttcccggatacagagaattcatttccttcgtgaaaaccacagtcgacaactccttcgttggctgggatatgcagaatgtgatcacgctggatactagctttgaggacgccaagacacaggtgcaactcaaaaaaatccacagttccgtgatccttctgtactgttctaaagatgaggccgttcttatattgtcagaagcgcggagtctcggcctcacaggctatgattttttctggatcgtcccttctctggtgtcaggaaatactgaactgatacccaaagaatttccatctgggttgatctccgtctcatatgatgattgggactacagtctggaggccagagtgagggatggcatcggtattctgaccacggctgcgagctctatgctagagaagttctcctatattcccgaagctaaggccagctgttacggacagatggagcgcccagaagtgccaatgcacacactacacccctttatggtgaatgtgacatgggacggcaaggatctctctttcaccgaagagggttaccaggtgcaccctagacttgtggtaattgtgttgaataaggaccgagagtgggagaaagtcggcaaatgggaaaatcataccctaagtctgaggcacgctgtctggcctagatataaatctttctctgattgcgaacccgacgacaaccatctatccattgtcactcttgaggaagcaccatttgtgatcgttgaagacatcgacccgctgaccgaaacctgcgtgcgcaataccgtcccatgcagaaagtttgtgaagattaataattctaccaacgagggtatgaatgtgaaaaaatgttgtaaggggttttgtatagatattctgaaaaaactgtcccggactgtcaaattcacatatgacctttaccttgtgacaaacggcaagcatggcaagaaggtgaacaatgtgtggaacggcatgataggggaggtcgtgtaccagcgagccgttatggcagtgggctccctcacaattaatgaagaaagatctgaggtcgtggatttctccgttcctttcgtggagactggtatctctgtcatggtatcaaggagtaacggcacagtaagcccgagcgcctttcttgaaccattcagtgcgtctgtgtgggtgatgatgtttgtaatgctgctcatagtgagcgccatagctgtgttcgttttcgagtattttagtcctgtcggctataaccgcaacctggccaaggggaaagccccacacgggccaagcttcaccataggcaaggccatctggctcctttggggcctcgtcttcaataacagcgtcccggtgcagaatccgaaaggtaccacaagtaagatcatggtttctgtctgggcctttttcgccgtaatttttttggcctcctacacagctaacctggccgcattcatgatccaagaggaatttgtggaccaggtgaccggattgagtgacaagaagtttcagagaccgcatgactacagcccccctttccggtttgggacagtgccaaacggctccaccgaaaggaatataaggaacaattacccatacatgcaccagtacatgactaaatttaatcagaagggtgtcgaggatgcgctggttagcttaaaaactggcaaactcgacgcttttatttacgatgcagccgtactgaattacaaggctggcagagatgagggttgtaagttagttacgatcggctccgggtatattttcgcaactacgggctatggcattgctctccagaaagggagcccctggaaaaggcagatagacctggccctacttcaattcgtgggcgatggagaaatggaggaattggaaactctatggttgacagggatttgtcacaacgaaaaaaacgaggtgatgtcttcgcagctcgacatcgacaatatggctggcgtgttctacatgctggccgccgctatggccttgagcttgatcacctttatttgggagcacctgttctattggaaactgcgattttgttttacaggtgtttgttccgaccgacccggccttcttttcagcatctctagaggaatatacagctgcattcatggagtgcacattgaagaaaagaagaagtcaccagactttaatctgacagggtcccagtcaaatatgttgaagttgctaaggagtgcgaagaatatttcctcaatgtcgaatatgaattcaagtcggatggatagccctaagcgggctgctgatttcatccaaagaggtagcctcatcatggatatggtctcagacaaaggaaatttgatgtactctgataatcggtcctttcagggtaaggaaagtatctttggggataatatgaacgaactgcagacctttgtagccaatcggcaaaaagacaatttgaacaattatgtgttccaggggcagcatcccctgacattaaacgagtctaatcccaacacagtcgaagtcgcagtgtccaccgagtccaaggctaattctaggccccggcaactgtggaaaaaaagcgtagacagtatccggcaggatagcttgagtcagaatccagttagtcagcgagacgaagccaccgccgaaaacagaacacattccctgaagagtcccaggtacctgcctgaagagatggcccattcagacatctctgaaacttctaaccgagctacatgccacagagaaccggataattctaagaatcataaaacaaaagacaattttaagagatctgtggcatctaaatatccaaaagactgttctgaggttgagcgtacctatctcaagacgaaatcttcttcgccacgggacaaaatttataccattgatggggagaaagaaccgggatttcacctggatccgcctcaatttgttgaaaatgtcactctgccagaaaatgtggatttccccgacccttaccaggatccttccgagaatttcaggaagggcgacagtacacttccgatgaaccgcaatcctctccataacgaggagggactaagtaataacgatcagtacaaactctattcgaagcattttacactgaaagataaaggctccccacacagcgaaacaagcgaaaggtatcgtcagaactcaacccattgccggtcctgcctttccaacatgccaacatacagtgggcacttcaccatgcggtccccgtttaaatgcgacgcctgtctgcgcatgggcaatctttacgacatcgacgaggatcagatgctgcaggaaactggtatgactaacgcctggctccttggcgacgctcccagaacactgaccaacactaggtgtcatcccagacgctag

SEQ ID NO: 118573 - DNA, 4455 bp, synthetic construct
  misc_feature 1..4455: note = Description of Artificial Sequence: Synthetic coding sequence
  source 1..4455: mol_type = other DNA
atgaaacctagggccgaatgttgcagcccaaagttctggctagtgcttgctgtgctggccgtaagtggttcacgagcacgttcccagaaaagccctcccagcattggcatcgcagttatcctagttggcacctctgatgaagtcgccataaaggatgctcacgagaaggacgattttcaccacttgtcggttgtcccaagagtggaactggtcgccatgaatgagactgacccaaagtcaatcatcacccgcatctgtgatctgatgagtgacagaaaaatacaaggcgttgtttttgcagacgacaccgaccaggaagctatcgcccaaatcttggattttatttccgcccaaactctcacccctattctgggcattcatgggggaagttccatgataatggccgacaaggacgagagctcaatgttctttcaattcgggcccagcatcgagcaacaggcttccgtcatgctcaatattatggaagagtacgattggtatatcttttcaatagtgacaacctattttccggggtatcaggactttgtgaacaagattcgcagcaccatcgagaattcgtttgtgggttgggagctggaagaagtcctgttgctcgatatgagcctggacgacggcgatagcaagatccagaaccaactgaagaaattgcaatcacctatcattctcctctattgcactaaagaagaggccacctacatattcgaagtggcaaactcagtggggctcaccggttacggctatacctggatcgtgccgagccttgtcgcgggggatacagacaccgtgcctgcagaatttcccacaggcttgatatctgtgtcgtacgatgagtgggactacgggctgcccgctcgggtgagggacggcatagccattataaccaccgccgcaagtgatatgctgagcgagcactctttcatcccggaacctaaatcctcttgctataacactcacgaaaagaggatctaccagagcaacatgctgaatagatacctgatcaacgtaacgttcgagggccgtaacttaagcttcagtgaggacggctatcaaatgcaccctaagctcgtgatcattctacttaacaaagaaaggaaatgggaaagggttgggaagtggaaagacaagtctcttcagatgaagtactacgtgtggcccaggatgtgtcctgaaacagaagagcaggaggacgaccacctctccatcgtgactttggaggaggcccctttcgtgatcgtggagagtgtggatccactctccgggacttgcatgcgcaacacagtgccttgtcagaagaggatagtgacagaaaataaaacagatgaggaacctggatatataaaaaaatgttgcaaagggttctgtatcgacatcctcaaaaagattagtaaaagcgtcaagttcacctatgatctgtacctggtgactaacggcaagcacggaaagaagatcaacggaacctggaatgggatgatcggggaggtcgtcatgaagcgggcttatatggctgttggctccctgaccataaatgaagaaagatcagaagtggtggactttagcgtgcccttcatcgaaaccggaattagtgtcatggtcagccggtcgaacggtactgtctcaccatccgcattcctcgagccgttctcagccgatgtctgggtcatgatgttcgtcatgctgctgattgttagcgctgtagccgtgttcgtattcgaatattttagccctgtgggatacaaccggtgcctggcagacggacgggagcctggagggccaagctttaccatcggtaaggccatatggctgctgtggggcctggtttttaataacagtgtgcccgtccagaatccaaaagggacgacctccaagatcatggtatccgtctgggcattcttcgcagtgatctttctggcatcttatacagccaacctagctgcgtttatgatacaagaggaatacgtggaccaagtatccggactttcagataagaagttccagaggcctaatgattttagcccaccttttcggttcggcactgttccaaatgggtccactgagcgcaatataagaaataactacgccgagatgcatgcctacatggggaagttcaatcagcgaggggttgacgacgcacttctgtcactcaaaactgggaagttagatgcctttatatatgacgcagctgtcctcaactatatggctggaagggacgaagggtgtaaacttgtaaccataggttcgggaaaggtcttcgcctctaccggctacgggattgcgatacagaaggattctggttggaaacgtcaggtcgatctggccatactgcagttgttcggagatggcgagatggaagaactggaggcattgtggctgacaggaatctgccataatgaaaagaatgaggtgatgagcagtcagctggatatcgataatatggctggggtgttctatatgctcggggccgctatggcccttagtctgatcactttcatctgtgaacacctcttctactggcaatttagacactgctttatgggagtgtgctctgggaaacccggcatggtgtttagcattagtcgcggcatctatagctgcattcacggcgtggccatagaggagcgccagtctgttatgaactccccaacggccaccatgaacaacactcattcgaatattctgcggcttctccgcacagcgaagaatatggcaaacctgagcggcgtaaacgggtctccacagtcagccctcgacttcatcagaagagagagcagtgtgtacgacattagtgaacataggcgctctttcacccactcagattgtaaaagttataataaccccccctgcgaagaaaacttgtttagcgactatatctcagaggtagagcggacctttggcaatctccagctgaaagattctaatgtttatcaggatcattaccatcatcaccacagaccccatagcatagggagtgcaagctctatcgacggcctgtatgactgcgacaaccctccgttcaccactcagtctcggagcatatccaagaagcctcttgacattgggctgcccagcagcaagcactcacagctctctgatttatatggcaaattctccttcaaatcagacagatacagtggccatgacgatttaatccggtccgacgtcagcgatataagcactcataccgtaacttatggcaacatcgaagggaatgctgccaaacgccggaagcagcaatataaggatagcctcaagaagaggcctgcctccgccaaatcacgacgtgaatttgatgaaattgagctcgcgtatcgtagaaggccccccaggagcccggaccacaagaggtatttccgcgataaggaggggctgcgggatttctacctcgatcaattcagaactaaagagaactctccacactgggagcacgtggatttgacagatatctataaggaacggagtgatgacttcaagagagattccgtcagcggcggcggaccgtgtaccaacagatcacacatcaaacacggaacgggggacaagcatggggttgtttcaggagtccctgcaccgtgggaaaaaaatctcaccaacgtagagtgggaagaccgctccgggggaaacttttgtcgctcctgcccatcaaagttgcataactatagtactactgtcacaggacaaaattctggaagacaggcctgtatccggtgtgaggcctgcaaaaaagcggggaatctgtacgacatctccgaggacaatagtctgcaggagctggatcagccggcagcacccgtggcggtgacatccaatgcctctaccacgaaatacccccagagcccgacaaactcaaaagcccagaagaagaatcggaacaaactccggagacagcattcatatgatacctttgtggacctgcagaaggaagaagctgcattagcacctcgatcagttagcttgaaagataagggcagattcatggacggaagcccgtatgcccacatgtttgagatgagtgcaggggaatcaacattcgctaataataagtctagcgttccaaccgccggacaccatcatcacaataatccaggcggggggtacatgctcagtaagagtctttacccagaccgagttactcagaatccctttattcctacattcggcgatgaccagtgtcttcttcacggcagcaaatcatactttttcaggcagcctaccgtagctggcgcctcgaaagctcgaccagacttccgcgcattggtcactaataagccggtggtctcagctctacatggcgctgttcccgctcgatttcaaaaagacatctgcatcggtaatcagtcaaacccttgcgtacctaataacaaaaaccctagggcttttaatggtagctccaacgggcacgtgtatgagaagctatctagcatagagtcagacgtttag

SEQ ID NO: 118574 - DNA, 3702 bp, synthetic construct
  misc_feature 1..3702: note = Description of Artificial Sequence: Synthetic coding sequence
  source 1..3702: mol_type = other DNA
atgggaggggccctcggccccgcattgctgctcacctccctgttcggcgcttgggctggcctgggacccggtcagggcgagcagggcatgacagtcgccgtggtctttagttcaagcggaccgcctcaggcgcaattccgcgctcggctgacccctcagagctttttggatctgccactagagatccaaccgctgacagtcggtgttaacaccaccaaccctagttctctgctgacccagatatgcggcttactcggcgctgcccacgtccacggaattgtcttcgaggataatgttgacacagaagctgtggcccagattttggacttcatttcatcccagactcatgttccaattctctcaatctctggtggctcagcagtagtgttgaccccaaaggagcccggcagcgccttcttacagctgggagtctctctggagcagcagttgcaagttctattcaaggtcctggaggagtacgattggtcggccttcgccgtgattacgtccctgcaccccggccatgcactttttctggagggggtccgggctgtggctgacgcttctcatgtcagctggcggctgctcgacgttgtaactttggagttaggccctggcgggccacgtgccagaacacagcggcttctgagacaactcgacgctcccgtgttcgtggcttattgcagcagggaggaagcagaggtcctgttcgctgaagcagcccaagctggactggtgggcccagggcatgtttggctggtgcccaacttggcgctcgggtcgacggacgccccccccgccacctttcccgtgggactgatcagcgttgttactgaatcatggaggttgtctctgagacagaaagttcgggatggggtagccattctagccttgggggcccatagctactggcggcagcacggtacccttccagccccggccggcgattgcagagtccaccccggccccgtgtccccggcccgagaagcattttacaggcaccttttgaacgttacctgggaaggtagagacttttcctttagccccggcggatatctcgtgcagcccactatggtggtaatcgctttgaatcgccaccggttatgggagatggtgggtaggtgggaacacggcgtgctgtacatgaagtaccctgtctggccaagatatagcgcttctttacagcccgtggtggatagccgccatctcactgtagccacccttgaagagcgcccattcgtgatcgtagagtccccggacccaggcacgggagggtgtgtgcctaataccgtaccgtgcaggcgccaaagcaaccacacattctcatccggcgacgtcgccccttacactaagctgtgctgcaagggtttttgtatcgatattcttaaaaagcttgctagggtcgtcaaattcagttacgatctatacttagttactaacggtaaacacggcaaacgtgtgcgaggagtttggaatggcatgatcggcgaggtgtattacaagcgggcagatatggctataggctccctgactattaacgaggagcggtctgagatcgtagacttcagcgtgccattcgtggagactgggatatccgtgatggtcgctaggagcaacggaaccgtgtcacctagcgctttccttgaaccctactccccagcagtgtgggtaatgatgttcgtgatgtgccttaccgtggttgctatcaccgtgttcatgttcgaatactttagtccggttagctataatcagaacctcacgagaggcaagaaatccggcgggcccgctttcacaattggtaaaagtgtgtggctcttgtgggcgctggtattcaataactccgtcccaatcgaaaatccaagaggtaccacctccaaaatcatggtactcgtatgggcgtttttcgccgttatcttcttggccagttacacagccaatctcgctgcctttatgattcaggagcagtacattgacacagtgtccgggttatccgataaaaaattccagcggcctcaggaccagtatcctccgtttcggtttggaactgtgcccaatggcagcaccgaacggaacatacggtccaattatcgggatatgcatacccacatggtgaagttcaaccagcgtagcgtggaggatgctctcacctccctcaaaatgggtaagttggacgccttcatatacgatgccgcagtactcaattacatggccggaaaggacgaaggctgtaagttggtaactatcggctcgggcaaagtgttcgcaaccaccgggtatggtatcgcgatgcaaaaggacagccattggaaacgagccattgacctggcactgctgcagttcttgggagacggggagactcagaagctggagacagtctggttaagtgggatctgccagaacgaaaagaacgaggttatgtctagtaaactggatatcgacaatatggccggcgtgttttatatgctgttggtagctatgggcctggctctgttggtgtttgcttgggagcacctcgtttattggaagttaagacactctgttccgaattcaagccagctggacttcctgttggccttctctcgggggatttactcatgtttctcaggtgtgcagtcactggccagcccaccccgtcaggcctcgccagatctcacggcttcatctgcacaggcctctgtactaaaaatgctgcaggccgctagggacatggtgactactgctggcgtgtccagttccctcgaccgagccaccagaactatagagaactggggaggagggcggcgtgcaccacctcccagcccatgtcccactccgcgctcaggaccgtctccttgcttgccaacacctgacccaccaccggaaccaagtcccacaggatgggggcctccggacgggggtcgggccgctctagtccggagagcgccacaaccacccgggcgcccccctaccccaggcccccctctgtcagatgtcagcagggtgtctagaagacccgcctgggaagccagatggcctgtgagaactggacattgcggaagacatctgagcgcctccgagaggcccttaagccctgcccggtgccactattcttccttccctcgggctgatcgtagcggccgcccattccttcccctttttccagaactggaggatctccccctcctgggccctgagcagctcgcacggcgggaggctctgttacatgctgcgtgggcccgtgggtctagacccaggcacgcaagcctcccatcctccgttgccgaggcctttgctaggccgtcatcactcccagcgggatgcactggcccagcgtgcgcacggcccgatggccacagcgcatgtcgccggctcgcccaggcacagagtatgtgtctccccatctaccgcgaagcttgccaggaaggcgagcaggccggtgccccagcatggcagcaccggcagcacgtgtgcctgcacgctcatgcccacctgccattctgttggggcgcggtatgtccacatctacctccttgcgctagtcatggctcatggctctctggggcctggggacccctgggacatcgcggtagaacgcttggactggggactggatatagggatagtggggggcttgatgagatcagcagagtggcccgcggaacccaggggtttcctggaccctgcacctggcgccgcatttcttcactggaatcagaggtgtag

SEQ ID NO: 118575 - DNA, 2724 bp, synthetic construct
  misc_feature 1..2724: note = Description of Artificial Sequence: Synthetic coding sequence
  source 1..2724: mol_type = other DNA
aggggtcaaggaggcgacacacgatccaaaggaacccggcagcctgaaccccctggagctagcagagatcctgctagaagttgttgggaccctcctgtggacatgggcggagctctcgggccagcactcttgctgacctctttatttggcgcatgggccggccttggcccaggacagggcgagcaaggcatgacagtagccgtggtcttctccagctccggccctccccaagcgcagtttcgagcgcgtctgaccccgcagagtttcctggaccttccattggaaatacagccactgactgttggcgttaataccacaaatccctcaagtctgctgacgcagatttgcggcctcttaggggctgcccacgtacatgggatcgtatttgaagacaatgttgacacagaggcagtcgctcaaattctcgatttcatctctagccagactcacgtgcctattctgtccattagcggcggaagcgctgttgtccttacgcccaaggaacctgggagcgccttccttcagttaggagtgtcactggaacagcaactgcaggtcctgttcaaagtgcttgaggagtatgactggtcggctttcgcagtcataacgtccctgcaccccggccatgcgctgttcctggagggggtacgagcagtagctgacgccagtcacgtgagctggaggcttctggacgtagtcactctcgaattgggaccgggcggccctcgcgcccggacacagcgacttctgcggcagctggacgcacctgtctttgttgcatattgctcgagggaagaggccgaggttctgttcgctgaggctgcccaggcggggctggtggggccgggccatgtctggctcgtaccgaatctcgcccttggctcaacagacgctccacccgccacctttccagtcggcctaatctcggtcgtgaccgagagctggcggctgagcctgcgccagaaagtccgcgatggcgtggccatcctggctctaggggctcattcttactggaggcagcatggaacgcttcctgctcctgccggggactgccgggtacaccccgggccggtctcccccgcccgagaggcgttctaccgacacctgcttaatgttacatgggaaggtcgcgacttctcgttcagtcccggggggtatcttgtgcaacctacgatggtcgtgatcgccttgaaccggcaccggctatgggagatggtcgggcgttgggagcacggtgtgttgtacatgaaataccccgtgtggccacgatactccgcaagcctacagcctgtggtggattccagacacctcacagtcgcaactctagaggaacggccatttgtcatcgtggaatcaccagacccgggtacaggtggctgtgtgcccaatacggtgccttgtcggagacagtctaaccacaccttcagcagcggtgacgtcgcaccctacactaaactttgctgtaagggattctgtatagatattctcaagaagctggcccgtgtggtgaagtttagttacgatctgtatctcgttaccaacggtaaacatggtaaaagggtgcgtggtgtatggaatggtatgattggggaagtctattataagcgtgccgacatggccatagggagccttaccattaatgaggagaggagcgaaattgtggacttctctgtgcctttcgtagagactgggatcagcgttatggtggcccgttctaatgggacagtgagccccagcgcctttctcgaaccgtattcacccgctgtgtgggtgatgatgttcgtgatgtgtcttactgtcgtagccatcaccgtatttatgttcgaatacttctcacccgtctcttataaccagaatctaacacgtggtaagaaatccggaggccccgcctttaccatcgggaaaagcgtgtggctcctctgggccctggtgttcaataattccgtgcctatcgagaacccaagggggacaacatctaagatcatggtgctggtgtgggcttttttcgctgtgatattcctggcctcctacacagcaaatctcgccgccttcatgatccaggagcagtatattgacactgtgtctggtctgagcgataagaagtttcaacgcccacaggaccagtacccaccgttccgctttgggacagtccctaatgggagtaccgagaggaatattagatctaattaccgcgacatgcacacacacatggtgaaattcaaccagcggtctgtggaagatgcgttgacgtctctcaagatggggaagttggacgccttcatatacgacgcagccgtgctcaattacatggcgggcaaggatgaaggctgcaaactagtaacgattggtagcggaaaagtcttcgcaaccacaggctatggaatagccatgcagaaagattcacattggaagagggcaattgacctggcgctgcttcagtttttaggcgacggggagactcagaaactggaaacagtatggctcagcggcatctgccagaatgaaaagaacgaggttatgagttccaaactcgatattgataacatggccggagtgttttacatgttgctggtggcaatgggtctcgctttgctggtgttcgcctgggaacacctagtctattggaaactgagacacagcgtcccaaactcgtcacaactggattttttactggcttttagtcgtgttggcgctcatccaagcccacacaggccaaagttctag

SEQ ID NO: 118576 - DNA, 4011 bp, synthetic construct
  misc_feature 1..4011: note = Description of Artificial Sequence: Synthetic coding sequence
  source 1..4011: mol_type = other DNA
atgagaggcgcaggcggacctaggggcccccggggcccagctaagatgctcctgcttctggctctggcttgtgcatcacctttccccgaagaagcaccaggtccagggggggcaggtgggccaggggggggcctggggggagctaggccgcttaatgtcgctctggtattttccggccctgcttacgccgcagaggctgccaggctgggacccgctgtcgctgctgccgttcggagtcccgggttggacgttagacccgtggccctggtcctgaatggcagtgatcctcgctctttagtgctgcagctgtgtgacttgctgtccggattaagagtgcacggtgtggtattcgaggacgattcgcgggccccggcagttgctcctatccttgatttccttagcgcccagacaagtctaccaattgtggccgtacatggaggagcagctttagttttgactcccaaggaaaaagggtcgacttttctccaattgggatcatcgactgagcaacagctccaggttatttttgaagtcctggaggagtatgattggactagctttgtggcagtcacaactagggccccaggccaccgagcctttttgtcgtacattgaggttctgactgatgggtcactcgttggatgggagcacagaggagccctaaccctggacccaggagcaggcgaagctgtgctctcagctcagctcaggagcgtgtcagctcagataagactccttttttgcgctcgagaagaggccgagccagtgttcagagccgctgaggaagccgggctcaccggcagcggctatgtatggttcatggttggtccacagctcgccggcggagggggtagcggagccccgggcgagccccctttgctgccaggaggtgcccctctgccagctgggctgttcgccgtccggagtgctggctggagagacgatctggccaggagggtggctgccggtgtggctgttgtcgcccgcggtgcccaggccttgctgagagactacggcttcctgcctgagttaggacacgactgtagggcccagaatcgtactcaccgcggggagtctctccaccgctatttcatgaacattacctgggataacagagactatagcttcaacgaggacggattcctggtcaacccctctcttgtagtgatttcactgacgcgcgaccggacatgggaagttgtgggatcttgggaacagcagactttgcgtctgaagtatcctctgtggtctcgttatggacggttcctgcaacccgtggatgatacacagcatctcaccgtcgcaacactcgaagaacgaccatttgtgatcgtggaacccgcggaccccataagtggcacctgcatcagagacagcgtaccctgccgatctcagctcaacagaactcactctccacccccagacgcacctcgtccggagaagaggtgttgtaagggattctgcattgatatcctgaaacggctcgcccataccatcgggttctcttacgatttgtacctggtgaccaatgggaagcacgggaagaaaatagatggcgtttggaatgggatgatcggggaggttttctaccagcgggcagatatggccatcggttccttgactatcaatgaagagagatcagagattgtcgacttttccgtgcccttcgtcgagacagggattagcgtgatggtggctagatctaatggaaccgtgtcccctagtgcgtttcttgaaccttattctccagcggtgtgggtgatgatgtttgttatgtgtttgacggttgtcgcggtgaccgtttttatcttcgaatatctctctccagtaggatacaaccgttcccttgcaactggtaaacggcctggcgggtcaacattcacgattggcaagtccatttggctgctatgggcgctcgtcttcaacaacagtgtcccagtggaaaatcctcggggaacaacaagcaagattatggtactagtatgggctttctttgctgtaatttttcttgcctcctataccgcaaatctggccgcctttatgattcaggaagaatacgtcgataccgtttctgggctttccgatagaaagttccaaaggccccaagagcagtacccccctcttaaatttggaacggtgcctaacggctcaacagagaagaacatacgatctaattaccccgatatgcattcctacatggtgcgatacaatcaacccagggttgaagaagctctcacccagctgaaagccggaaagcttgacgccttcatctacgacgctgccgttctgaattacatggcacgaaaggacgagggatgcaaactggtaaccatcggatcaggaaaagttttcgcgactactgggtacggaatagcactccataaaggatctcggtggaaacggcccatagatctggctctgctccagtttttaggggacgacgaaattgagatgctcgagcggctgtggttgtctgggatctgtcacaatgacaagattgaagtcatgagttctaagctggacatcgacaatatggctggagttttctatatgctgctggtggccatgggcttatccctgctcgtgtttgcatgggaacacctggtttattggcgacttcggcactgcttaggaccaacccaccgaatggacttcttgttggccttcagccggggaatgtattcttgttgctcggcagaagcagccccccctccggccaaaccccccccacccccacagcctctgccctctcctgcctaccccgcacctagacctgcaccaggccccgctcccttcgtccctcgcgagcgcgcttctgtggatcgttggcgccggaccaaaggtgccgggcccccgggtggggccggcctggccgatggattccatcgttactacgggcccatcgaaccccaggggttaggcctcggtctgggagaagccagagccgccccccgaggagcggcgggtaggcccctctccccacctgcagcccagcccccgcagaaacctcctcctagttacttcgccattgtgcgagataaggaaccggcggagccaccagcaggtgctttccccgggtttccctccccacctgccccccccgccgcagccgctaccgccgtgggtccacctctgtgcagactggctttcgaggatgaaagccctcctgctcctgcgcgatggcctcgttcggaccccgagagccagccactgctcgggcctggcgcagggggcgctgggggcacaggtggcgccggaggcggggcacctgcagccccacctccatgcagggcagctccaccgccctgcccttatctagatctcgagccctccccgtccgatagtgaggactccgagtcactcggcggcgcctcactggggggcctggagccctggtggtttgcggactttccttacccctatgccgagcgactgggtcccccacctgggcgctattggtcagtggataagcttgggggttggcgggccggctcctgggactacctgcctcccaggagtggacctgctgcgtggcactgtaggcattgtgcctccctggagcttctgccacctccccgacacctgtcctgttcccatgatggactggatgggggctggtgggcccccccccctcctccatgggcagcaggacctctacctcggcgaagggcgaggtgtggatgtccaaggtcgcatccgcacagaccccgggcgagtcacagaacgccagccgctgcagcaccccatcatcatcgccaccgccgggcggctggcgggtgggacctgcctccgccggcaccaacctcccggagcctcgaggacctctccagctgcccgcgcgcggcccccgctcggcggttaaccggaccctccagacacgccaggcgatgtccacacgccgcgcactggggaccgcctctgcctacggcgagccacagaagacacagaggaggcgacctcggaacccgacggggatccgctcacttctcttctctggagtcagaggtgtag

SEQ ID NO: 118577 - DNA, 1116 bp, synthetic construct
  misc_feature 1..1116: note = Description of Artificial Sequence: Synthetic coding sequence
  source 1..1116: mol_type = other DNA
atgtcccatgaaaaatcctttctggtctcgggggacaattacccaccacctaaccctgggtaccctgggggcccccaacccccaatgcctccctatgctcagcctccgtaccccggagctccctacccccagcctccgttccaaccatcaccatacggccagcctggctatccgcatggaccctccccttacccacagggcggctacccacagggcccgtatccccagggtggttacccccagggcccctacccgcaggaaggctacccccagggcccatatccccagggggggtatccccaaggaccatatccgcagtccccctttcctcctaacccctacgggcagccccaggtgtttcccggacaggacccagattcaccacagcatgggaattaccaggaagaagggcccccttcttactatgacaatcaggattttccagccactaattgggacgataagtcaattaggcaggccttcataaggaaggtctttttggtgctgacactccagctgagcgttacactatctaccgtatccgtttttactttcgtagctgaggttaaaggcttcgtaagagaaaatgtttggacttattatgtgagttatgccgtattcttcatcagtttaatcgttctgtcttgctgcggagacttcagacgtaagcacccttggaatctcgtcgcgttgtcggtccttacggcttctctctcatatatggttgggatgattgcttccttttacaacaccgaggctgtgattatggcagtgggaatcacaacagctgtatgctttactgtcgtgatcttctctatgcagaccaggtatgactttacaagctgtatgggtgttttactggtgtccatggttgtgctctttatctttgccatcctatgtatctttatcaggaacaggatcctggaaattgtgtatgcgagtcttggtgcactgttattcacgtgttttctagccgtcgacactcaacttctgctcggtaataagcaactctccctctcgcctgaagaatacgtttttgcggctctcaacctgtataccgacataataaacatttttctctacatactgacgatcataggcagagctaaagaatag

SEQ ID NO: 118578 - DNA, 1116 bp, synthetic construct
  misc_feature 1..1116: note = Description of Artificial Sequence: Synthetic coding sequence
  source 1..1116: mol_type = other DNA
atgagccacgagaaatctttccttgtgagtggggataactacccacctccgaatcccggctatcctggcgggccacaaccacccatgccaccatacgcgcagccaccctacccaggcgccccgtacccacagccgccctttcagcctagtccatacggccagccaggctatccccacggtcctagtccctatccacaagggggctatccccagggcccatatccccagggtgggtatccacaagggccctacccccaggaaggatacccacaaggaccctatccccagggcgggtatcctcaaggcccatatcctcaatcccctttccctccaaacccgtacggacagccccaggtatttcctggccaggatcccgacagccctcaacatggtaactaccaagaggaaggacctccttcatattacgacaatcaggattttccagctactaattgggatgacaaaagtattcggcaagcctttatcaggaaggtatttctggtcctgacactacagctctccgtaactctgagcacggtgagcgtgtttaccttcgtggcagaagtgaaaggattcgtgagggagaatgtctggacttattatgtttcttatgcggttttctttatcagcctgattgtgctgtcctgctgtggcgatttcagacgcaagcacccttggaatctcgtggccttgagtgttttgaccgcttccttatcatatatggtcggtatgatcgccagtttctacaacacagaggccgtgataatggcggttggcataacaacggccgtgtgctttaccgtggtgattttcagtatgcagaccagatacgacttcactagctgcatgggggtcctgctcgtctcaatggtcgtgctgttcatattcgccatcttgtgtatctttattcgcaaccggatcctggagatcgtctacgcttccctgggcgccctgctgttcacttgtttcttggctgtggatacacaactcttactgggcaataaacagttgagtttaagtcctgaagagtacgtcttcgcggccctaaatttatacaccgatataataaatatttttttatacatcctgacaatcatcggacgggcaaaggagtag

SEQ ID NO: 118579 - DNA, 825 bp, synthetic construct
  misc_feature 1..825: note = Description of Artificial Sequence: Synthetic coding sequence
  source 1..825: mol_type = other DNA
atgtcccacgaaaagtcttttctcgttagcggcgataactaccccccacctaatcctggctacccaggaggtccgcaaccccccatgcctccttacgcccagccgccctatccaggagccccataccctcagccgcctttccagccaagcccatatggccagcccgggtaccctcacggaccgagtccctatccccaaggtggatatccccaggggccttacccacagggtgggtacccccagggaccttatccacaagagggttatccccaaggcccataccctcagggaggttatccgcagggaccgtacccgcagtccccattcccacctaatccttatgggcagccacaagtgtttcccggtcaggatccagactctcctcaacatgggaattaccaagaggagggtccaccaagctactatgataaccaggactttcccgctaccaactgggatgataaaagcattaggcaagcttttattcggaaagtgttcctggtgctcacactgcagctgtcagtgactctaagtacggtgagcgtgttcacatttgttgccgaggtgaagggtttcgtccgtgaaaacgtttggacttactacgtgagttatgccgttttttttatctcactaatcgtgcttagctgctgcggtgatttcagaagaaagcacccctggaacttagtggcacttagcgtgctgactgcctctctctcttacatggttggaatgatcgccagcttctataataccgaggcagtgatcatggccgtcggcatcaccacagccgtgtgcttcacggttgtcatattctccatgcagtag

SEQ ID NO: 118580 - DNA, 306 bp, synthetic construct
  misc_feature 1..306: note = Description of Artificial Sequence: Synthetic coding sequence
  source 1..306: mol_type = other DNA
atgtcccacgagaaatcttttctggtatctggagacaactatcctcctcccaaccctggctaccccggcggaccgcagccgccaatgccaccttacgcccagcctccctatcccggggcgccttacccacagcctccctttcagccttccccgtatgggcagccggggtacccccacgggcctagcccgtatccccagggaggttatccccagggtccatatcctcagggcggatacccacagggaccttacccacaagaagggtacccccaaggtccatacccccagggcggttatccacagtag

SEQ ID NO: 118581 - DNA, 1059 bp, synthetic construct
  misc_feature 1..1059: note = Description of Artificial Sequence: Synthetic coding sequence
  source 1..1059: mol_type = other DNA
atgagtcatgagaaaagctttctggtaagtggagataactatcctcctccctatccaggagcgccttacccacagccaccatttcagccttccccatatgggcagccgggatacccccacggcccatccccctatccccaggggggctatcctcaggggccctaccctcagggcggatatcctcagggcccatacccacaagaagggtatccacagggcccttatccccaagggggctacccacaggggccctatccacagagtcctttcccaccaaatccttacggacagccgcaggtattccccgggcaggatcccgactcaccacaacatgggaactaccaagaggaaggcccgccatcctactacgataatcaggactttccagccaccaattgggacgataaatctatacggcaggccttcatccgcaaagttttcttggtgctgacccttcagctcagtgtgaccctgtccactgtctctgtcttcacatttgtggcagaggtgaagggtttcgttagagaaaacgtgtggacatattacgtttcatatgccgtgttcttcatcagtctgatcgtactcagttgctgcggcgattttagaaggaaacatccctggaacctagtggccttaagcgtcctcactgcctcgctttcgtatatggtagggatgatcgcctcgttttataatacagaagctgttatcatggctgtgggaatcaccactgcagtgtgttttaccgtggttatattcagtatgcagaccagatacgattttactagctgcatgggggttctgctggtgtcaatggtggtgttatttatattcgccatcctctgcattttcattcgcaaccgcatcttggagatcgtctatgcctctctgggggccctccttttcacctgcttcctggcagttgacactcagttgctgctgggcaacaagcagctttccctgtccccagaagagtatgtgttcgctgcccttaacctgtataccgatataatcaacatattcttgtacatcctcaccatcattggacgggcaaaggaatag

SEQ ID NO: 118582 - DNA, 3348 bp, synthetic construct
  misc_feature 1..3348: note = Description of Artificial Sequence: Synthetic coding sequence
  source 1..3348: mol_type = other DNA
atgaggcgcctctcactctggtggctgctcagcagggtctgccttctcctgcctccgccatgtgccttagtactggctggtgtaccatcttcctccagccacccccagccctgccagattctgaagcggatcggtcacgcagtgagagttggcgccgttcacctccagccttggacaacagcgccccgagcagcgtcacgcgcccccgatgactctcgggctggggcacagagggatgaacctgagccaggcacacggcgaagcccagcgccctcgccaggggcaaggtggctgggatccactttacatggacgcggacctcctggcagccgtaaaccaggtgaaggcgcccgggcggaagctctctggccacgcgatgcactgctgtttgcagtcgataacctgaaccgagtcgaaggtctcctcccatataaccttagcctggaagtagtgatggctatcgaagccggccttggcgatctccccctgctgcctttttccagtccttcctcaccatggagcagcgacccattcagctttctgcaatcagtctgccatacagtagtagtgcagggggtttccgccctcctcgctttcccccagagccagggcgagatgatggaactggacctggtgtcacttgtgcttcatattcccgtaatctcaatcgtgaggcatgaattcccgagggagagccagaacccgcttcatctccagctaagcctcgaaaacagcctgtcctccgatgcagatgtcacggtaagtatcctcacaatgaataactggtataacttcagccttctgctgtgccaagaagattggaatattaccgacttcttgcttcttacacagaacaattctaaatttcacctgggaagcatcatcaacatcacggcaaacctgccttctacacaggacctcttgagcttcctgcagattcagttagaatcaattaagaatagcaccccaaccgtggtgatgttcggctgcgatatggaatcaatcaggagaatcttcgagatcacaactcaattcggggtgatgcctcccgaactaagatgggttctgggcgactcacagaacgtggaggagctgagaacagagggactgcccctagggctgatcgcccacggcaagacgactcagtccgttttcgagcactatgtccaggacgccatggaactggtcgctcgggccgtggccacagctacaatgatacagcctgagctcgccttgatacccagcacgatgaactgtatggaggtggagacaaccaatctcacatctggacagtatctgagccgcttccttgcaaatactacctttaggggtctcagcggcagcatcagagtcaagggaagtacaattgtgagctcagagaacaacttttttatctggaacctccagcatgatccaatgggcaagccaatgtggacacggctcggcagctggcagggtgggaagattgttatggattatggcatatggccagaacaggcacagcgccataagacacattttcaacatcccagtaagttgcacctgagggtggtgactctaatcgaacatccatttgtctttaccagggaggtggacgatgagggattgtgccctgccggtcagctgtgtctagaccccatgaccaatgattcatctacgctggattccctcttttcctcactgcacagctccaatgacaccgtccctatcaagtttaagaagtgttgttacggatactgcatcgacctcctcgagaagattgctgaggatatgaattttgattttgatctttacattgtgggtgatggcaaatatggagcgtggaagaacggacactggacgggtttagtgggcgacctccttcgtgggacagcccacatggcagtgactagcttttccattaacaccgcaaggtcacaggtgatagattttacaagtcctttcttcagtacttctctgggaattcttgtcagaactagagatacagctgcgccaatcggagccttcatgtggccgcttcactggacaatgtggctgggcatcttcgtggcgctccatattacagcagtatttctcaccttgtatgaatggaagagtccctttggccttactccaaagggacgaaaccgatctaaggtattttcattctcctccgcactcaatatctgttacgcgctgttattcggtcgtactgtagcaattaaaccacctaagtgttggaccggtaggttccttatgaatctttgggcgattttctgtatgttttgcctgagtacatacactgccaacctggccgccgtaatggtgggggagaaaatctatgaagaactgagtggaattcatgatccaaagctgcatcatccatcccagggtttcaggttcggaacagttcgggaaagcagtgccgaagactatgtccgtcagtcctttcccgagatgcatgagtacatgaggagatataacgtgcctgcaactcctgatggggttgaataccttaaaaatgaccctgagaaactggatgcgttcattatggataaggcattgctcgattatgaggtatcaatcgacgcagattgcaaactactcacagtggggaagccattcgcaattgagggttatgggattggccttccacccaattctcccctgacagcgaacatcagcgaactgatctctcagtacaagagccatggctttatggacatgctgcacgacaaatggtaccgtgttgtcccatgcggaaagaggtcattcgccgtcaccgagacactgcagatgggaattaagcatttttccggtcttttcgtgctcctatgtattgggtttgggctctcaattctcacaaccatcggagagcatatcgtctacagactgctcttacctcgcattaaaaacaagagcaagcttcaatattggctgcatactagccagcggttacatagagccataaatacttctttcattgaggaaaagcagcagcacttcaagaccaagcgggttgaaaagcggtcaaacgtgggacctcggcaactcacagtgtggaacaccagcaatttaagccacgataaccggcggaaatacatattctctgatgaggaggggcagaaccagttgggtatacggattcaccaggatattccccttccccctaggagacgggagctgcctgcccttagaactaccaatggaaaagccgacagcctgaacgtttcaagaaactctgttatgcaggaactaagcgaactcgagaagcaaatccaggtaatccggcaggagctccagctggctgtttcccgcaaaacagaattggaggagtaccaacgcaccagcagaacctgtgagtcttag

SEQ ID NO: 118583 - DNA, 3585 bp, synthetic construct
  misc_feature 1..3585: note = Description of Artificial Sequence: Synthetic coding sequence
  source 1..3585: mol_type = other DNA
atggtgggactgctcctgttcttctttcctgccatcttcctcgaggtgagcctgttgcctagaagcccaggaagaaaggtcctgcttgctggggcttcgtcccagagatcagtggcaagaatggacggagacgtcatcataggggccctgttttctgtgcaccaccaacctcctgccgaaaaagtgcctgaacgcaagtgtggagagattagagaacagtacgggattcagcgggtggaagcaatgttccacacgctcgacaagataaacgcagatcccgtgctgttgccgaatataaccctggggtccgagatcagagactcatgttggcattcgtccgtcgccctcgagcaatcaatagagttcattcgagattccctgatttcgatccgggacgaaaaagacggcataaatcgctgtctgccagatggtcagtcactgccacccggccggaccaaaaaacctattgcaggggtcatcggccctggaagttcttcagtagccatccaggttcaaaacctgttgcagctgtttgatattcctcagatagcgtacagtgccacttccatcgatttatccgataagactctgtacaagtattttctgagagtcgtccctagcgacaccctccaggcaagggcaatgttagatatcgtgaaacggtacaattggacctacgtgagtgctgtccatactgaaggtaactacggtgaaagcggcatggacgcctttaaggagctcgccgctcaagaaggcctgtgcattgctcactccgacaaaatttattccaacgcgggcgagaagagcttcgataggctgttaaggaaacttagagaacgtctccccaaagcacgtgtggttgtctgcttttgtgaaggtatgaccgtgagaggcctgctaagtgccatgcgtagactcggcgtggtgggggaattctcactaattggaagcgatgggtgggccgaccgtgacgaagtgatcgaggggtatgaggtcgaagcaaatggtggtatcactattaagctgcaatcccctgaagtgagaagctttgacgattactttctgaagttgagactcgacacaaatacgcgcaacccttggttcccagaattctggcagcaccggttccagtgtcgcctccctgggcaccttctcgagaaccctaattttaaaaggatttgcaccggtaacgagagtcttgaggaaaactatgtccaggactccaagatgggcttcgtgattaatgccatctacgctatggcgcatggcctccagaacatgcatcacgcgctgtgccctggccacgtgggcttgtgtgatgccatgaagcctatcgacgggtcgaagttgttggacttcctgatcaaatccagctttataggggtgagtggagaagaggtatggtttgatgaaaagggggacgcgccggggcggtacgatattatgaacctccagtacacagaagcaaataggtatgattatgtccacgtcggtacctggcacgaaggggtgctcaacatagacgactacaaaatccagatgaacaaaagtggagtggtaagaagcgtatgcagcgagccttgtctcaaaggccagataaaagtgattcggaaaggtgaagttagctgctgctggatctgtaccgcctgcaaggaaaatgagtatgtccaagatgagttcacatgcaaagcctgtgatctcggctggtggccaaatgctgacctcactggctgcgagcccattccggtaagatatcttgaatggtctaatatcgagtccattatcgcaattgcattctcttgccttggcatattggtgaccctcttcgtgaccctaatcttcgtactgtaccgggatacacccgtcgtgaagagcagctcacgtgagctttgttatatcatcctagccggtatcttccttggttacgtgtgcccattcactctcattgccaagcccaccaccactagttgttacctgcagcgtcttttggtggggttgtcatctgccatgtgttattctgccctggtgaccaaaaccaataggatagctcggattctggctggatcaaagaaaaaaatatgtactaggaaaccaaggtttatgtctgcttgggctcaggtgatcatagcttcgatcctgatcagtgtccagctgaccctcgtggtgacgctgatcattatggaaccacccatgccaattctaagctatccttctatcaaggaagtgtacttgatctgcaataccagcaatctgggcgtcgtggccccgctggggtataacggactgttgattatgagttgcacctactacgcatttaaaacacgcaatgtgccggcaaactttaacgaggctaagtatatcgccttcactatgtataccacctgcatcatttggctcgctttcgtgccgatctacttcgggagcaattataaaattatcactacctgctttgcggtaagcctgtccgtgactgtggcactaggctgtatgtttacacccaaaatgtatatcattatcgcgaaaccagagagaaacgttcgcagcgcctttacaactagcgacgtagtccgaatgcacgtgggagatggtaaactaccctgtagatctaataccttcctgaacattttcaggcggaaaaaggcaggggcagggaatgctaattctaatggcaagtccgttagttggagtgaacccgggggcgggcaagtccccaaaggacagcacatgtggcatcgtctcagcgtccacgttaagaccaatgaaacagcatgcaaccagacagcagtcataaaacccctgactaaaagttatcaaggcagcggtaaatccctcacattttccgacacatccacaaagacactctataacgttgaggaagaagaggacgcacagcctatccgcttttcaccgcccggctcacccagcatggtcgtgcatcgccgcgtgcccagcgccgccaccaccccacctctgccgtctcaccttacagcagaggagacacccctgtttctcgcagagcctgccctgcctaagggattgccacctcctctgcagcaacagcagcagcccccgccccagcagaagagtttgatggatcagctccaaggcgtcgtgagcaatttctccaccgccattccagacttccacgctgtgctggctggtcccggaggcccgggtaatggcttgcggagcttgtatccgcccccccccccacctcagcacctgcagatgcttcccctgcaactgtccaccttcggcgaggagttggtttctccgcctgcagatgacgacgatgattcagagaggtttaaactgctgcaggagtacgtgtacgagcatgagagagagggaaacacggaggaagatgagctagaggaggaggaggaagatctgcaggccgctagtaaactgacccccgacgatagcccagctttaacacctccctcaccattcagagactccgtggcctccgggtcgtccgtgccaagctccccagtcagcgagtccgtgttgtgcaccccacctaatgtgtcttatgcaagcgtcatacttagggactacaaacagtccagcagtactctctag

SEQ ID NO: 118584 - DNA, 3585 bp, synthetic construct
  misc_feature 1..3585: note = Description of Artificial Sequence: Synthetic coding sequence
  source 1..3585: mol_type = other DNA
atggtaggacttctcctgtttttctttcctgccatatttctggaggttagtctcctgccgaggtcacccggccggaaggtgcttctggctggagcttcgtcacaaagatccgtcgcgcgaatggacggagatgttattattggagctctatttagcgtccatcatcagccccctgcggagaaggtccccgagcgaaaatgtggcgagattcgagagcagtatggaatacagagggtggaggccatgtttcataccctggacaaaatcaacgccgatcccgtattgttacctaacatcacactgggaagtgagattcgggacagttgttggcattcctcagtggcccttgaacaaagcatcgagtttatccgagactctctcatcagtatcagggacgagaaagatggtatcaatagatgtttaccagacggccagtctcttccacctggaaggactaagaaaccaatcgcgggcgtcataggccccgggtcttcatcggtggccattcaggttcagaacctccttcaattgttcgatattcctcagatcgcatatagcgccacaagcatcgacctgagtgataagacactttataaatatttcttgcgggtggtgccgtcggacactctgcaggcgcgcgcaatgctagacattgtgaagcggtacaattggacctacgtgagcgctgttcataccgaaggaaactatggagaatctggcatggatgcattcaaggaactcgctgcacaagagggcctgtgtatagcccattcggataagatctacagcaatgcaggcgaaaagtctttcgaccggctgctgcgaaaactgagggaaagactgcctaaagcccgggtcgtagtgtgcttttgtgagggaatgactgtgcggggccttctctcagctatgcggcgtctcggggtagtcggcgaattttctctgatcggtagcgacggctgggccgaccgggacgaggtcatagaaggctacgaagttgaggccaatgggggaataactattaaacttcagagtcccgaagttagaagcttcgacgactacttcctcaaattacgattggacactaacacaagaaacccctggtttcctgagttctggcagcaccgctttcagtgccgcttgccaggccacctgctagagaatcctaatttcaagcggatctgtaccggtaatgagagcttggaggagaactatgtccaagacagcaagatgggcttcgtgattaacgctatctacgccatggcacacggattgcagaacatgcaccacgctctgtgtcctggacacgtcgggctctgcgacgctatgaaacccattgatgggtcaaaactgcttgactttctcataaagtcaagcttcattggcgtctccggcgaggaggtttggttcgacgaaaagggcgatgcgcctggcaggtacgatataatgaacttacaatacacagaggctaataggtatgattacgtccacgttgggacatggcatgaaggagtgctgaatattgacgattacaagatccaaatgaataagtccggagtagtacggtccgtatgctccgagccctgtctgaaggggcagattaaggtcattagaaagggagaggtaagctgttgttggatctgtaccgcctgcaaggagaacgaatatgtacaggacgaatttacctgcaaagcttgcgacttaggttggtggcctaacgccgaccttacaggttgtgagcctattcctgtccgttacctggaatggagcaatatagaaagtattatcgcgatagctttctcctgcctgggcatcctcgtgacattatttgttactcttatatttgtgctctacagagacaccccagtggtaaaatccagctccagagaactatgctatatcattctcgcaggtatctttttaggctatgtgtgtccgtttacgctgatcgccaagcctacgactacttcttgctaccttcaaaggctgctggtgggcctgtccagcgccatgtgttacagtgctcttgttactaaaaccaaccgcattgctaggatcctcgctggctcgaaaaaaaaaatttgcacacggaagccaaggtttatgtctgcatgggcgcaggtaattatcgcgagtattttaatatctgtccagctcactttggtggtcaccttgattatcatggagccacctatgccaatcctcagctacccctccatcaaggaggtctatctgatttgtaatacttctaatctcggagttgtggcacctctcggctataacggcctgctgataatgtcatgcacatactatgcgttcaaaaccaggaacgtgcctgcaaatttcaatgaggcaaaatacatagctttcacaatgtatactacatgtattatctggcttgccttcgtccccatttactttggatccaactacaaaattatcacaacatgtttcgccgtgagcttgagtgtgaccgtggcactgggctgcatgttcacgcccaagatgtacataatcatagccaagcccgagcggaacgtacgcagtgcattcaccacgtcggatgtcgtcaggatgcatgtcggtgacggaaagttgccttgtagatctaatacattcctcaatatctttcggagaaaaaaagctggcgcgggaaatgcaaactctaacggtaaaagtgttagttggagcgagcctggtggcggtcaagtcccaaaaggacaacacatgtggcacaggctctcggtccatgtcaagactaatgaaacagcttgtaatcaaaccgccgttatcaaacctctaacaaagtcttatcaggggtctggaaagtctttgacattttccgatactagcactaaaacactgtacaatgtcgaggaggaagaagacgcccagcccatccgtttttcaccacctggctccccttccatggtggtgcatcggcgggtgccttctgccgccacaaccccaccactgcctagccatctgacagccgaggagaccccattattccttgccgagcccgctctacccaagggcttgccacccccacttcaacagcaacagcagcctcctcctcagcagaagtcactgatggaccagctccagggggtcgtttctaacttctccaccgccatccccgacttccatgcagtacttgctggaccaggcggaccgggcaacggactgaggtctctttacccccctcccccgccaccgcagcatcttcaaatgttgcccctccagctatcaacttttggagaagagttggtctctccaccggccgatgatgacgatgacagcgaacggttcaaactgctccaggaatatgtttatgagcatgaacgggaaggtaacaccgaggaggacgagctggaagaggaagaggaggacttgcaagcggcaagcaaactcacaccagacgattcccctgcacttactccgcctagccccttcagggacagtgtggcatccggaagctctgtgccttctagcccagtgtctgagtccgtcctgtgcactcctcccaacgtcagctacgcctcggtgatcctgcgcgattacaagcagtcctcgtcaactctgtag

SEQ ID NO: 118585 - DNA, 2721 bp, synthetic construct
  misc_feature 1..2721: note = Description of Artificial Sequence: Synthetic coding sequence
  source 1..2721: mol_type = other DNA
atggtgggcctcctcctcttcttcttcccggcaatctttctggaggtttccttactgcctcggagccctggcagaaaggtgcttctggcgggggccagctcgcaacgaagcgtggcacgaatggacggagatgtcattatcggcgccctgtttagtgtacaccatcagccgcctgccgaaaaagtccccgagcgcaaatgcggtgagattcgggagcagtatgggattcaaagagtagaggctatgtttcataccttagataagataaacgctgatcccgtgctgctccctaacattacgctgggcagcgagattagggacagctgctggcattcttccgtggctctcgagcagtccatcgagtttatcagggactccctgatttccatccgtgatgagaaggacggcattaaccgctgtttgccagatgggcagagcctcccgcccgggcggactaagaagcccatcgcaggagtaataggacccggcagctcctctgtcgcaatccaggtccagaatttgctccagctgttcgatatcccccaaatagcttacagcgcaaccagcatagacctcagcgataaaacactctataaatactttctgagagtggtccccagcgataccctgcaggcgagagcaatgctggacattgtgaagaggtacaactggacctacgtttctgccgtgcacaccgaggggaactacggtgagtcgggaatggatgcctttaaagaattggcagcccaggaagggctgtgcattgcacacagcgataagatctacagcaacgccggtgaaaagagttttgaccgattgcttcgcaaactgcgagaaaggctgccgaaagcccgagtggtggtttgtttctgtgaggggatgaccgttagagggctgctctccgctatgcggagactgggcgtagtgggcgagttttccctcataggctctgacggatgggcagacagggacgaagttatcgagggatacgaggtggaagccaacggcggaatcaccataaaattgcagagtcctgaagtcaggtccttcgatgactattttctgaaactccggttagacactaatactagaaacccttggtttcccgagttctggcaacacaggtttcagtgtcgtctgccaggacacctgctggaaaatcctaacttcaagcggatttgtacaggcaacgaaagtttagaagagaactatgtgcaagatagtaaaatgggctttgttattaatgccatctacgcaatggcacatgggcttcagaatatgcaccatgctttgtgccccggacatgtgggtctgtgtgacgcaatgaagcccattgacggttcaaaactgcttgactttctgatcaaatctagcttcataggtgtgtcaggcgaagaagtgtggttcgatgagaagggcgacgcaccggggagatacgatattatgaatttgcaatacacagaggcaaacagatatgactacgtacacgtgggtacctggcatgagggagttctgaacatagacgactacaagatccagatgaacaaaagcggggtagtgcgctccgtgtgttccgagccatgcctcaaaggacagatcaaggtcatccgaaaaggcgaggtatcttgttgctggatttgcaccgcgtgtaaggagaatgagtacgtgcaggacgagttcacttgcaaggcatgtgacttgggatggtggccgaatgcagacctgactggctgtgagccgattcccgtcagatacctcgagtggtcaaatattgagtcaatcattgccatagcgttctcttgtctcggcatcttggtgacattattcgtgacacttatcttcgtgttgtatcgggacacgcctgtagttaaatccagctcacgggaactctgttacatcattctggcaggaatatttctgggctacgtgtgcccttttaccctgattgcaaaacccaccacgacttcttgttacctgcagcggcttctggtggggctatcttcagctatgtgttacagtgcactggtgactaaaaccaatcggatcgccaggatcctggcaggatctaaaaaaaagatttgcacacgcaagccccggtttatgagtgcttgggcgcaagtcataattgcctcaatactgatctcagttcagctcaccttggttgtgactttgattatcatggaacctcctatgcccatcttgtcctatccaagcatcaaagaggtatacctaatctgtaacacgagcaacctgggagttgtcgctcctctgggatataatggtctgctgattatgagctgcacatactatgccttcaagaccagaaacgtccccgccaacttcaacgaggccaaatatattgcatttactatgtatacaacctgtattatttggctggcattcgttccaatttacttcggctccaattacaaaataataactacctgcttcgccgtcagtctttccgtcaccgtcgccctgggatgcatgttcactcccaaaatgtatataattatcgctaagccagaaagaaatgtcagatccgcctttacaacctctgacgtggtccgaatgcacgttggtgatggaaaactgccctgccgttctaatacgtttctaaacattttccgccgcaagaaagctggagccggtaacgcaaagaagagacaacctgagtttagccccacctctcagtgccctagcgcccacgttcagctctag

SEQ ID NO: 118586 - DNA, 2721 bp, synthetic construct
  misc_feature 1..2721: note = Description of Artificial Sequence: Synthetic coding sequence
  source 1..2721: mol_type = other DNA
atggtgggattgctgctgttctttttccctgcaatctttctggaggtaagtcttttgcctcggagtccaggaagaaaggtgcttttggctggagcgtcttcacagcggagcgtagcaaggatggatggggatgttattataggagcactcttctccgtacatcaccaaccacccgccgaaaaggtaccagagcgcaagtgcggagagattcgggagcagtacggcatccagagggtggaggctatgttccacacactggataagatcaatgcagatccagtgttgctgccaaacatcacattgggttccgaaattagggattcgtgttggcactcttctgttgcactagaacagtcaatcgagttcattcgggacagcttgattagcatcagagacgagaaggatggcatcaatcgctgtcttcccgatggccaatcgctgccccccggaaggacaaaaaagccaattgccggagtgattgggcccggctcttccagcgtggccatccaggtccagaacttactgcaactgtttgatatcccccagattgcctattcagctacctccatcgatctctcggacaaaactctttacaagtacttcctcagagtggttccttcagacactctgcaggcccgagcaatgcttgatatagtgaaacgctacaactggacttacgtgtcagctgtgcacaccgaaggtaattatggggagtcaggcatggatgctttcaaggagctcgccgcccaggaagggctgtgcatcgcgcactctgataagatttattcaaatgcgggggaaaagtcattcgaccgcctgctcaggaaactccgggagagactaccaaaagctcgggtggtcgtctgtttctgcgagggtatgaccgtgagaggcctgctcagcgccatgagacgactgggagtggtgggggagttttccctgattggttctgatggttgggctgaccgagatgaagtgatcgaaggctatgaagtcgaagccaatggagggataaccattaagctacaatctcccgaggtgagaagctttgatgattattttctgaagcttcggttggatacaaacacgcgaaacccctggttcccagagttctggcagcaccgtttccagtgcagactgccaggccatctgttggagaaccctaattttaaaaggatttgtacaggcaatgagtcactggaggaaaattacgtgcaagacagcaaaatggggtttgtgatcaatgccatttacgctatggcacacggtctccagaatatgcaccacgccctgtgccctggtcatgtgggactttgcgacgccatgaagccgatagacgggtctaagctgctagatttcctaatcaagagctccttcatcggtgtatcgggggaagaagtttggtttgatgagaagggcgacgctcctgggagatacgacatcatgaacctccagtacaccgaggccaacagatatgattacgtccacgtcgggacttggcacgaaggtgttctgaacattgacgactataaaatccaaatgaacaagtctggtgtagtgcgaagcgtatgtagcgagccttgtttaaaaggtcaaataaaagtcatccggaaaggcgaggtgtcctgctgctggatttgcacggcctgcaaagagaacgagtacgtccaagatgaatttacctgcaaagcttgtgacctgggttggtggcctaatgccgacctgactggatgcgaacctatcccggtgaggtatctggaatggtccaacattgaatcaattatagcgattgccttcagctgcttggggattctagtcaccctttttgttaccctgatctttgtgctatatcgcgatacgccggtggtgaaatcctcgagtagggagttatgctacatcatcttggcaggaatcttcctgggatatgtttgcccgtttaccttaatagctaagcctactactacttcttgttatctgcaacgccttctcgtggggctttcttctgccatgtgctactcagccctcgtgaccaaaaccaacaggatagctagaatcctcgctggttccaaaaaaaagatttgcactagaaagcccagattcatgagcgcttgggcccaggtgataattgcctccatcctcatctccgtccagctgactttggtggtaaccttgatcattatggaaccccccatgccaattctctcttacccatcaatcaaagaagtgtacttgatatgcaatacaagtaatttgggggtggtcgcaccgctggggtataacggcctgttgattatgagctgcacgtactatgccttcaagactcgcaacgttcctgccaattttaacgaagcgaagtacattgccttcacgatgtatactacctgtattatttggttagcttttgtgcccatctacttcggatccaactacaaaattattacaacgtgtttcgccgtcagcctgtctgtgactgttgcccttggctgtatgtttactccgaaaatgtatattattatcgccaagcccgagcggaatgtacggtctgcctttaccacgagcgacgtagtgcggatgcacgttggcgacggaaaacttccatgccgatctaataccttccttaacattttcaggcgaaagaaggcgggggcggggaatgctaaaaagcgccagccagaattctcacctacctctcagtgcccaagcgcacatgtgcagctttag

SEQ ID NO: 118587 - DNA, 2721 bp, synthetic construct
  misc_feature 1..2721: note = Description of Artificial Sequence: Synthetic coding sequence
  source 1..2721: mol_type = other DNA
atggtgggactcctcctcttcttcttcccagctatcttcctcgaagtttcactgttgccgagaagccccggcagaaaggttcttcttgcgggagctagctcgcaacgatccgtcgcacgcatggatggcgacgtgattatcggagcactattcagtgtccaccaccagccccctgccgaaaaagtgccagaacgaaagtgtggcgaaattcgtgagcagtacggtattcagcgggtggaggctatgttccacactttggataagattaacgcagatcccgttctgttgcccaatatcacactcggctctgagatccgcgattcctgttggcattccagtgttgccctcgagcagagtatcgagttcattagagacagcctgatttccatcagggacgagaaagatggaataaaccggtgtctacctgacggacagtcactcccacccgggaggacaaagaagcccatcgcaggcgtcatcggccctggatccagttctgttgctatccaggtgcaaaaccttctgcagctttttgacatcccacagatcgcctactctgctacaagcatcgatctatccgacaaaacgctgtacaaatactttctgagggtggtaccctccgacactctccaggcccgggccatgctggacattgtgaagcgttataattggacatatgtgtctgctgttcacaccgaaggcaactacggagaatctggaatggacgcgtttaaggaactggcggcccaagaagggttgtgcatagcccacagtgataagatttattcaaatgccggggaaaagtcgtttgatcgcctgcttagaaaactgagggaacgccttccaaaggctcgggtagtcgtatgcttctgtgaaggaatgaccgtgcgcgggctcctgtcagccatgcggcggctgggcgtagtgggggaattctctctgatcggttcagacggttgggctgaccgggatgaggtgatcgagggctatgaggtcgaagcaaatggaggtattaccattaagctgcagtcaccagaggtcagatcgttcgatgattattttctgaaactcaggctggacacgaacacacgtaacccttggttccctgaattttggcagcacagatttcagtgtagactgccaggccatctgctggaaaatcccaattttaaacggatctgtacaggcaacgagtcgctggaagaaaactacgtccaggattcgaaaatgggattcgttatcaacgcaatttatgccatggctcatggcctgcagaacatgcaccatgctctctgtccgggccacgtgggtctgtgcgatgccatgaagcccatcgacggcagcaagctgcttgattttcttataaaatcctcttttataggcgtcagcggtgaagaggtttggtttgacgagaaaggcgacgcccccggccgctacgatatcatgaatctgcagtacactgaagcaaatcgctatgactacgtgcacgtgggtacctggcacgaaggcgtgctgaatattgacgactataaaatccagatgaacaaaagcggggtggttcgttctgtgtgttccgagccctgcctcaagggccaaattaaggtgatccgcaaaggtgaagttagttgttgttggatatgtaccgcctgtaaggaaaatgaatacgttcaggatgaattcacgtgtaaggcctgtgacctaggctggtggcctaatgcggatcttacaggatgcgaacctatccctgtgcggtatctcgagtggagcaatattgagagtattattgcaatcgcctttagttgtttgggcattcttgtgacgctctttgtcacactcattttcgtcctgtaccgggacacccccgttgtgaagagttctagcagagagctatgttacattatcctggctgggatctttttggggtatgtctgtccattcaccctcattgcgaaaccgaccacaacttcttgctatctacagaggctacttgtgggtctatcttcagccatgtgttatagtgcactcgtcacaaaaaccaacagaatcgctagaattctggcaggcagtaagaaaaaaatctgtactcgaaaacctaggttcatgagcgcctgggcccaggtgatcattgcatccattcttatcagtgtccaactaaccctggtggtgactcttatcattatggaacccccgatgcccatcctctcctacccaagtattaaggaggtttatctgatttgtaacactagcaacctcggcgtcgttgcgcccttgggttataatggcctgctcatcatgtcatgtacctactatgccttcaagacccgcaatgtgcctgcaaatttcaatgaggcaaagtacatcgcattcacgatgtatacgacctgcattatttggcttgctttcgtccccatatatttcggatccaattataaaattatcactacatgcttcgccgtgagcctctccgtaaccgttgctctcggctgcatgttcacccccaaaatgtacatcatcatcgcaaaacctgagaggaatgtacggtcagctttcaccaccagcgatgtggtccgcatgcacgttggggatggaaagctgccctgcaggtcaaacacctttctcaatatatttaggcgcaaaaaagccggcgccggcaacgccaagaagcggcagcctgaattttccccaacatcacagtgtccatcagctcacgttcagctgtag

SEQ ID NO: 118588 - DNA, 2619 bp, synthetic construct
  misc_feature 1..2619: note = Description of Artificial Sequence: Synthetic coding sequence
  source 1..2619: mol_type = other DNA
atgggatctctgctcgccctgttagctctgctcttactgtggggcgccgtcgccgaagggccagccaagaaagttcttaccttagaaggggatctggtcctcgggggtctgttccctgtgcaccagaagggcggcccggcggaagactgcgggcccgtgaatgagcaccgcggcatacagcgcctggaagccatgctgtttgccctggataggatcaacagggatccccatttgctccccggagtgcgtcttggggctcacattctggactcttgcagcaaagacacgcacgccctggagcaggctctggattttgttagggcgagtttgtctcggggagcagacggctcaagacacatctgcccagacggaagctatgccacacacggagacgcccccacagcaatcaccggcgttatcgggggaagctactccgatgtctctatccaagtggctaatctcttacggctgtttcagatacctcagatctcctatgccagtacctcagccaaactcagcgataaatcacgctatgactattttgcacgaactgtcccccctgatttttttcaagccaaggccatggccgagattctgcgcttcttcaattggacttacgtgtccacggtcgcttccgagggcgactacggcgagaccggtatcgaggcattcgagctggaggctcgcgctcggaacatatgcgttgctactagcgaaaaagtgggccgagccatgagcagagcagccttcgaaggggtggtgcgtgctctgttgcagaagccttccgctagggtagctgtgttatttacacgctctgaagacgctcgggagctgttagccgcctcccaacgtctaaatgcttcctttacttgggtcgcaagcgatgggtggggagcccttgaatcagtagtagccgggtcagaaggggccgcggaaggggctataaccatcgagctggcctcctacccaatctcagacttcgcttcctattttcagagtctagacccctggaataattcaagaaacccttggttccgtgaattttgggaacagcgtttccgctgctcatttaggcagcgagactgcgccgcccattccctgcgggctgttccttttgagcaggaatctaagatcatgtttgtcgtgaacgccgtctacgcgatggctcacgccttgcacaacatgcatagagcactgtgccccaacacaacccgcctgtgtgacgccatgagacccgtgaacggtcgacgtctgtataaggactttgttctgaatgtgaagtttgatgcccctttccgcccagctgatacacacaacgaagtacggtttgacagatttggtgacggcatcggcagatacaatatatttacatacttaagggccggctcaggccgctaccgttaccagaaagtcgggtattgggctgaaggccttactctagacaccagtttgatcccttgggcaagcccttcagccggacctttgcccgcctcgcgttgctctgagccctgcttgcagaatgaggtgaaatccgtccagccgggcgaagtttgttgctggttgtgcattccttgccagccttatgagtacaggcttgacgaattcacttgtgcggattgcggattgggttattggcccaatgcatccctgactggatgtttcgagctaccgcaagagtacatccggtggggagatgcctgggctgtcggaccagtgaccattgcctgcttaggggccctcgcaaccctgttcgttctaggggttttcgtacggcataacgccacccctgtggttaaggcttcgggccgggagctttgttacatcctcctcggcggcgtgttcctgtgttactgtatgacatttatcttcatcgccaaacctagtacggctgtgtgcaccctcaggcggctaggactgggcacagcattttctgtatgttactctgcactgttaacaaaaaccaatcgcattgcccgcatcttcggaggtgccagagagggcgctcagcgcccccggtttatctcgcctgccagccaggtggctatttgcctggcattaatcagtgggcagctcctgattgtggttgcctggttggtggttgaggcaccagggaccggcaaagagacagctccagagagaagagaagtggtcacgctgcggtgcaaccatagagacgctagcatgttgggatcactcgcatacaacgtgcttcttattgccctgtgcacactctacgcttttaagactaggaaatgcccagaaaactttaatgaagccaaatttataggcttcactatgtacaccacctgcattatatggctcgctttcctgcccatcttttatgtgacaagtagtgattacagagtgcagacaacgactatgtgtgtgtcggtctccctatccggttcagttgtactcgggtgcttatttgcacctaagctgcatatcatactttttcagcctcaaaaaaacgtcgtcagtcatcgggctcctacatctcgctttgggtctgccgccgccagggcttcttcttcactaggtcagggatcaggctcccagttcgtgccaactgtgtgcaatggccgcgaagttgtcgatagcacgacttcttccctctag

SEQ ID NO: 118589 - DNA, 213 bp, synthetic construct
  misc_feature 1..213: note = Description of Artificial Sequence: Synthetic coding sequence
  source 1..213: mol_type = other DNA
atgggctctcttctggcccttttagctctgttgctcctatggggcgctgtggcagagggacctgctaaaaaggtgctgacactggagggcgatctagttcttggaggactattcccggttcaccagaaaggaggtcccgcagaagactgtggccccgtgaacgaacataggggcattcagaggctggaagcaatgctgttcgcactggattag

SEQ ID NO: 118590 - DNA, 2640 bp, synthetic construct
  misc_feature 1..2640: note = Description of Artificial Sequence: Synthetic coding sequence
  source 1..2640: mol_type = other DNA
atgaagatgctgacgaggctgcaggtcttaacattggctctgtttagcaagggatttttgctcagtctcggggaccataattttctgaggcgggaaatcaaaatcgaaggcgacctggtcctgggaggcctgttccccatcaacgagaaaggaaccggaacggaggaatgtggcaggattaacgaagaccggggaatccaaaggctcgaggccatgctgttcgccatcgatgaaattaacaaagacgattacctgctacccggcgttaaactgggtgtccatattctggatacttgcagccgagatacttatgccttggaacagagtctcgagtttgtgcgcgctagcctgaccaaggtcgacgaagccgagtacatgtgtcccgatggcagctatgcgattcaggaaaacattcctctgctgatcgctggagttatcggcgggagctactccagcgtgtctattcaggtcgcaaatcttttacggttatttcagatcccccaaatcagttatgcaagcactagcgccaagctgtccgataaaagtcggtatgactactttgctcggactgttcccccggacttctatcaagctaaagcaatggcggagattctgaggttctttaactggacctacgtgagtactgtggcgtccgagggcgattatggcgagacgggaatcgaagcatttgaacaggaggcacggttacgaaacatctgcattgcaactgccgagaaagtgggtaggtcaaatatccgcaagtcttacgactccgtgattcgcgagctcctccagaaaccaaatgcgagagtggtcgtcctgttcatgagatccgacgacagtcgagagcttatagcagccgccagccgtgcgaatgcctctttcacatgggtggcctccgatgggtggggcgcccaggaaagcattatcaaaggtagcgagcatgtggcctatggggccataaccctggaattggcgtcacaaccagtccggcaatttgatagatatttccaatctctaaatccatacaacaaccaccgaaacccatggtttagagacttctgggagcaaaagttccagtgcagcctacaaaataaacgaaatcatcgcagggtgtgcgataagcacttagcaattgactccagtaattatgaacaggagagcaagataatgtttgtagtaaacgccgtctacgctatggcccatgccttgcataagatgcagcgaaccctgtgtccaaacacgactaaactttgcgacgccatgaaaatactggacgggaaaaaactgtacaaggactacttactgaaaatcaactttacggcgccctttaatccaaacaaggacgctgactccattgttaagtttgatacattcggggacggcatggggcgctataacgtgtttaactttcagaatgtcggtggtaagtacagctacttgaaagtaggacattgggctgaaaccctgagcctggacgtgaattcaattcactggagcaggaactccgtaccaactagccagtgctctgacccctgcgcacccaatgagatgaaaaacatgcagcctggggatgtgtgctgttggatctgtattccttgcgagccgtacgaatacttggctgacgaatttacttgcatggattgtggatcagggcagtggcctacagccgatttaaccggatgttacgatctgcccgaggactacatcaggtgggaggacgcatgggctatcgggccagttactatcgcttgtttgggtttcatgtgtacctgtatggtcgtgactgtttttattaagcacaacaataccccattggtgaaagcctcaggcagagaactgtgctacatcctgctgtttggggttggtctgagctattgtatgacattttttttcatcgccaaaccaagtcccgtgatttgtgccctccgtagactcggcttaggctcttcatttgctatctgttacagtgccctcctgacgaagaccaattgtattgccaggatcttcgatggcgtcaagaacggtgcccagcgtccgaagtttatttctccaagctcacaggtatttatctgtttaggcttgatcctcgttcagattgttatggtatccgtatggttgattctagaagctccgggcactcgccggtacacactggctgagaaacgcgagaccgtcatactgaaatgtaatgttaaggattcttcaatgctcatcagtctgacatatgacgttatcttggtgatactgtgtactgtgtatgccttcaaaacccggaaatgcccggaaaattttaacgaggctaaatttataggatttaccatgtacacaacatgtatcatctggttagctttcctgccaattttttacgtgacatcttctgactatagggtgcaaaccacgacaatgtgcataagcgtgtccctctccggtttcgtggtcctgggctgtctgtttgctcctaaggtgcatataattctttttcagcctcagaaaaacgtcgtgacccaccgcctacacctcaaccgattctccgttagcggaactgggacaacttacagccagtccagcgcctccacttatgtcccgacggtgtgtaacggtcgagaggtgttggatagcaccaccagtagcctgtag

SEQ ID NO: 118591 - DNA, 1608 bp, synthetic construct
  misc_feature 1..1608: note = Description of Artificial Sequence: Synthetic coding sequence
  source 1..1608: mol_type = other DNA
atgctgacccgcctacaggtcctcacactggcgttgttttcaaaagggttcctcctaagtctcggggaccacaactttctacgccgcgaaataaaaatagagggagacttagttctggggggactgtttcccatcaatgaaaagggtaccgggacggaagagtgtgggcggattaacgaggatagaggcattcagagactcgaggctatgctgttcgccatcgatgaaatcaacaaggatgactatttgctgcccggcgtgaaattgggtgtccacatcctcgatacctgttcccgcgacacatatgcattggagcagtctcttgagttcgtgagggcatccctgacaaaagtggatgaagctgagtacatgtgcccagacggcagctacgcgatacaggagaacatcccgttgcttatcgcgggcgtgatcggcggttcgtattcctctgtgagtatacaagtggccaacctgctcagactcttccagattccgcagatctcctacgccagcacttcagcgaaactgagcgacaagagccgttatgactacttcgctagaacagttccgcccgatttctaccaagccaaagccatggcagagatcttacggttcttcaactggacgtatgtgtctactgtcgccagcgaaggtgattacggagaaacgggaatcgaggcatttgagcaggaggcccggctccggaatatttgcattgcgacagcggaaaaagtgggcaggtctaatattcgcaagagttacgattcagttatcagggagctcttgcagaagcccaatgccagggttgtcgtattgtttatgagaagcgacgatagtagggagcttattgcagccgccagtcgcgccaacgccagcttcacctgggtggcatcagacgggtggggagcgcaggagagcatcattaagggtagcgaacacgtcgcctacggtgccatcaccttggagttggcaagccagcccgttcggcagttcgatagatactttcagagtcttaatccttacaataatcatcgcaatccctggttccgagacttttgggagcagaagttccagtgcagtttgcagaataagcgtaaccatagacgtgtttgcgacaaacatctggcaatcgacagctccaactatgagcaggagtcaaaaatcatgtttgttgtgaatgctgtgtatgccatggctcatgccctccataaaatgcagcgaacactttgccccaacactactaagctctgcgacgctatgaagatcctcgatggcaagaagctgtacaaagactatcttttaaagatcaacttcacaggagctgatgacaatcatgtccatctgtgccaacccgagtggctatgtggactgggcctctttgtgtgtacccagggcagccaccatccagtctctaccccggaggaatgttgtcatacccaaacggccccccagcaggtacaatgccagtggaactgggaccatatactctctgtcctttgtaaacatgtgtgtgccaacggtgttcaatgggccggaagtccgagactgcaccacttaatttctgtcattgttaattgcagcagcgtccttgtttttttggactgctag

SEQ ID NO: 118592 - DNA, 264 bp, synthetic construct
  misc_feature 1..264: note = Description of Artificial Sequence: Synthetic coding sequence
  source 1..264: mol_type = other DNA
atgaaaatgcttacaaggctgcaagtactgaccctggccctcttctctaagggcttcctcctgtcgctaggtgatcacaatttcctgaggcgtgaaattaagatcgaaggcgacctggtcttgggcggcttgttccctattaatgagaagggaaccgggacagaagagtgtgggcgcatcaatgaggatcgcggtattcagcgccttgaagccatgctgtttgctattgacgaaatcaataaggatgattatctcctgccctag

SEQ ID NO: 118593 - DNA, 1614 bp, synthetic construct
  misc_feature 1..1614: note = Description of Artificial Sequence: Synthetic coding sequence
  source 1..1614: mol_type = other DNA
atgaagatgttgacacgcctgcaggtgcttactttggccctcttcagcaagggtttccttctgagtctgggcgaccacaactttctgagacgagaaatcaaaatagagggcgaccttgtcctcggaggcttatttcctatcaatgagaaaggaacgggtaccgaggagtgtggcaggattaacgaggaccgcggtattcagaggttggaagccatgctcttcgctattgatgaaattaacaaagatgactatttactgccaggagtcaagcttggcgtgcacatcctggacacctgctcccgggacacatatgcactggaacagtccctggaattcgtgcgggcctccttaactaaggtagacgaggccgagtatatgtgccccgacggatcgtatgctatccaggagaatatacccctgctgatagctggggtcatcggcggttcatacagcagcgttagtatacaggtagccaacctcctgcggctttttcagatcccccagatttcatacgcaagtacctccgctaagcttagcgacaaaagccggtatgactatttcgctcggactgtgccaccagatttctaccaggcaaaggcaatggctgagatcctacgcttctttaactggacttatgtgtccacagtggcttcggaaggcgattacggcgagactggcatcgaagctttcgagcaggaggcacgcctgcgaaacatttgcattgccaccgcggaaaaggtcggtcgtagcaatataaggaaatcgtacgattcagtcatcagagagctgctgcaaaagcccaacgctcgagtcgtggtactttttatgcgttccgacgatagcagggaattgatcgctgctgctagccgggccaatgcctcgtttacctgggttgcctcagatggctggggggcccaggaatctatcattaaaggcagtgaacatgtggcttacggtgctatcacccttgagctagcctcacagcccgttagacagtttgacagatacttccagtcactgaacccctataacaaccaccgcaatccctggtttcgcgacttctgggaacagaaattccagtgctcccttcagaataagcggaaccatagacgggtttgcgacaaacatcttgccatagattctagcaactacgagcaggagtctaaaattatgtttgtcgtgaacgccgtgtacgctatggctcatgccctgcataagatgcagaggacactgtgtccgaatactaccaagctgtgcgacgccatgaagattttggatgggaagaaactgtataaggactatttactgaaaattaatttcacaggggcggacgacaaccacgtccatctctgccagcccgagtggctgtgcgggctgggcttgttcgtctgcacacaagggtctcatcacccagtgagcacacccgaagaatgctgtcatacccagaccgcaccccagcaagtacaatgtcagtggaattgggaccacatcctgtccgtcttgtgtaaacatgtatgcgcaaacggcgtgcagtgggcgggcagtccccgtctgcaccatttgatttcagtgattgtcaattgttcttccgtgctcgtgttcctcgattgttag

SEQ ID NO: 118594 - DNA, 246 bp, synthetic construct
  misc_feature 1..246: note = Description of Artificial Sequence: Synthetic coding sequence
  source 1..246: mol_type = other DNA
atgaaaatgcttacaagactgcaagtgctcacactggcgctctttagcaaaggattcctgctgtcattgggagaccataatttcctgcggcgtgaaatcaaaatcgagggcgacctggttctcgggggtctgtttcctattaatgagaaaggcacaggaacagaagaatgcgggagaatcaacgaggatcgaggcatccagaggctcgaagctatgctgtttgctatcgatgagattaacaaatag

SEQ ID NO: 118595 - DNA, 2256 bp, synthetic construct
  misc_feature 1..2256: note = Description of Artificial Sequence: Synthetic coding sequence
  source 1..2256: mol_type = other DNA
atgagccagtcacccggtgctggctcccctccccctctgccacccaggtctgcccctgtcccagcaagaagctgtcgatgcgaggtcgccaatttgttaagactattccagataccacagatcagctatgcctctacttccgccaaacttagtgacaaatcccgctatgattacttcgcccgaaccgtgcctccagacttttatcaggcaaaggctatggctgagatccttaggttcttcaattggacttatgtcagcaccgtggccagtgagggtgattacggggaaacaggcatcgaagctttcgagcaggaggctcggctacggaatatttgcatcgccacagccgaaaaggtcggccgttccaacatcaggaagtcgtacgattcagttatcagggaattgctgcagaagcctaacgcgcgggtggttgtgctatttatgcggtcagatgattcccgcgaactgatagctgcagcgtcgagagctaatgctagctttacttgggtggccagcgacggttggggcgctcaagaaagcattatcaagggctcggagcacgtggcctatggcgcgattaccctcgagctcgcctctcagcccgtgaggcaatttgatcgatactttcagtcactcaatccctataataatcaccggaatccttggtttcgcgacttttgggagcaaaagtttcagtgtagccttcaaaacaagagaaatcataggagggtgtgcgataagcacctggcaattgactcttcaaactacgagcaggagtccaaaatcatgttcgtagtcaatgctgtttatgcaatggcccatgcactgcacaaaatgcagcgtacgctgtgtcccaataccaccaagctgtgcgatgcaatgaaaattctggacgggaagaaattgtacaaggactacttgctgaagataaatttcacagcaccattcaatcctaataaagatgcggattccatcgtcaagttcgatactttcggagacggcatgggtcgctacaacgtgttcaacttccaaaatgtaggagggaaatactcttatttgaaagtggggcactgggcagaaactctgtccctggatgtgaacagcatacattggtcacgtaattccgtgcccacttcgcagtgctcagatccttgcgcccccaacgaaatgaagaatatgcagcccggagatgtgtgttgctggatctgtataccatgtgagccatacgagtacctggctgacgaattcacttgtatggactgcggaagtggccagtggcccaccgccgatctgactggttgctacgatctccctgaagactacatcaggtgggaagacgcttgggcaattggccctgtgactatcgcttgtttggggtttatgtgtacatgcatggttgtcacagtctttatcaagcacaacaatacccctctggtgaaggcttctggacgggagctatgttacatcttgttgttcggtgttgggctgtcttactgtatgacatttttttttatcgccaaaccatcacctgttatttgtgcactccgaagactggggctgggcagctcatttgcaatttgttactctgccctgctcacgaaaactaactgtattgcgcgtatatttgatggcgtcaagaatggagcccagaggccgaagttcatctccccctcctctcaggtattcatctgtcttggtctgatcctggtgcagattgtcatggtgtccgtctggttgattcttgaggcccccggtacaagaagatataccctggcggaaaaacgggagaccgttatcctcaaatgcaatgtgaaagactcctctatgctgatttccctaacatatgatgttatactggtgatcctgtgcactgtctacgcattcaaaactcggaagtgcccagaaaacttcaatgaggctaaatttatcggcttcacaatgtatacgacatgtatcatatggttggcgttccttccaatcttttacgtcacaagctccgattaccgggtgcagactacgaccatgtgcattagcgtatcactatccgggtttgtggtgttgggttgtctgtttgcccccaaggttcacattattctgtttcaaccacaaaaaaacgttgtcactcatagactccatctgaatcgcttcagcgtgtctggcactgggactacgtacagtcaaagctctgcctcgacttacgtccccaccgtgtgtaatggacgggaggtactggattctactacaagttctctgtag

SEQ ID NO: 118596 - DNA, 1416 bp, synthetic construct
  misc_feature 1..1416: note = Description of Artificial Sequence: Synthetic coding sequence
  source 1..1416: mol_type = other DNA
atgaggcggaccaaccatgagcctgaaccggggtgccgcctcaccgctgcggccgccaccgctgtgagctcttcgtcctgccaggaactgagtgtaagggctcccttcaatcctaataaggatgccgactccatcgtcaaatttgacacgtttggcgatggaatgggccgctataacgtgttcaacttccagaatgttggcggtaaatattcttacttaaaagtaggccactgggcagagaccctctccctagacgtgaattcgattcactggtcacgcaattctgttcctacatcacagtgcagcgacccatgtgccccaaacgagatgaagaatatgcagcctggggatgtttgctgctggatttgcataccttgcgagccttacgagtatcttgccgacgagtttacatgcatggattgcgggtctggacaatggcctacagccgacttgaccgggtgctacgaccttcccgaggactatataagatgggaggacgcttgggccatcggcccagttactatcgcatgcctgggttttatgtgcacatgtatggtggtaacggtgtttatcaagcataataacacacccttagtcaaggccagcggaagggagctttgctacatattactattcggcgtggggctctcctactgtatgactttttttttcattgccaagccgagccctgtgatctgtgcacttcggcggctcggactgggcagcagctttgccatttgttattccgcacttttgaccaaaactaattgcatagcccgtatctttgacggtgtcaagaatggcgctcaacggcctaaatttatcagtccttcgtcacaagtgttcatttgcctcggtctgattctagtgcaaatcgtgatggtgtccgtctggctcattctggaagcccccggaacaagaagatacacgcttgctgaaaaaagggagacggtcattctgaagtgtaatgtaaaggacagtagcatgttgatcagcttaacgtacgacgttatacttgtgattttgtgtacagtatatgctttcaagacccgaaagtgcccagaaaacttcaatgaggcgaagttcatcggtttcacaatgtacaccacatgcataatatggctcgccttcttgcctattttctacgtcaccagtagcgactaccgggtccaaaccacgactatgtgcatcagcgtgtcactgagcggcttcgtggtgttgggatgtcttttcgcccccaaagtgcatataatcctgtttcagccccagaaaaatgtcgtgacccaccggctgcacctgaacaggttctcagtgtcaggtactgggaccacatacagtcagtcttccgctagcacatacgtgcccacagtttgcaacggtcgagaagtcttagattccactacttcaagtctgtag

SEQ ID NO: 118597 - DNA, 2391 bp, synthetic construct
  misc_feature 1..2391: note = Description of Artificial Sequence: Synthetic coding sequence
  source 1..2391: mol_type = other DNA
atgccagcctgggagccaggcgtagccgcctcatgtgggtggcgtgcccctccttgcagcccgctcaggctgtgtattgcaccacatccctgtacgcccccaagttcccatcagggcaacttgacgtgccggctgccacccagatccttcggattctgccgatgtgtgtgggtgagaacccggggacccagtttacccggtgaacaggtgtcgcttgccgcccatgagagcgaaggcgccgctgctcagctcgggagcagtcctgagatagatccacgccggcccagatgcctgctgccagagtcagcacagattccccagatatcctatgcatcaaccgctcccgacctcagcgacaatagtcgctacgattttttctcgagagtcgtacccagcgacacctatcaagcacaggcaatggtggatatcgtcagagctttgaaatggaactatgtctcaaccgtggcctcggaagggtcctacggagagtcaggcgttgaggccttcatccagaagagcagagaggatggtggtgtgtgcatagcacagtccgtgaagattccccgcgagcccaaagctggagagttcgataagattattcgccgtttgttggagacgtctaatgctcgggctgtgattatttttgccaacgaagatgacattaggcgtgtgctggaggcagcaagaagagccaatcagactggacactttttctggatgggttcggattcttgggggagcaaaatcgctccggttctccatttggaagaagtggccgaaggggctgttaccatcttaccaaagcgtatgtcagtgagggatagggagcgtatcggtcaggactctgcttatgagcaggaaggtaaggtgcaatttgttatagacgctgtgtacgcaatgggtcatgccctacacgctatgcatagagatctgtgccccggacgagttggcctctgtcctcgaatggacccggtagacggaacccagttgctgaaatatattcgtaatgtgaatttcagcgggatcgccgggaatcccgttactttcaacgaaaacggcgacgcacctggacgctatgatatttatcagtaccagctccgcaacgatagcgctgaatacaaagtgatagggtcatggaccgatcacctacatctcagaatcgaacgcatgcactggcccggcagtgggcaacagctccctcgaagcatctgttcattgccttgtcagcccggagaaaggaaaaagactgtaaaggggatgccctgctgttggcattgcgaaccctgtaccggctaccagtaccaagtcgatagatacacctgcaaaacatgtccttatgacatgcggcctaccgaaaaccgaacaggatgccgtccaatcccaatcattaagctggagtggggcagtccgtgggccgtacttccactgtttctggcagttgtagggatcgctgccaccctgttcgtggtcatcacctttgtgcgatacaatgacactcccattgttaaggcttctggccgcgagctctcgtatgtgctgctggcgggcatcttcctctgctatgccactaccttcctgatgatcgctgaacccgatctggggacctgctcattgcgacgcatcttcctgggcctcggtatgtcaattagctacgctgctctgctcaccaagaccaaccgcatttaccgcatctttgaacaaggcaaaaggtccgtgtctgcccctcgcttcataagtcctgcgagccagctggctattacattcagtctgatatcactgcaactgttgggcatctgcgtatggttcgtggttgatccttcacattctgtcgttgactttcaggatcaacggacacttgacccaaggtttgcccgtggcgtgctgaaatgtgacatctccgacctctcacttatatgtctgctaggatattcaatgctactgatggtgacctgtactgtgtacgccattaagaccaggggagtccctgaaactttcaatgaagccaagcctattggcttcaccatgtataccacgtgtatcgtctggttagcttttattccaatattcttcggaaccagccagtcagccgacaagctgtacatacagactacaacacttacagtgagcgtgagcttgtccgcatctgtcagcttagggatgctgtacatgccaaaggtgtatattatcttatttcaccccgaacaaaatgtgccgaaaaggaagcgctccctgaaggcagtagtaaccgccgcaacaatgagcaataaattcacccagaaaggcaacttccgacccaatggtgaggcgaaaagcgaactgtgcgaaaacctggaagcgccggccctggcaaccaagcagacatatgttacgtacaccaaccatgccatttag

SEQ ID NO: 118598 - DNA, 2739 bp, synthetic construct
  misc_feature 1..2739: note = Description of Artificial Sequence: Synthetic coding sequence
  source 1..2739: mol_type = other DNA
atgccagggaagcgcgggctgggctggtggtgggctcgccttcctctctgcctgctgttgagcctttacgggccgtggatgccatccagcctcggcaagcctaaaggacaccctcacatgaacagtattcgcatagatggagatatcactctcgggggccttttccccgttcatgggcggggctccgagggaaagccatgtggcgaacttaagaaggaaaagggcattcacaggctggaagctatgctattcgccctggaccgcatcaataatgatccagatctgttacccaatattactttaggggccaggatcctggacacctgctcacgggatacccacgctctggagcagtcactgactttcgtgcaagccctgatcgaaaaggacggaacggaggtcaggtgcggtagtggcggccctccgatcatcacaaagcccgagagagttgttggggtaatcggagcttcaggatcaagcgtatcaatcatggttgctaacatactgaggctgttcaaaatccctcagatcagttatgccagtacagcaccggatctgtcggataattccagatatgactttttcagtagggtggtgcctagtgatacctaccaggcccaggccatggttgacatcgtacgggctctgaagtggaactatgtgtctactgtcgcctccgaaggcagttatggtgagtctggcgtggaggcctttattcagaaatcccgggaggacggaggcgtgtgcatcgcacagtccgtaaaaattcctagggagccaaaggccggtgaattcgataaaattatcaggcgcctgctcgaaacttccaatgcacgagctgttattatttttgcgaacgaagatgacatccgtcgggtgctggaggcagctaggcgggcgaaccaaacagggcactttttctggatggggagcgatagttgggggtccaagatcgccccagttctacaccttgaggaggtggccgagggcgccgtgacaattctacccaagagaatgtctgtgcggggctttgaccgctactttagcagtcgcacattagataataaccggcgcaacatttggttcgcggagttctgggaggataactttcattgtaaactctcacgccacgcactcaaaaaaggatcccacgttaagaaatgcacaaaccgcgaacggatcggacaggattccgcatacgaacaggagggcaaagtgcaattcgttatcgatgccgtatacgcaatgggccacgccttgcacgctatgcatcgggacttatgtcctggccgcgtggggctttgtcccagaatggatcctgtcgatggaacccagctcctgaagtacatacgtaacgtcaattttagtggaatagcaggtaatcccgtgaccttcaatgaaaatggtgatgccccagggcggtatgatatttaccagtaccagctcagaaacgatagtgccgagtacaaggtgatcggcagctggaccgaccacctgcacctgcggatcgagagaatgcactggccaggatccggccagcagctgcctcggtccatttgctctcttccctgtcagcccggcgagagaaaaaagacggtcaaaggcatgccctgctgctggcattgtgaaccgtgtaccggttaccagtatcaagtggaccgatacacctgtaagacctgtccctacgacatgcgccccactgagaataggactggatgtcgtcccatcccaattatcaaactagagtgggggtccccttgggccgttctgccactctttctcgccgtggtgggtatagccgcgaccctgttcgtcgttattaccttcgtcaggtacaacgatacaccaatagtgaaggcatccggccgagagttatcctacgtactgttggctgggatctttttgtgctacgcaactacctttctgatgatagcagagcctgatttgggaacatgctccctgcgccgaatctttctaggcctgggcatgagcatctcctacgccgccctgctgactaagacgaaccgaatctaccgtatttttgagcagggtaaacggagcgtgtcagctccacgctttatttcccccgcctctcagctggccattaccttttctttgatttcactccagctactggggatttgcgtgtggttcgtggtggacccctcacatagcgtagtggattttcaggatcagcgaaccttggatcctcggtttgcccgaggggttctcaagtgtgacatctcggacctgagcttgatctgtctgcttggttacagtatgctgcttatggttacctgcacggtatatgccatcaaaacccgaggagtgccagaaacattcaacgaagcaaaaccaataggatttactatgtacaccacatgtatcgtttggctcgcattcatcccaatcttcttcggaacatcacaaagtgccgataaattgtatattcagactaccacactcacggtctcagtcagcctgagcgccagcgttagtctgggtatgttatatatgcccaaggtctacatcattttgtttcatcccgaacagaatgtccccaagaggaagcggtcactgaaggccgtggtcactgctgctactatgagtaacaaattcacccagaagggcaatttcagacccaacggcgaagccaagagcgagctgtgtgagaacctggaagctcccgcgttggccacgaagcagacgtacgtcacatataccaatcacgccatttag

SEQ ID NO: 118599 - DNA, 2319 bp, synthetic construct
  misc_feature 1..2319: note = Description of Artificial Sequence: Synthetic coding sequence
  source 1..2319: mol_type = other DNA
atggttcagaccttgcccaagctgttcccacacgatggcgcgaagcggaaaaagcgaactctgcgaactagtggcccctgctttggcggggggggtcagatccctcagatctcctatgccagcaccgctcccgatctctctgacaacagccgctatgactttttctcacgggtggtacccagtgatacctatcaggcccaggccatggtggacatcgtccgcgcgctgaagtggaactatgtcagtaccgttgcttcggaggggtcctacggggagtctggcgttgaggcgtttatccagaagagccgggaggatggtggagtgtgtattgcccagagcgtgaaaattccccgagagcccaaagccggcgagttcgataaaattatccggcgtctactggaaacctccaatgcccgcgccgtcatcatcttcgcaaatgaagatgacatacggagagttctcgaagcagccagacgcgccaatcagacagggcatttcttttggatgggatcagattcttggggcagcaagatcgcgccggtgctgcatttagaggaggttgccgaaggcgccgtgactattctgcccaaaaggatgtccgtacgcggatttgatagatactttagcagccggaccctggacaacaaccggcggaacatctggttcgcagagttctgggaagacaatttccactgtaaactgtcaagacacgccctgaagaagggcagccacgtgaaaaaatgtacaaaccgtgagcgaatcggccaggactccgcctatgagcaagaaggaaaggtgcagttcgtcattgatgccgtgtacgcaatggggcacgccttacatgcaatgcatagagatctatgcccagggcgagtaggcctttgtccccgcatggatccagtagacgggacccaacttctgaaatacattaggaatgtcaattttagtggaatcgctggcaacccagtgactttcaacgagaatggcgacgccccgggcagatacgacatctaccagtaccagctgcgcaatgactccgctgagtacaaggtcatcgggtcttggactgatcacctgcatctgaggatcgaaagaatgcactggcctggcagcggccagcagctgccgcggtctatttgttcactgccatgccaaccaggagaacgtaagaagaccgtgaagggtatgccttgctgctggcattgtgagccgtgcaccggctaccagtatcaagtggaccggtatacgtgcaaaacctgcccctatgatatgcgccctactgagaacagaactgggtgcagaccaattccaataatcaagctcgaatggggctccccctgggccgtgctgccactttttttagctgtcgtgggaatagccgctaccctctttgtggtcattacctttgtacgatacaatgacaccccaatagttaaagcttcgggtagggaactgtcctacgtgctgctcgctgggatttttttgtgttatgccaccacattcctaatgattgcagaacccgacctcggaacttgctctctcagacggatctttctcgggctgggtatgagtatttcgtatgccgcactgttgaccaagacgaaccgtatctaccgcatcttcgaacaggggaagcggtctgtttccgctccccggttcatttctccagcttcacagttagccattactttctctctgatcagtctgcagcttttgggcatctgtgtgtggttcgtcgtcgatccgagtcacagcgtcgtggactttcaggatcagcgaaccttagacccaaggttcgcaaggggagtgctcaaatgcgacatttcggatctgtcactcatttgtcttttagggtactcaatgctgcttatggtgacgtgtactgtgtacgcaattaagactcggggcgtcccagagacctttaacgaagctaaaccaatagggttcactatgtacacgacctgtattgtgtggctcgcattcattcccattttctttgggaccagtcagtccgctgacaaactctacatacagactacaaccctgacggtaagcgtttcactgtccgcttcagtgtccttaggcatgctgtacatgcccaaagtttacattatcttattccaccccgagcaaaacgtccccaaaagaaagcgctcactgaaggccgttgttacagcagctactatgagtaataagtttactcagaagggcaattttcgacctaacggggaggccaagagcgagctatgcgagaatttggaagccccagccctcgccaccaagcagacttacgtgacttatacgaaccacgctatttag

SEQ ID NO: 118600 - DNA, 2340 bp, synthetic construct
  misc_feature 1..2340: note = Description of Artificial Sequence: Synthetic coding sequence
  source 1..2340: mol_type = other DNA
atggccgtcccattgggagccccctgttgggcgagcgctctgcccgcatgggcaccacctggactaccccatagaagtctgctgacgagattgctgtcacagcacgttaagccagctaagattccccaaatttcctacgcctccacagccccagacttgagcgataattctaggtacgactttttctcacgcgtggttccctcagacacctaccaggctcaggcaatggtagacattgtccgcgctctcaaatggaattatgtaagtactgtggcaagcgagggttcctacggtgagtctggcgtcgaggcttttattcagaaatcaagggaggacggaggagtgtgcatcgctcaatccgtcaaaattccccgagaacccaaggccggagagttcgacaagataatccggcgtctgttggagacttctaacgcgcgggcagttattatctttgccaatgaggatgacatccggcgcgtacttgaggctgccaggagggctaatcagactggacactttttctggatgggatccgattcgtggggatccaaaatcgcgccagtcctacatctggaggaggttgccgaaggggccgtgacaatcctgcctaagcggatgtccgtgaggggctttgaccgttatttcagctctaggacgctggacaacaacagaaggaacatctggtttgctgagttttgggaagataacttccactgcaaactgtcacgtcatgccctcaaaaaaggcagccacgttaagaagtgcacaaatcgggaacgtatagggcaggactccgcctacgagcaagaaggaaaggtgcagtttgtcatcgatgccgtttatgccatgggccatgctctgcacgctatgcaccgcgacttatgccctggccgggtgggcctctgtcctcgaatggaccctgtggatgggacccaattgttaaaatatattcgaaacgttaacttctctggtatcgccgggaacccggtgacattcaacgagaatggcgatgcccccggccgatatgacatctatcagtaccagttgcgaaatgactccgcggagtataaggttattgggagttggactgatcacttgcacctgcgtatagaacggatgcattggccaggctcagggcagcagttgccaagaagtatctgcagcctgccgtgccaaccgggggagcgtaaaaagacggtgaaaggaatgccctgttgttggcactgcgagccctgtactggatatcagtaccaagttgatagatacacgtgtaagacctgtccctacgacatgaggcccacagaaaatagaacgggatgtcggcccattcccataattaagctggaatggggcagcccctgggctgtgctaccgctgttccttgccgtcgtcggaatcgccgcaaccctgtttgtcgtaattaccttcgtgcggtataacgatacacctattgtgaaagcgtctgggcgggaactcagttacgtactgttggccggcatatttttatgttacgccacaacattcctcatgatagcggagcccgacctcggtacatgctcattgagaaggatctttttaggactgggaatgagtatttcctatgctgcattactgactaaaactaataggatataccggatctttgaacaaggaaagagaagcgtgtctgcccccagattcatctctccagcctcccaactcgccattactttcagccttatttccctgcagctcctgggtatctgcgtgtggtttgtcgtggacccatctcacagcgtggtggatttccaggaccagcgtactctggatccacgctttgccaggggcgtgctcaaatgtgatatatccgatctttcgctcatatgcctgttaggttactcaatgctgctcatggtgacatgcactgtttacgccatcaaaacacggggagtccccgaaacattcaacgaggcgaaacccattggctttacaatgtacaccacttgcatagtgtggttagcctttatccccatttttttcggcacctcccagtccgcagacaaattgtatattcagaccacgactttgacagtgagtgtttccctcagtgcttctgtgtctctcggcatgctctatatgcccaaagtctatataattctctttcacccagagcaaaacgtccccaaaagaaaaagaagtctaaaagctgtagttactgcagccactatgtctaacaagttcacccaaaagggtaattttaggccaaacggcgaggccaagtctgaactgtgcgagaacctcgaggcccctgctctggccacaaaacaaacgtatgtcacttatactaatcatgccatttag

SEQ ID NO: 118601 - DNA, 2739 bp, synthetic construct
  misc_feature 1..2739: note = Description of Artificial Sequence: Synthetic coding sequence
  source 1..2739: mol_type = other DNA
atgcccggcaaaaggggcctcggatggtggtgggcccgattgcccctctgtctgcttctgagtttatacgggccttggatgccctcctctctggggaagccaaagggacaccctcacatgaacagtataaggattgacggagacatcacattaggaggccttttccctgtgcacggtagaggtagcgagggtaaaccctgtggagaacttaaaaaggaaaaaggtatccaccgcctggaagccatgctctttgctctggacagaataaacaacgatcctgatctgcttcctaacattacgctgggggcacgtatcctcgacacctgcagtagggacactcacgccctcgagcagagtctcacattcgtccaggctctcatcgagaaggatggaacagaagttcgatgtgggagtggagggcctcccatcatcactaagcctgagcgcgttgtgggggtgatcggcgcatccggtagtagtgtgtctatcatggtagccaacatacttcggctcttcaaaattccccagatctcatatgcgtcaaccgctccagacctcagcgacaatagtagatacgacttcttctccagggtggttccctctgatacctatcaggcacaggccatggtggacatcgtacgggcacttaagtggaactacgtttctaccgtcgcgagcgaaggatcctacggtgaatccggagtggaggccttcatccagaagtcgcgggaggatggaggagtctgtattgcccagtcagtaaaaatcccacgggagcccaaggcaggcgaatttgacaagatcatccgtcggctcctggagacctcaaacgcacgagcagtgatcatctttgccaacgaggatgacattaggcgggtgctggaggctgctcgtagagcaaatcagactggacattttttctggatgggatctgactcttggggcagcaagatcgccccagtcttacacttggaagaggttgcggaaggggcggtgaccatcctgcctaagcgtatgtcggttcggggctttgaccgctactttagctcccgtactctagataataaccggcgtaacatttggttcgcagagttctgggaagataattttcattgcaagctgtctcgccatgccttgaaaaaaggatcccacgtcaaaaaatgtactaacagagagcgtatagggcaggacagcgcctacgagcaagaaggtaaggtccagtttgtcattgacgcagtgtacgccatgggccacgcacttcatgctatgcatagggatctgtgccccggcagggtgggcttatgcccccgcatggaccctgtggacggcacgcagctgctgaagtatatacggaacgtgaatttctcaggtatagccggcaatccagtcacctttaatgaaaacggcgatgctcccggaaggtacgatatctaccagtaccagctgagaaatgatagcgccgaatacaaagtgatcggcagttggacagaccatctgcaccttcgcatcgagcggatgcactggcctgggagcggccaacagcttcctcgctcaatatgcagccttccgtgccaaccaggagaacggaagaaaactgtgaaaggaatgccgtgttgttggcattgcgagccatgcaccggctatcagtatcaggttgaccggtacacgtgtaagacatgtccctatgacatgagacctacggagaacagaaccggttgtaggcccattccaatcatcaagctcgaatgggggagtccttgggcagtgctgcccttgttcctggccgtagtggggatcgccgcaaccctgtttgttgtaataacctttgtcagatacaatgacaccccaatcgttaaagcgagcgggagggagctgtcctacgtactgcttgccgggattttcctgtgctatgccaccaccttcttaatgattgctgagcccgacttggggacttgttccctccggcggattttcctggggctgggcatgtcaatttcttatgccgccctcctcactaagacaaaccggatctataggatcttcgagcagggcaagagatccgtgagcgcaccccgctttatcagccccgcatcacagctggcgatcactttctctctcattagccttcaactgctggggatttgcgtctggtttgtcgtcgacccatcacattcagttgtcgatttccaggatcagcgcacccttgatccaagatttgcacgcggggtgctgaaatgtgatataagcgatctgtctcttatctgcctccttggttattccatgctcctcatggtgacatgcactgtgtatgcaatcaagactcggggcgtcccagagactttcaacgaggcgaaacctatcgggttcactatgtacaccacatgcatcgtctggctcgcttttatccctatatttttcgggacatcccaaagcgcggataagctttacattcagacgactacactgaccgttagtgtgtctttatctgcttctgtcagtctcggcatgctttatatgcccaaggtgtatattatcttgttccaccctgagcaaaatgtgccaaagagaaaacgcagcctgaaagcagtagtgacagctgctaccatgtccaacaagttcactcagaaaggtaatttcagacctaatggagaggccaaatctgaactctgtgagaatctggaggctcctgcattggcaacaaagcaaacctacgtgacatataccaaccacgcgatctag

SEQ ID NO: 118602 - DNA, 2232 bp, synthetic construct
  misc_feature 1..2232: note = Description of Artificial Sequence: Synthetic coding sequence
  source 1..2232: mol_type = other DNA
atgtcctgtaaaataccacagataagttacgcctccactgccccagaccttagcgataattctcgatacgatttcttcagtcgggtggttccgagcgatacctatcaggcccaggccatggtagacatagtacgggccctgaagtggaactatgtgtctacagtggcgtctgagggcagctacggcgagagcggggtcgaggcattcattcagaagtcccgggaagatggaggcgtctgcatcgcacagtccgtgaagataccaagggagcctaaggcgggagagttcgacaaaatcataagaaggctcttggaaacctccaatgctcgagccgttataatatttgcaaacgaggacgacatcagacgcgtgttggaagccgccagacgcgccaatcaaacaggacacttcttctggatgggctccgactcatggggctctaagatcgcacccgtgctgcaccttgaggaagtggcagaaggagctgtgaccattctacccaaacgcatgagcgttcgcggctttgacaggtatttcagcagtagaactctggataacaataggcgcaatatttggtttgccgaattctgggaggataattttcattgcaagctgtctcgtcacgctctgaagaaggggtcccacgtgaaaaagtgcaccaatcgagagcgtatcggccaggatagtgcatatgaacaggaaggtaaagtgcagttcgtgatagacgccgtgtacgctatgggtcatgctctgcatgccatgcatcgagatttgtgcccaggaagagtgggcctgtgcccccgaatggacccggtcgacggcacgcagctgttaaagtacatcagaaacgtgaacttttctggtattgcggggaacccagtcactttcaacgagaacggggatgccccaggcagatacgatatttatcagtaccagctcaggaatgactccgctgagtacaaagtaattggatcatggacagaccatctgcacctcagaatcgagcgaatgcactggcctggatcagggcaacagctgccccggagtatctgcagtctgccctgtcagccgggtgagagaaaaaagacggtcaagggaatgccatgctgctggcattgcgaaccgtgtacggggtaccagtaccaggttgacagatatacgtgtaagacctgcccttacgatatgagacctacggagaaccgaaccggttgtcgccccatcccaatcataaagcttgagtggggctcaccttgggccgtcctccctctcttcttagccgtggtagggattgcagcaacacttttcgtcgtgatcacgttcgtgaggtataacgacacccctatagtgaaggcctccgggagggagctaagctatgttctgttagctggtatatttctctgctatgctaccaccttcctcatgatcgccgagcctgatttaggaacctgcagtctgcgacgaatttttctcggattgggtatgtctatctcttacgccgccctgctgactaaaacaaaccggatctaccgaatattcgagcaaggcaagcggtcagtcagcgcgcccagatttatcagccctgccagtcagcttgctatcacctttagccttatttcactccagcttttaggtatatgtgtgtggttcgtggtggacccatcccactccgtcgttgacttccaggaccagcgcactctggatccacggtttgcaagaggcgtgctgaaatgcgacatttccgacctgtcactcatttgcctgctgggctactccatgctgctgatggttacttgcaccgtgtatgccattaagacgaggggggtacctgaaacttttaacgaggcaaaaccgatcggctttacaatgtatacaacgtgcatcgtgtggctagctttcattccgatcttctttggtaccagccagtctgctgacaagctgtatatccagaccacaactctaacggtgagtgtgtctctttccgcctccgtgagcttgggcatgctctacatgcccaaggtctatatcatcctctttcacccggagcagaacgttcctaaaaggaaaaggtcgctgaaagccgtggtgacagcggcgacaatgagcaacaaattcacgcagaagggcaacttcagacccaacggagaggccaagtctgagctatgtgagaacctcgaggcaccagcgctggcaaccaagcaaacttacgtgacctacacaaaccatgctatctag

SEQ ID NO: 118603 - DNA, 1776 bp, synthetic construct
  misc_feature 1..1776: note = Description of Artificial Sequence: Synthetic coding sequence
  source 1..1776: mol_type = other DNA
atgggtagcgacagctggggtagcaagattgcgccggtcctgcacctggaagaggtggcagaaggcgccgtgacaattctccccaagcgaatgtccgtgcgcggctttgaccgctacttctcgagcaggacactggataataatcgccgcaatatatggttcgccgaattttgggaagataattttcactgcaagctctctcggcatgccctgaagaaaggcagccacgtaaaaaagtgtactaaccgagaaagaatcggccaggactcggcctatgaacaggaaggaaaggtacagtttgtcattgatgccgtttatgcgatgggccacgctcttcacgcaatgcaccgagacttatgcccaggaagagtgggactctgcccaaggatggatcccgtcgacggtacgcagctgctaaaatatattcggaacgtgaatttctcaggtattgccggaaaccccgttacatttaacgagaacggcgatgcgcctggacgctacgatatttaccagtaccaacttcgcaatgatagtgctgaatataaggtcatcggaagttggaccgatcaccttcacctgcgaatagagcgcatgcactggccaggatccggtcaacagctacccaggagcatttgcagtctaccgtgtcagccaggggaaaggaagaagactgtgaaaggtatgccatgttgctggcactgtgaaccttgtacagggtatcaatatcaggttgaccggtacacctgcaaaacctgcccctatgacatgcgacctaccgaaaaccggacagggtgcaggcccatcccaatcatcaagctggaatgggggagcccttgggctgtcttgcccctgttcctggctgtcgttgggatagcggccaccctgttcgtggtaatcacgtttgttcgatacaatgatacaccaattgtgaaggcaagtggtcgggaactctcatacgtgctactggccgggattttcttatgctacgccaccaccttcctaatgattgctgagcctgacttgggcacttgctccctgaggagaattttcctcgggctcggaatgtccatttcatacgccgccttactcaccaaaacgaatcgcatctatcgaatatttgagcagggcaaaaggtccgtttctgctccccgctttatctctccagcaagccagctcgcaatcacctttagtcttatatccctgcagctgctgggcatctgcgtgtggttcgttgtggaccccagtcactccgttgtggattttcaggatcagcgcacattggaccctaggttcgctcggggggtgctgaagtgtgatatctccgatttgagcctgatatgtctgctcggatacagtatgcttctgatggtgacctgcactgtttacgccattaagacaaggggcgtgcccgaaacattcaacgaggccaagcccatcgggttcacaatgtatacgacctgtattgtctggcttgcatttattcctattttctttggaacgagtcagtccgcagataagttgtatatccagactactactctgaccgttagtgtttcgctcagcgctagtgtttcactcggtatgctttacatgccaaaggtttatattattctgttccacccagagcagaatgtacctaaaagaaagcgctccctcaaggcagtggtcaccgccgccaccatgtccaataagttcacccagaaaggcaattttagacccaatggcgaagccaaaagcgagttatgcgagaatcttgaagcacctgggagctcatag

SEQ ID NO: 118604 - DNA, 2364 bp, synthetic construct
  misc_feature 1..2364: note = Description of Artificial Sequence: Synthetic coding sequence
  source 1..2364: mol_type = other DNA
atggagcctgcgggtgaacgatttccagagcagaggcaagtgctgatcctgctgttgcttcttgaagtgacgctagcaggttgggagccacgccggtattccgtcatggaagagaccgagcggggctctttcgtggctaacctcgctaatgacctcgggctgggagtgggggaactggccgagcggggcgccagagttgtgagcgaggacaatgagcaaggcctccagctggatttgcagaccgggcagctgattttgaatgagaaactggatcgcgagaaactttgcggacctacagagccctgtattatgcactttcaggtcctgctcaagaaacctctggaagtatttagagcagagctgcttgtgactgatatcaacgaccactcccctgaatttcctgaacgggaaatgacgctcaagatccctgaaacgtcatccctgggcactgttttccctctgaaaaaggcccgggacctggacgttggcagtaataacgtgcagaattataacatttctccaaactcacactttcatgtatcaacccggacgagaggcgacggaagaaagtaccccgagttggttctggacaccgaattggatagagaggaacaggcggagctgcgactcactctgactgcagtggacggggggagtccacctcggtctggcacagtgcagatcctgattcttgtgctggacgctaacgacaacgctcccgagtttgtgcaggccctatatgaagttcaggtacccgaaaatagtcccgtgggctctttagttgtgaaagtgtccgcgagggacctggacaccgggacaaacggcgaaatttcgtactccctgtactatagcagccaagagattgacaagcctttcgaactgtctagcctgtctggcgaaatccgcctgattaaaaagttagatttcgagaccatgagctcctacgatctcgatatcgaggcatctgacggaggcggtctctccggtaagtgctctgttagcgtcaaggtgctggacgtaaacgacaattttcccgagctgtccatttcctctctaaccagtcccattcctgagaacagcccagagactgaagtggcgttattcaggatcagagaccgggacagcggtgaaaacggcaaaatgatttgctcaatccaagacgatgttccctttaagttgaaaccaagcgtagaaaacttttaccgcctggtgaccgagggcgcactggacagggagacccgcgccgagtacaatataactattactataactgatctaggaactccccgactcaaaaccgagcagagcattacagtcctggtttcggacgttaacgataatgcacctgcctttactcaaacttcttacacgctgtttgtgcgcgagaacaactctcctgctcttcacatcggcagcgtctcagccaccgaccgtgacagtggtacaaatgcgcaggtgacctattccttactgcccccgagggatcctcacctaccactgacctcactggtctccattaacacagataatgggcacctgttcgcgcttcagtcactcgattacgaagcccttcaggccttcgagttccgcgtgggcgcaacggaccgcgggtttccagccttgagttcagaggcacttgtccgcgtgctggtgctggacgccaatgataattcacctttcgtgttgtatccactacagaatgggagcgctccttgcacagaactagttcccagggctgctgagcctgggtatcttgtcacaaaggtcgttgcggtggatggggactccggccaaaacgcatggttaagttaccaactgctcaaagccacagagcctggtcttttcggagtgtgggcccacaatggcgaagtgcgcactgcccgcctactttctgaacgagacgtggcgaaacataggctggtcgtgctagtgaaagataatggcgagcctcctcgttctgcaacggcaaccctccaggtcttgcttgtcgatggattttcccagccgtacctgccactccctgaggctgccccagcccaggcccaagctgacagcctcacggtttatctcgtggtggcccttgcttctgtgagctcactgtttctgttctcagtgtttcttttcgtggcagtgcgactgtgtaggaggtctagagctgccagcgtcggcagatgcagcgtcccagaaggcccatttccgggccacctggtcgacgtctcaggcacaggtacattatcccagtcgtaccaatatgaagtgtgtctcaccggagggagcgaatctaatgatttcaagttcctgaagccgatctttccgaacatcgtgtctcaggacagccggcggaagagcgagttccttgaatag

SEQ ID NO: 118605 - DNA, 3276 bp, synthetic construct
  misc_feature 1..3276: note = Description of Artificial Sequence: Synthetic coding sequence
  source 1..3276: mol_type = other DNA
atgcagctggatggtcttcaagccctatgttggggcagcctttttaggacacagctcgtccctgtctacgtggccgtgctgccctccccccaaccctgcatacccccaacatgtaccgcgttcactgagttttctggcccactcgcaaagcaccactcctttcagccgtttcaagtggctgccccagcaggaccacgcagtccacctcagccattccatcttccgtctgtgagtcaggtgcatgccacccacttactgtgtcctgtgcgggtgctgggcccaccctaccccccttctctggagctgctcacctcaattcactcaccagcggtcctgccagctccacagatccctcagatctcctatgctagcacagctccagaactcagcgacagcactaggtacgactttttctcccgtgtagtgcctccggactcataccaggctcaggccatggttgacattgtcagggcgctgggctggaactatgtcagtacactggctagtgagggaaactacggtgaaagcggcgtggaggcctttgtgcaaatcagcagggaggctggggagctgggcgccccacggcaccagggggtttatatcgtgtgggcgcgcggcccacagctcggccagaagcaaaaagacgggggacctcggagcatgctaggaagaggttgccttgcaggcgcaccttgtggtagggacctgtttgtcctggatgattctgcactgccacaagcctggcgaagagtgcaggctagattacacccttgtcggcctttttcccagccaacccagtcaagcgctgcggtcgctcgctggagcataaagatcccgcgggaaccaaagcctggagaattcagcaaagttatacgcaggctcatggagactcctaatgcaagaggaattattatatttgcgaacgaggacgatatctcgcctgcaccaaccagaagagttctagaagcagcacgacaagctaacctgacgggccattttctgtgggttggatccgattcctggggtgctaagacaagtcccatacttagcttggaagatgttgctgtgggcgcgattaccattctccccaagcgggccagtatcgacggttttgatcagtattttatgactagatcactggaaaataacaggaggaatatttggtttgcagagttttgggaagagaactttaactgtaaactgacatcatccggaacccagtctgatgatagtacccgaaagtgcacaggagagagttgccccggctggactggagaggagaggattggaagagacagtacttatgaacaggagggcaaagttcagtttgtgatcgacgccgtttacgccattgcacatgccctgcacagcatgcaccaggcactgtgtcctggacataccgggctgtgtcctgcgatggagccgactgatggaagaatgctcctgcagtacatccgttgtcctctgcagtggttgaatcgtattcctctgtgtgaatggccgcgccgtgtacggcctttcttttgtcagtggacgctgggattattatctagctgtggatacgtaaacaatgctgccgtcaacgtggccgttcaggcctttctcgctacactcctctcgtctctgtcatcaatctatccgggagtcgaactcctgggtcacgtctttaatctcctgcgcaggctacacaccgtcttctgctcgggttgctcactgtttcctccaaccgtccacaaaggatctgctggtactccagtgatgttcaatgaaaatggagatgcccccggccgatacgacatattccagtaccaggctactaacgggtcagctagtagcggtggctaccaagccgtgggacagtgggccgaaacactcagacttgatgtgtctgtacaaaccgagccacaggtgggaatgggccccgggagtaggcgccagacaccccaacctgtgttctgcgctagccaggtcgaggcgttgcagtggtctggagatccacacgaggtaccgtcatctctgtgctctcttccctgtggaccaggagagcgaaaaaagatggtgaaaggggtcccttgttgttggcattgcgaagcctgcgatggataccgatttcaggtcgatgaatttacttgtgaggcctgtcctggcgacatgcgcccaaccccaaatcatacaggttgtcggccaactcccgttgtccgcttgtcatggtcatcaccctgggctgcccccccattgctgctggcggtgctggggatcgtcgccacaaccacggtcgtggcgacgttcgttagatacaacaatactccaattgtacgcgcgtctggccgggaattaagttatgtccttctgacaggcatttttctgatctatgcgatcacttttttgatggtagcagagcccggagctgccgtctgcgctgcgagacgtctgtttctgggcctgggtacgacactcagctactctgccctgttaacaaagactaacaggatttatagaatcttcgaacagggaaaacggtccgtcacaccgccccccttcattagccccacaagccagctggtgatcacattctctctgacctctctgcaaatcaatgctgttttccgagttactctgttttactttggctcccttcaatggcactatctgtcttccctgcaggctctgcccagtggcgatctctctgtgcagcacttgtccgccagcgtgagtctgggaatgctatatagtaagagtaaaacaccagtggatttagaagtcggcagcgagccatggggctatcttggggatggtgtcctgcaggccgaacattggggagagggacgcggcgattggccccacgttaaagtaatggtggtggtctaccaatccagcttggtttattatatgaagcaagctcaggcaggaagggtgaaaaccgaactgctgaaggtcgcccatcatcaggtcgccaaatcagtacccgaggaatcacagattgtggtcttgcacctcgttaccgctgggtatgttgacatggccattaggacaacccgcgcaagcttgcacctgatgccgctaaccttggtgcccggcgctgcagctgaggtcaacgagacccaagtggcagctcggctgggaccaggtagcacagttggaacttaccaggttgtcgttgtgctcatgcgtagcctgcagattgataagactacgaatcaattatccctcgaaacctgcttctccggcattcagggctttctggctagtgtgaattcactggtcatggataaatag

SEQ ID NO: 118606 - DNA, 2634 bp, synthetic construct
  misc_feature 1..2634: note = Description of Artificial Sequence: Synthetic coding sequence
  source 1..2634: mol_type = other DNA
atggccagaccccgtcgggcccgagaacccttactggtggcccttctgcccttggcatggctggcccaggccggcctggctagagccgccggaagtgtgcgcctagctgggggtctgactctgggcggcctgtttcccgttcatgcccggggagcagctggccgcgcatgcggccagctcaagaaagagcaaggcgttcatcggctggaggccatgctatacgccctggacagagtcaatgctgatcccgagctgctgccaggcgtgaggctgggggcgcggctactagatacctgttctcgcgatacatatgccttggaacaggccctgagcttcgtgcaggctctgattaggggccgaggagatggcgatgaagtaggtgtgcgatgccccggcggtgtccccccgcttcgcccggcaccaccagagcgtgttgtggccgttgtgggagcatctgcctcatctgtgtccataatggtcgccaacgttctaagactgtttgccatccctcaaatctcgtatgctagcactgctccagagctgagcgattccacacggtacgatttcttttcccgagtcgtccctcctgactcatatcaggcccaggccatggtcgatattgtgcgcgcccttggatggaattatgtaagtactctggcctcagagggcaattacggagaaagtggagtagaagcctttgttcagattagcagggaggcaggcggcgtgtgcattgctcagtctattaagatccctagggaacctaagcctggtgagttcagcaaagttatacgccggctcatggagacccctaatgctagaggcattattatcttcgcaaatgaagacgacattaggcgcgttctggaggcagcccgccaggctaacctgacagggcatttcctttgggtcgggtccgatagctggggggccaaaaccagccctatcctttccttagaggatgtggccgtcggagccattaccattttacccaaacgggcttctattgacggatttgaccagtacttcatgacccgtagtctcgagaacaacaggcggaatatttggtttgctgagttttgggaagagaatttcaactgcaagttaacctcttcaggtacacaatcagacgacagcaccaggaagtgtaccggggaggaacggatcggcagagacagtacttacgagcaggagggcaaggtacagtttgtgatagatgctgtatatgcaatcgctcacgctctacattctatgcatcaagccctgtgtcctggtcacacaggcctttgcccagcaatggagcccaccgacggacgcatgttgctgcagtatatcagagccgttcggttcaacggaagcgcagggacccccgtaatgttcaacgaaaatggtgacgctcctggccgttatgacatcttccaatatcaggccacaaacggctctgcttcgagcgggggatatcaggccgtgggccagtgggctgagaccttgcgcctggacgtggaggctcttcagtggtcaggagacccacacgaggtgccctcttcactctgctccctgccatgtggtcctggcgaaagaaagaaaatggtcaaaggtgttccatgttgctggcactgcgaggcgtgtgacggttatcgcttccaagtcgacgagttcacatgcgaagcttgcccaggagacatgcgaccgacccccaaccatacgggctgtaggccgacacccgtggtgaggctatcgtggtcgtccccttgggctgctcctcccctgctcctggctgttctgggcatcgttgctactacaactgtagtggctaccttcgttagatataacaacacaccaatcgtgagggcaagtggcagggagctatcgtatgtcctactaaccggtatcttcctgatttacgccatcacctttttgatggtcgccgagcccggagccgcagtgtgtgcagctcgcaggttatttctgggtctggggacaacactctcttacagcgccttactgacaaagactaacagaatctaccggatctttgagcagggcaagcgatcagtcactccgcctcctttcatatctccaacgtctcagttggtgatcacattttcgctgactagcctccaagtcgtaggcatgattgcctggctgggggcaaggcctccacactccgtcatagactacgaggaacagagaacagttgacccggaacaggctagaggggtgcttaaatgcgacatgagcgacctgagcctaattggctgtctggggtactctctcttgctaatggtgacttgcacggtctacgctatcaaggcgcgcggcgtccccgaaactttcaacgaagccaaacccattgggttcaccatgtacacaacgtgcattatctggctggccttcgtccctatcttttttgggacagcccaatctgcggagaagatttatatccagacaacaactttgactgtgagtctctcattgtcagcttccgtctcactgggaatgctgtacgtgccaaagacatacgtcattctgttccaccctgagcagaatgtgcagaaacgaaaaagatcccttaaggccacatcgactgtggctgccccacccaagggagaagacgccgaagcccataaatag

SEQ ID NO: 118607 - DNA, 2748 bp, synthetic construct
  misc_feature 1..2748: note = Description of Artificial Sequence: Synthetic coding sequence
  source 1..2748: mol_type = other DNA
atggtgcagcttagaaagctgctgagagtcctgaccctaatgaagtttccatgttgtgtcttggaagtgctgctttgtgcactggcagcagcggcccgcggccaggagatgtacgccccccactccattaggattgagggtgacgtgaccctcggaggcctctttcctgtccacgccaagggccccagcggggtaccgtgtggtgacatcaagcgcgagaacgggattcacagacttgaggctatgttatacgccctggaccagattaattcggacccaaatctgctccccaacgtgaccttaggtgcgcgcattctggacacgtgcagcagggatacgtatgcgttagaacagagcctcacatttgtgcaggctctgatacagaaagataccagtgatgttcggtgtaccaacggcgagccgccagttttcgtgaagccagaaaaagttgtaggagtcataggggcctccgggtccagcgtctctatcatggttgctaatatcctgagactgttccagatcccccaaatcagctatgcttctaccgcacctgagctttcagatgaccgcagatatgacttctttagccgcgtcgtcccacctgattccttccaggcacaggccatggttgacattgtgaaggccctggggtggaactacgtttccactttggcctcggaggggagctacggcgaaaagggcgtcgagtcattcacccagatctctaaagaggccggaggactctgtatcgctcagagcgttaggatccctcaagagcggaaggacaggacaatcgacttcgaccggatcatcaagcagctacttgacacacctaatagcagagccgttgtgattttcgctaacgatgaggatattaaacagattctggctgcagctaagcgggccgatcaggtcgggcacttcctgtgggttggaagcgactcttggggatccaagatcaacccattgcaccaacatgaggacatcgctgagggcgcaattaccatccagcccaaaagagctactgtggaaggcttcgatgcgtattttacatctaggaccctcgagaacaaccgccgaaacgtctggttcgcagaatattgggaggaaaattttaattgcaaactgaccatctcagggagtaagaaggaggatacagataggaagtgcaccgggcaggagcgcatcggaaaagattccaattatgagcaggagggtaaagttcagtttgtaatcgatgccgtgtatgccatggcgcatgctctgcatcacatgaataaggatttgtgtgcggattacagaggcgtctgtcccgagatggaacaggctggggggaagaagttactgaaatacatccgcaatgtgaatttcaacggctcagcgggaacccccgtcatgttcaataaaaacggtgatgcccccggccggtacgatatcttccagtatcagacaacaaatacatcgaatccaggctatcggctgatcggccagtggactgacgagctgcagctgaacatcgaagacatgcagtgggggaagggcgttagggaaatccctgctagcgtttgtacgctgccatgtaaaccaggacagcggaagaagacgcagaaaggcacaccatgttgctggacttgtgaaccgtgcgatgggtaccagtaccagtttgatgaaatgacatgccagcactgcccatatgatcagcgcccaaatgagaatcgaactggttgccaggatattcctataattaagctggagtggcactccccctgggccgttatcccagttttccttgctatgcttggcatcattgccacaatcttcgtaatggcgacttttatccgctacaatgatacacctatagttagagcatcaggcagggaactgtcttacgttctgctgactgggatcttcctatgctatatcatcacattcttgatgatagcgaaacccgacgtcgctgtgtgctcttttcgacgtgtgttcttagggctgggcatgtgcatctcctatgctgcactgttgaccaaaacaaatcgcatatatcggatctttgaacagggcaaaaagtctgtcaccgccccacggctaattagccctacgtcacagctggctatcactagcagcctgatatccgtgcagctcctgggcgtatttatttggttcggcgtggatccccccaatataatcatcgattatgatgaacataaaaccatgaaccctgagcaggcccgcggggtgctcaagtgtgatattactgacctgcagattatctgttcacttggctactctattttgctgatggttacttgtaccgtgtatgccataaagacgcggggagtaccagagaactttaatgaggccaagcctatcgggttcacgatgtacactacttgtatcgtgtggctggcttttatccctattttttttggcaccgcccaatcagctgagaaactttacattcagaccacaaccttaacgatcagcatgaatctctctgctagtgtggctctggggatgctgtacatgccaaaggtttacattatcattttccatccggaactcaacgtacagaaacgcaagcgaagcttcaaggccgtggtgaccgctgcgacaatgtccagcagactcagccataagccctctgacagacccaacggcgaggcaaagacggagttatgtgagaacgtggaccccaacagccccgccgccaaaaagaaatacgtgagctataataacctggtgatatag

SEQ ID NO: 118608 - DNA, 2721 bp, synthetic construct
  misc_feature 1..2721: note = Description of Artificial Sequence: Synthetic coding sequence
  source 1..2721: mol_type = other DNA
atggtgcaactgcgaaaacttttgagggtacttacgctgatgaagttcccttgttgcgtgctggaggtgctgctgtgtgcacttgctgctgcagctcgggggcaggaaatgtacgcccctcatagcattcgaattgagggcgacgtcaccctcggcggcctgtttccagttcacgctaagggcccaagtggagtcccctgcggagacataaagagagaaaatggtatccacagattagaagcaatgctatatgcactcgaccagatcaactcggacccgaacctgttaccgaatgtgacactgggagctagaatcctagatacttgctctcgcgacacttacgccttggagcaatccctgaccttcgtccaggctctgatccagaaggacacatctgatgtgcggtgcaccaacggcgagccaccagtctttgtaaaacccgaaaaagtggtgggagtaataggcgccagcgggagttctgtctccataatggttgccaacatcctccgacttttccagattcctcagatatcttatgccagcacagctccagaactgagcgatgatagacgatacgacttcttttcaagggttgtgccgcccgattcctttcaggcccaggcgatggttgacattgtgaaagctctgggttggaactatgtatctactctggcttctgaaggtagctacggggaaaagggtgtggaaagcttcacacagatttcgaaagaggctggaggcctgtgcattgcacagtctgtacgaataccacaggagagaaaggaccggaccatagacttcgatcggattataaagcagttgctggacaccccaaacagccgagccgtggtcatattcgccaatgatgaggatatcaagcaaatcctggccgcggccaaacgcgccgaccaggtaggtcattttctttgggttgggagtgactcttggggcagcaaaatcaaccctcttcatcagcacgaagacattgcagaaggtgctataaccatccagccaaagagagcgactgtagagggttttgacgcctacttcacatcaaggacactggaaaacaataggcgcaatgtatggttcgctgagtactgggaagaaaattttaattgtaaactaaccatcagcgggagtaagaaggaagataccgataggaaatgcactggacaagagaggattgggaaagattctaactacgaacaagaaggaaaggtgcagttcgtgattgacgctgtatatgcaatggcacatgccttgcatcatatgaataaggacctgtgcgccgattaccgaggagtctgtcccgagatggagcaggcaggcgggaagaagttgctgaagtatattaggaacgtgaacttcaatggaagtgctggcacccctgtgatgttcaacaaaaatggagatgcgccagggcgatacgacatttttcagtaccagactaccaatacatccaacccagggtataggctcataggacagtggaccgatgagctgcagcttaatattgaggatatgcagtggggaaaaggcgtgcgtgaaataccagcctcagtctgtactctcccctgcaaaccgggccagcgcaagaaaacgcaaaaggggacgccttgttgttggacttgtgagccctgtgatgggtaccagtaccagttcgacgaaatgacatgtcagcactgcccatacgaccaacggcccaatgagaatcgaactggctgccaagacatccccattatcaagctggagtggcattcgccctgggcagttatacccgtttttcttgcgatgctcggtatcatcgccacaatctttgtgatggccactttcattcggtataacgatacccccatcgtgcgcgccagcggtcgggaactgtcttacgtgctgttaactggaatatttctatgttatatcattacttttctaatgatcgcaaaaccagatgttgcagtatgttcgttcagacgagtctttctgggcctcggaatgtgcatttcgtatgccgcgttgctgaccaagactaataggatctacaggatattcgagcaaggtaaaaagtccgtgacggctccccgcctgatcagcccaacatctcagctcgctattacgtcaagtctcatctcagtgcagctcctgggcgtgtttatatggttcggcgtagacccaccgaacatcattatcgattacgacgaacacaaaaccatgaaccctgagcaggcaagaggagttctgaaatgcgatatcacagatctccagatcatctgctcactgggatattcaattctgttgatggtcacatgtacagtctacgcaattaaaacgcggggagtccctgaaaactttaatgaggccaaacctatcggctttactatgtatactacatgtatcgtgtggctggctttcatacctatattttttggcactgctcagtccgccgagaagctctacatacagaccacaactctgacaataagcatgaatctttctgcatctgttgccttgggaatgctttatatgccaaaagtgtacatcatcatattccacccagagctgaacgtacagaaaaggaagaggtctttcaaagccgtggtgaccgccgccactatgagttcacgcctgagtcataagccgtctgatagacccaatggagaagccaaaactgagctctgcgagaacgttgacccaaacagcgagaagtgtaactgctattag

SEQ ID NO: 118609 - DNA, 2769 bp, synthetic construct
  misc_feature 1..2769: note = Description of Artificial Sequence: Synthetic coding sequence
  source 1..2769: mol_type = other DNA
atggtccagttgcgcaaattgctgcgcgtgctgaccctgatgaagtttccatgctgcgttctggaagtattactctgcgccctggcagccgcagcccgaggccaggaaatgtacgcccctcactcaatcagaatcgaaggagacgtcaccctagggggcctctttcctgtgcacgccaaaggaccatccggcgtgccctgtggggatatcaagcgggagaatggaatacatcggctggaggctatgctctacgccctggaccagattaatagcgatcccaacctgctgcccaatgtgacactaggcgctcgtatcctggatacctgcagtcgtgacacctacgctttggagcagtcgctgacctttgttcaggcactcattcagaaggacacctctgatgtgaggtgcactaacggagagccaccggtgtttgtgaagcccgaaaaggtcgtgggggtgataggcgcatccggatcttccgtctccatcatggttgcaaatattctaagactctttcaaatcccacagataagctacgcctctacggccccggaattgtcagatgatcgcagatatgattttttctccagagtcgtgcctcccgattcatttcaggcccaagccatggttgatattgtgaaggctctggggtggaattacgtatctacactcgcatccgaaggcagctatggagagaaaggagtggagtcctttacacagattagcaaagaggccggtggactttgtatcgcccagagtgtccgaatccctcaggaacggaaggaccgcactatcgacttcgaccgtataatcaaacagctgctggatactccaaactctagagcagtggtcattttcgccaacgacgaagacatcaagcaaattttggctgcggccaaacgagcggatcaggtggggcactttttatgggtcgggagcgattcttggggctccaagatcaaccctttacatcagcatgaggatatcgcagagggagcgattaccatacagccaaagcgcgccaccgtcgagggattcgacgcatacttcacctctcgaacactcgagaacaacaggcgcaacgtgtggttcgccgaatactgggaggaaaattttaattgtaagttaaccatttctggatcaaagaaggaggacaccgatagaaagtgtacgggacaagagagaatcggcaaggatagtaattacgaacaggaaggcaaggtgcaatttgtgatcgatgctgtgtatgccatggcacatgcacttcaccatatgaacaaggacttatgcgccgattaccgcggcgtgtgtcctgagatggagcaggccggagggaaaaaactcttaaagtatattagaaacgtcaattttaacggtagtgccggcaccccggtgatgttcaataagaatggagacgcacccgggaggtacgacattttccagtatcagactactaatacctccaaccccggctaccggctgataggacagtggaccgacgaactgcagctaaacattgaggatatgcagtgggggaaaggggtaagggaaattccagccagcgtgtgcaccctgccctgtaagcccggtcagagaaagaagacccagaaagggacaccttgttgctggacctgtgagccatgcgacgggtatcagtaccagtttgatgaaatgacctgtcagcactgcccgtacgaccagcgccctaatgaaaaccgcacgggatgccaggatatccctatcatcaaactggaatggcactctccctgggccgtaatccccgtctttctcgctatgctcggcattattgccactattttcgttatggctaccttcattagatataacgacaccccaatcgtaagagctagcggccgcgagctatcatacgtgctcttgactgggatcttcctttgttacatcattactttcctgatgatcgccaagccagatgtagcagtctgctcttttaggagggtgttcctgggcctgggtatgtgtatatcctacgcagccctgttgactaagaccaacaggatctacagaatctttgaacaggggaaaaaatcagtgaccgctcctagactcatctccccaactagccaattggctatcacctccagtttgatcagtgtccagctgctaggagtttttatttggtttggggttgatccacctaatattatcatcgattacgacgaacacaagacaatgaatcccgagcaggctcggggagtgctgaagtgcgacattaccgatctgcagatcatctgcagcctggggtattccatcctactgatggtgacttgtaccgtatacgcgattaagacccggggtgttcctgagaactttaatgaagcaaagccgattggatttaccatgtataccacatgcatcgtgtggctggctttcattcccatattttttgggacagcccagagtgcggagaagctatatatccagaccactacgttgacaattagtatgaatctgtcggcctccgtggccctgggcatgctgtacatgccaaaggtctacatcattatatttcatccggagctgaacgttcagaaaagaaaaagatccttcaaggcagtagtcacagccgcgacaatgagctccaggctgagccataagccttcagaccgccccaatggcgaagccaagactgaattgtgtgaaaacgtggatcctaacaactgcataccgcctgttcgcaagtcggtgcaaaaaagtgtgacatggtataccattcccccaacagtgtag

SEQ ID NO: 118610 - DNA, 2736 bp, synthetic construct
  misc_feature 1..2736: note = Description of Artificial Sequence: Synthetic coding sequence
  source 1..2736: mol_type = other DNA
atggtacagctccgcaaactcctccgcgtgctgacactgatgaaatttccgtgttgcgtgttagaggtgctgctgtgcgcactggcagccgctgcccggggacaagagatgtatgccccgcattctatccgcatagagggggatgtgacacttggcgggttgttcccagtccacgcaaagggcccctccggcgtgccatgcggggacattaaaagggaaaacggtatacaccggctggaggcaatgctctatgcgctggatcagataaatagcgatcctaacctgctgccaaatgttactctcggcgctcgcattctcgatacatgttcacgtgacacttatgctctggagcaaagcttaactttcgttcaagccctgattcagaaggatacctcagacgtgaggtgcactaatggagaaccccctgtgttcgtgaaaccagagaaagttgtgggcgtaatcggtgcctccggatcgagcgtgtccattatggtggccaatatcctccggctatttcaaatccctcaaattagttatgccagcactgctccagagttgagtgatgaccgacggtatgacttcttcagcagagtagttcccccagattcatttcaggcacaagctatggtggatattgttaaggcccttggctggaactacgtctccaccctggcatccgagggatcctacggtgagaagggagtggagagctttacccagatcagcaaggaagcaggcgggctctgcatcgcgcagtccgttcggataccgcaagagcgtaaggaccgcacaatcgattttgacaggattatcaaacaactgctggatactcccaattcacgcgctgtggtaatctttgcaaatgacgaagatatcaaacagatacttgccgctgcgaagagagcagaccaggtcggacactttctgtgggttgggtccgatagctggggctccaagatcaatccacttcaccagcacgaggatatcgcagagggcgccattaccatacagccaaaaagagctaccgttgaggggttcgatgcctacttcacaagtcggacgctggagaataatcgtcgtaatgtgtggtttgctgagtactgggaggaaaacttcaactgtaaactgactattagcggctcaaaaaaggaagacactgataggaagtgtacggggcaggagcgtatcggcaaggactcaaattacgaacaggaaggcaaggtccagttcgttattgacgccgtttacgctatggctcacgcactgcaccatatgaataaagacttgtgtgcggattatcgaggtgtgtgcccagaaatggagcaggccggagggaagaaacttctgaagtatatccgcaatgtgaatttcaatggctccgccggcactcccgtgatgttcaataaaaacggggacgccccggggaggtatgacatctttcagtaccagaccacgaatacctctaatcccggttatcgcctcattggccaatggaccgacgagctccaactaaacatcgaggacatgcagtggggcaaaggcgtacgtgagattcccgcttcagtgtgtaccttgccttgtaaaccagggcaaagaaagaagactcagaaaggcaccccttgctgttggacttgcgagccgtgcgacggttaccagtatcaattcgatgaaatgacctgccagcactgtccttatgaccaacgccctaacgagaatagaacgggttgccaggacatcccgattataaagctagaatggcactcaccatgggcggtgatcccagtttttcttgctatgctgggaataatcgcgactattttcgtgatggccacgtttatccgatataatgatactccaatagtacgcgcctccggaagagagctgtcctatgtgctcttgactggcatctttctctgttatataatcacatttttgatgattgcaaagccagatgtggcggtgtgctctttcagacgggttttcctgggattgggaatgtgcattagttacgccgccctgctgacaaaaactaaccggatttatagaatttttgagcagggcaagaagtctgttactgctccaaggttgattagtcctacatcccaactagccatcacctcgagtctgatctccgtccaactcctgggggtttttatctggttcggtgtggatccacctaatataattattgactatgacgagcacaagacgatgaaccccgaacaggccagaggggtcctcaagtgtgacatcacggatctgcaaataatctgcagtctgggctacagcatcctgttgatggttacatgcaccgtatatgcgatcaaaacgcggggagtgccggagaacttcaatgaggctaagccgatcggtttcacgatgtacacaacctgtattgtctggctcgcctttatccctatcttcttcgggaccgcccagtccgccgaaaaactttacatccagactaccaccctcacaattagcatgaatctatctgcctctgttgcgctcggaatgctgtacatgcccaaggtatacatcatcatcttccatccggaacttaacgtccagaagagaaagcgctcctttaaggcagttgtgacagccgccaccatgtctagcagactgagtcacaagccatccgaccgcccaaacggagaggcaaaaacagagctgtgcgaaaacgtggaccctaacatcacctccgaagacctctccctgcataaggaggactag

SEQ ID NO: 118611 - DNA, 2475 bp, synthetic construct
  misc_feature 1..2475: note = Description of Artificial Sequence: Synthetic coding sequence
  source 1..2475: mol_type = other DNA
atggtgcaactcaggaagttgctgcgcgtcttaactctcatgaagttcccatgctgcgtgctcgaggttctgctctgcgctctggcagcggcggcgcggggacaggagatgtacgctccccactctataaggatagagggcgacgtgacacttggtgggttgtttccagtacacgccaagggaccaagcggggttccttgtggcgatattaaacgcgagaacggaattcaccgactggaggcgatgctgtatgctttagaccagataaactcagatcccaacttgctaccaaatgtgacgcttggcgcgagaattctagacacatgttcaagggacacctacgctttggaacagtctttgacgtttgtgcaggccttaatacaaaaggacacctcggacgttaggtgcacaaacggagaacctcctgtgttcgtgaaacccgaaaaggtcgtgggtgtgatcggcgcctctggatcctccgtatccataatggtcgccaacatcctcagactcttccagatacctcaaatctcctatgccagtactgcgcccgaattgagtgacgacaggagatatgactttttctcacgggtggtcccccctgactcctttcaggctcaggccatggtggatatcgtgaaggcactaggctggaattatgtctcaaccctggcttctgagggctcttacggagagaagggggtggagtccttcacccagatctctaaggaggccggaggactttgcatagcccagagcgtgcgtatcccccaggagcgcaaggatcgcacaattgatttcgatcgcattataaagcagttgcttgacacgcccaacagcagggcagttgttattttcgcaaatgacgaggatattaaacagatactggctgccgcgaaacgcgctgatcaggtcgggcattttctatgggtcggaagcgattcttgggggagcaaaatcaatcccctgcatcagcacgaagacatcgccgagggtgctataaccattcagccgaaacgagccaccgtagaaggcttcgacgcatactttacatctcggaccctggaaaacaatagacgcaatgtttggttcgccgaatattgggaggagaatttcaattgtaagttaactatttcaggctccaaaaaagaagatacggaccggaaatgtacgggccaggagaggattggcaaagactcgaattatgagcaggaaggtaaagtgcaatttgtcattgatgcagtttatgccatggcacacgctctgcaccacatgaacaaagacctgtgcgccgactatcgcggcgtgtgccccgagatggagcaagcgggcggcaagaagcttctgaagtatatcagaaatgtgaacttcaatggcgatgcgggcaccccagtaatgttcaacaagaacggtgatgctcccgggagatatgatatttttcagtatcagaccacaaatacctccaacccaggttataggcttattggtcaatggactgacgagctccagctaaacattgaggacatgcagtggggtaaaggggtccgagagattcctgccagtgtctgtacactcccatgtaagcctggccaaagaaagaaaactcagaagggcacgccatgctgttggacctgcgaaccctgcgacgggtatcagtaccaattcgacgaaatgacatgccagcattgtccgtacgatcagaggcccaacgagaaccgcaccggctgccaagatattccaattatcaagctcgaatggcatagcccctgggccgttatcccagtgtttctcgctatgctcgggataattgccaccatcttcgtaatggctacatttatcagatacaacgatacacctatcgtacgggcatcaggcagggaactttcatatgtgctcctgacaggaatcttcctctgttacattattaccttcctgatgattgccaaacccgacgtggctgtgtgctccttcagaagggtgttcctcgggctgggtatgtgcattagttacgccgcgctcctcaccaagaccaataggatttataggatcttcgagcagggaaagaaaagtgtgacagccccccggctgatctctcccacatctcagctggccatcacatcctccctaattagtgtacaactactaggggtgttcatctggttcggggtcgatccccccaacatcatcattgattatgatgagcacaaaacaatgaatccggaacaagccaggggggttctgaagtgcgacataaccgaccttcagataatctgctcactgggatatagcatcttacttatggtaacttgcacagtgtacgcaatcaagaccaggggggtacccgagaatttcaacgaagctaaacccatcggattcaccatgtacacaacttgtatcgtctggttggcctttatccctatcttctttggaaccgcccagagcgcagaaaaggttatactgtgttgtatttcctag

SEQ ID NO: 118612 - DNA, 2775 bp, synthetic construct
  misc_feature 1..2775: note = Description of Artificial Sequence: Synthetic coding sequence
  source 1..2775: mol_type = other DNA
atggtacagctgaggaagctgctcagggtgctaactttgatgaagtttccctgttgtgtccttgaggtgctgctctgcgccttagccgcagcggcccgaggccaggaaatgtacgcaccccatagtatccgcatcgagggcgatgtgactctcggaggcctctttccggtacacgccaagggccctagcggggtaccctgcggggacataaagcgggaaaacggcatccaccgattggaggccatgttgtatgcgttggaccaaatcaatagtgatccgaatctgttacctaacgttacgctgggcgcccgaatcctggacacctgtagtagggacacatatgccctcgaacagtctctgaccttcgtccaggccctgatccagaaagacacctctgatgttcgatgcactaatggggaacctcccgtgttcgttaagcctgaaaaggtcgtcggcgtgataggcgcctctggctctagtgtctccattatggtcgccaatatcctccggctcttccagattccccagatcagttatgcatcaaccgcacccgagttaagcgacgatagacgctacgactttttctccagagtggtcccgccagactcgtttcaagcccaagcaatggtcgacatagtcaaagcactcggctggaactacgtgtccactctcgcttcggaggggtcctacggtgagaaaggcgttgagagcttcacccagatatccaaagaagctggaggactgtgcatcgcccagagcgtacggattccacaggaacggaaggatcgcactattgatttcgatcgcatcataaagcagctactggatacaccaaattcccgagctgttgtcattttcgccaacgatgaagatatcaaacagattctggcagctgcaaagcgtgctgatcaagttgggcactttctgtgggtgggtagtgactcctgggggagcaaaatcaatcctttgcatcagcacgaagacattgctgagggcgccatcaccatccagcccaagagggctaccgtggagggttttgacgcctattttacatctcgcactttggaaaataaccggagaaatgtctggttcgccgaatattgggaggagaattttaattgcaagttaacaatctccgggagtaaaaaggaagacaccgaccggaagtgcacggggcaagaacggattggcaaggattctaattatgagcaggaagggaaggtacagttcgtcatcgacgccgtatacgctatggcacacgctctccaccacatgaataaggacctctgtgctgattacaggggggtgtgtcccgaaatggagcaggcaggcggaaagaagctgttgaagtacatacgaaatgtcaatttcaacggcagcgcaggcacccctgttatgttcaacaagaacggcgacgcccccggtaggtatgacattttccagtatcagacaaccaacactagcaatcccggctaccgcttgatcgggcagtggactgatgagttgcaactaaacatcgaagatatgcagtggggtaagggcgtacgtgagatccccgctagcgtgtgcacactgccatgcaagcccggccagcggaaaaaaactcaaaaaggcacaccctgttgttggacctgtgaaccgtgtgatggataccaatatcagtttgatgaaatgacctgtcagcactgcccatatgatcagcggccaaacgagaaccggacaggctgtcaggacatcccaattattaagctcgagtggcacagcccctgggccgtgatacctgtattcctcgccatgttaggaatcatcgccaccatcttcgtgatggcaacattcatcagatacaatgatactcccattgtgcgcgcatccgggcgggagttatcttatgtactgctcacaggtatcttcctatgctacatcattacttttctcatgatcgctaaaccggacgtggccgtttgcagctttaggagagtgtttctgggcctagggatgtgtatttcttacgccgcgcttctgacaaagaccaaccgaatttatcggatcttcgagcagggaaagaagagcgttactgctccacgtctaattagcccgacctcccaactggctattaccagctcacttatttccgtgcagttactcggggtgttcatttggtttggcgtggacccacccaacattattatagactacgacgaacataagaccatgaaccccgagcaggctagaggggtgctcaagtgcgatattacagacctgcagattatatgttcactgggttattcaatcctccttatggtcacctgtacagtgtatgctatcaagacccgcggcgtgcctgagaatttcaacgaagcaaagcctattggctttacaatgtatacaacttgcatcgtgtggcttgcttttatcccgatcttcttcggaaccgcccagtccgcagaaaaattgtacatacagactacaacactgacgatttctatgaacctcagcgcatccgtggctctggggatgctctatatgccgaaagtctatattatcatatttcacccagaactgaacgtgcagaaacgaaagaggtcctttaaagcggttgtgaccgcagccaccatgagtagccggctgagccataaaccatcggataggcccaatggcgaagcaaagaccgaactctgcgagaatgtggatccaaatatctttttctttggatgtaccgtcgagttgggcctccacttcaagctcacattctccaggaaccagtccaatttatag

SEQ ID NO: 118613 - DNA, 2727 bp, synthetic construct
  misc_feature 1..2727: note = Description of Artificial Sequence: Synthetic coding sequence
  source 1..2727: mol_type = other DNA
atggtttgcgaagggaagcggagcgcaagttgtccatgtttctttctcttaactgctaaattctactggatcttgaccatgatgcagcgcacgcactcacaggaatatgcccactctatccgcgttgatggagatatcatactgggcggcttgttcccagttcacgccaagggtgaacggggcgtaccttgcggggaactgaaaaaggagaaggggattcacaggctagaggcaatgctgtacgccattgaccagattaataaggatccagacctgctgagcaatataaccctcggcgtgcggatccttgatacttgctcccgggacacctatgcccttgaacagtccctgactttcgttcaggctctcattgagaaagacgcttccgacgtgaagtgtgcaaacggtgacccacccatctttacgaagcccgacaagattagcggagttatcggcgctgctgcaagctcagtgagcataatggttgcgaatatcctcagactcttcaaaatcccccagattagctacgccagcactgctcctgaactgtctgataatacgcgctacgatttcttctcacgggtcgtgccgcctgactcgtatcaggcccaggccatggtggatatcgttaccgcgctaggctggaactacgtatccacattggcctccgagggcaattatggtgaaagcggtgtggaggcctttactcagattagtcgggagatcggaggggtgtgcatcgcccagtcccagaaaattccgcgcgagccgcgtccaggagagttcgaaaagatcatcaagcggttgctggagactcctaatgctagggccgttatcatgtttgctaatgaggacgatattaggagaattctagaggcagctaagaagctgaaccagagtggacattttctttggattggctccgattcctggggatccaaaatagcacccgtttaccaacaggaggaaatcgccgagggcgctgtcacaattctcccaaagcgcgcctcaatcgatggctttgaccgatatttccgttcacggactttagcaaataatcggcgcaatgtatggttcgccgaattctgggaggagaattttgggtgtaaactggggtcccatggcaaacggaattcccacataaaaaagtgcacgggattggagcggatcgcccgggactcctcatacgagcaagaggggaaggtacagtttgttattgatgcagtgtacagtatggcatatgcgctgcacaatatgcataaagatctatgcccaggctatatcggtttgtgccctagaatgtcaactatcgacgggaaggaattgctgggttacattcgggccgtgaatttcaatggatcggctgggactccagttaccttcaatgagaatggggatgcccccggcagatacgacattttccagtatcagatcacaaacaaatcaaccgaatataaagtgatcggacattggaccaatcaacttcacctcaaagtggaggatatgcaatgggctcatcgggagcacactcatcctgcctccgtgtgttctctgccttgtaagccgggagagcgcaagaaaacggtgaaaggagtcccatgttgttggcattgcgagcgctgcgaaggatacaactatcaggtggatgaattgagttgcgagttatgtccactcgaccagagacctaacatgaatcggaccggctgtcagctgatccccatcataaaactcgagtggcacagtccatgggccgtagttcctgtttttgtcgcaatcctgggcattatagctactacctttgtgattgtcacttttgtaagatataatgacacacctatagtcagggcttctgggcgcgagctttcgtacgtgctcctaactggtatcttcctctgctattcaatcacattcctgatgatcgctgccccagacacaataatatgtagctttcgccgagtgttcctcggtctgggtatgtgcttctcatatgctgcactccttactaaaactaaccggatccaccgtattttcgaacagggaaagaaaagtgtaacagctcccaaattcatcagccctgcttctcagctagtaataacgttttctctgattagcgtgcagctgctgggagtatttgtttggttcgtggttgatcctcctcacattataatcgactacggtgagcagcgtacgctggatcccgaaaaagcccggggcgttctgaaatgcgatataagcgacctgagcttaatatgttctttagggtactcaatcttgctgatggtgacctgcactgtctatgcgattaaaaccaggggcgttcctgagacctttaatgaagcaaagccgataggttttacaatgtacacaacgtgcatcatctggctcgcattcatccctatcttttttggcaccgcacaatccgccgagaagatgtatattcaaactacaaccctgaccgtatctatgtctctcagcgctagcgttagtctagggatgctgtacatgcctaaggtctacatcatcattttccatccagaacaaaacgttcagaagaggaagcgcagttttaaagcagtggtcacagccgctactatgcaatctaaactgatccagaagggcaatgaccgtcctaatggggaggttaagagcgagctctgtgagagtcttgagactaacaccagctcaaccaaaacgacctacatttcttacagcaatcactctatatag

SEQ ID NO: 118614 - DNA, 2727 bp, synthetic construct
  misc_feature 1..2727: note = Description of Artificial Sequence: Synthetic coding sequence
  source 1..2727: mol_type = other DNA
atggtgtgcgagggaaagcgctcagcatcttgtccttgctttttcctgctgaccgccaaattctattggatcctgactatgatgcagcggacccatagccaggaatacgcacactccatccgggttgacggggatattatcctgggggggctgtttccagttcacgcaaaaggggagcgaggtgtaccttgtggtgaattgaagaaggagaagggtattcatcggctcgaggctatgctgtacgcgatcgatcaaatcaataaggatcccgatttgctttccaatattactctaggagtgcgcatcctagacacctgttctcgggacacctatgcgctggaacaaagtctgactttcgtacaggcactcatcgaaaaggacgcttctgatgtgaagtgcgctaacggggatccacccatctttacaaagcctgataaaatatcgggggtgatcggggccgcagcttcatcagtgtccatcatggtggccaatatacttcggctgtttaaaatcccacagatttcctacgcctccaccgcccccgaactaagcgacaacacacgctatgattttttcagcagggtggtgcctcctgactcctaccaggcccaggcaatggtggatatagtaaccgctctcggctggaactatgtgtctacactggcctctgaggggaattatggcgagtcaggggtcgaggcttttacccagatttctcgggaaatcggaggggtgtgtattgcccaaagccagaagatccctagggagcccagacccggcgaattcgagaaaatcatcaagcgactgttagaaactccaaacgcgcgcgctgtgatcatgtttgccaatgaggatgacatacgaagaattttagaagccgcaaaaaaactcaatcagagcggacacttcctgtggatcggctcagactcatggggaagcaaaatagcacccgtgtatcagcaggaggagatcgccgagggagcagtcactatattgcccaagcgggcttccatcgacggttttgataggtacttccggagtcgcacactcgcaaataacaggagaaatgtttggtttgccgaattttgggaagagaatttcggctgcaagttagggagccacggaaagaggaacagccatattaagaagtgcactggcctagagaggattgctagggacagtagctatgaacaagaaggcaaggtgcagttcgttattgatgcggtctattctatggcttatgccttacataatatgcacaaggacctatgtccaggctatatcggcctgtgtccaagaatgtcgaccatagatggaaaagagcttctaggctacataagggcggtcaattttaacggatctgccggcaccccagtcacttttaatgagaacggcgatgcccccggcaggtatgacatttttcagtatcaaatcaccaataagtccaccgagtacaaagtaatcggacactggaccaatcagctgcacctgaaagtggaggatatgcagtgggcacacagggaacacacacaccctgcatccgtgtgttcactgccatgcaagcccggtgagcgcaagaagactgtcaaaggggtgccctgttgttggcattgtgaacgatgcgaggggtataattatcaggtggatgagctgagttgcgagctctgcccgctcgatcagagacctaacatgaataggactgggtgccaacttatacccataattaaactggagtggcattcaccatgggctgtggtgcccgtcttcgtggctattctgggtattatcgcgacaacatttgtgatagtgacatttgtgcggtacaacgatacacctatagtcagggctagcggcagggagctgtcatatgtcctgctgacaggcattttcctatgctattctattacctttctgatgatagctgcacccgataccattatctgctccttccgccgtgttttcctcggccttgggatgtgcttttcctatgcagctctgttgaccaagacgaataggatccacagaatcttcgaacagggcaagaaatcagttaccgctcccaagtttatcagccctgcttctcagctggttatcaccttctctctgatctccgtgcaactgctgggcgttttcgtatggtttgtcgtggatccaccccacattattatcgactacggcgagcagcgaacgctcgatcctgagaaagctcggggggtcttaaagtgtgacatttccgatctttctctgatttgttcgctcggctacagtatacttctaatggtcacctgtactgtatacgccataaagactcggggcgtcccagagactttcaacgaggcaaagcccatcggctttactatgtacactacgtgcatcatctggctcgccttcattcctatctttttcggtaccgctcagagcgccgaaaagatgtatatccagactacaactctcacagttagtatgtccctttctgcatccgtttcactcggtatgctgtacatgccaaaggtgtatattatcatctttcatcctgagcaaaacgtacaaaagagaaaaaggagctttaaagcggttgttactgcagccaccatgcagtccaaattgatccagaagggaaatgaccgtccaaatggcgaagtcaagagcgagctttgcgaatcacttgagacaaattctaagtcctccgtagaatttccgatggtgaagtcaggcagtacttcttag

SEQ ID NO: 118615 - DNA, 1506 bp, synthetic construct
  misc_feature 1..1506: note = Description of Artificial Sequence: Synthetic coding sequence
  source 1..1506: mol_type = other DNA
atggtgtgcgaagggaagagatcggcaagctgcccatgcttctttctactgaccgctaaattctattggattctgaccatgatgcagagaacccattcccaggaatacgcccattcaattagggtggatggggacatcatactgggtggactcttccctgtgcacgccaagggagaacggggtgtgccttgtggagagctgaaaaaggagaagggaattcacaggctggaagcaatgctatacgccattgatcagatcaacaaggaccctgatctactgtccaatatcaccttaggtgtaaggattctggatacctgctctagggacacgtatgcattggagcaatcactgacctttgtccaagcattaatagagaaagacgcatcggatgttaaatgcgctaatggggacccccccatattcacaaaacccgacaaaatctccggcgtcattggggccgcagcctcctccgtctctataatggtggccaatattctgagactgtttaaaattcctcagatctcatatgcttctaccgccccagagttgtccgacaacaccagatacgattttttttctagggtggtcccacccgactcctatcaggctcaagcgatggtggatatagtgacagcattgggctggaactatgtgagcacacttgcgtcagagggcaattacggcgaatccggagtggaggcctttacccagatctcacgagaaatcggcggcgtgtgtatcgcacaatcccagaagatcccccgagagcctaggccaggcgaatttgaaaagatcatcaagcgacttctggaaaccccaaatgctcgagctgtgattatgttcgccaatgaggacgacattcgaaggattctggaagcagccaaaaagttgaaccagtctggacactttctgtggatcgggagcgactcgtggggatctaaaatcgcccctgtgtatcaacaggaggagatcgccgaaggtgcggttaccatccttccaaaaagagctagcatcgacggattcgacaggtatttcaggtctagaacattggctaataacagacgtaatgtttggttcgcagaattctgggaggagaacttcggctgcaagctcggatctcacggaaagcggaattcacatatcaagaagtgcaccggcctggagagaatcgcaagggactcaagttacgagcaggaagggaaagttcagttcgtcatagatgcagtttacagtatggcctatgcactgcacaatatgcacaaggacctttgccctgggtacattggtctgtgccctcgaatgtccaccattgatggcaaagaactccttggctacatccgggccgtcaactttaatggctgccgaagaggtatccagatgtcactgccatggccaacacttttcacacccagcttctccagctcatgggccgtactggcactactgtcattgttgatgaagacggaaatgctgctggacgtgatgatctctagctccatcaagtag

SEQ ID NO: 118616 - DNA, 63 bp, synthetic construct
  misc_feature 1..63: note = Description of Artificial Sequence: Synthetic coding sequence
  source 1..63: mol_type = other DNA
atggtttgtgagggcaagcgaagcgcatcttgcccttgtttcttccttctcaccgccaagtag

SEQ ID NO: 118617 - DNA, 2727 bp, synthetic construct
  misc_feature 1..2727: note = Description of Artificial Sequence: Synthetic coding sequence
  source 1..2727: mol_type = other DNA
atggtgtgtgaagggaaaagaagcgctagttgcccatgtttctttctgctaacagccaagttttattggattcttaccatgatgcagcgcacacactctcaggaatatgcccactccatccgcgtcgatggggatatcatcctagggggtctgttcccagttcatgccaagggagagcggggcgtgccttgcggagaactgaagaaggaaaaaggaattcataggctagaggcaatgttgtatgctattgaccagatcaataaggaccctgatctgctgtccaatatcacgctgggagttaggatcttagacacatgtagtagagatacatacgccctggagcagtctctcaccttcgtacaggctctcattgagaaggatgccagcgatgtcaaatgcgcaaacggcgaccccccaatcttcacaaagccagataagatttctggggttattggtgccgctgcctctagcgttagtataatggtggccaacatcctcagactgttcaaaataccacagatctcgtacgcatcaacagctcccgaactttcagataatactcggtatgattttttctctcgcgtggtgcctcccgatagctatcaggcccaggcaatggtggacattgtgacagccctaggctggaactacgtgtctaccctggcctctgaaggtaattacggtgagtccggcgtcgaggccttcacacagattagcagggaaatcggaggcgtgtgcatcgcacagagtcagaagatcccacgcgagcccagacctggggaattcgaaaaaattattaagaggctgcttgagactcctaacgctagggctgtcatcatgttcgcgaatgaggacgacattcgacgcatactcgaggccgcaaaaaagctgaatcagtccggccatttcttgtggatcgggtctgactcttggggaagtaaaatcgcacctgtatatcagcaggaagaaatcgcagagggcgccgtgaccattcttcctaaacgtgctagtatcgacggattcgatcggtacttccggagtcggactctcgcgaataatcgacgtaacgtgtggttcgcagaattctgggaggagaactttggttgcaaactaggatcccacggtaagaggaacagccacattaaaaagtgcacggggctggaaagaatcgcacgggatagctcctacgaacaggaggggaaggtgcagtttgtaattgatgctgtgtattctatggcgtatgccctgcataacatgcataaggacctgtgtccaggctatatcggtctttgccctcggatgtcgaccattgacggaaaggaattgcttggttatatacgtgcagtgaactttaacggatccgcgggtaccccagtgacgttcaacgagaacggggatgcaccggggcgatacgatatttttcagtaccagattaccaataagtcaactgaatataaagtaatcgggcattggactaatcagcttcacctaaaggtggaggacatgcagtgggcacaccgggaacacacccatcccgcctcagtgtgctcactgccatgcaaacccggcgaacgaaaaaagaccgtgaagggtgtcccctgttgttggcattgtgaacgctgcgaaggttataactatcaggtcgatgagcttagctgcgagctctgcccactagaccagcgccccaacatgaaccgcacggggtgtcagctgattcccattatcaagctcgagtggcacagcccatgggcagtcgtgcctgtttttgtcgccatacttgggatcatcgcaaccacattcgtcatcgttacttttgttcgctacaatgatacgcctatcgttcgtgcaagcggtcgggagctctcgtatgtgcttctcactggcatctttctgtgctacagtattaccttcttgatgatagctgctccagacacaattatatgctcctttcggcgggttttcttgggcctgggcatgtgcttttcctacgccgcactcctgaccaaaacgaacagaatccataggatctttgaacaaggtaagaaatccgttaccgcccccaagtttatctcacctgcttcccagcttgtgattaccttcagtctgatcagcgtacaactcctgggagtgtttgtgtggtttgtggtcgaccctccacatatcatcattgattatggcgaacagcgtacactggaccccgaaaaagcacggggagtcctgaaatgcgatatatccgacctctccctcatttgctctttgggatactccatcctgttaatggtcacctgtacggtgtatgcaattaagacccggggagtcccagagacctttaacgaggccaagccaatagggtttaccatgtataccacctgcattatctggctggcctttatccccatctttttcggaacagcacagtctgccgaaaagatgtacatccaaacaacaaccttgactgtgagcatgtctctgtcagccagcgtgtctctcgggatgctgtatatgccaaaggtctacataattatctttcatcccgagcagaatgtccagaaaagaaagagatccttcaaagcagtggtaaccgctgcaacgatgcaatccaaactgattcagaaagggaatgatagacccaacggcgaggtgaagagcgaactgtgcgagtccttagagacaaatacctcatctaccaagaccacctacattagctacagcaaccacagtatatag

SEQ ID NO: 118618 - DNA, 885 bp, synthetic construct
  misc_feature 1..885: note = Description of Artificial Sequence: Synthetic coding sequence
  source 1..885: mol_type = other DNA
atggtctgtgagggaaagaggagcgcatcttgcccgtgtttctttcttctaacagctaagttttattggatcttaacaatgatgcagcgtacacactcccaggagtatgcccacagcatcagggttgatggcgatattattctgggaggtttgttcccagttcacgccaagggcgaaagaggggtcccatgcggtgaactaaagaaagagaaaggcatccacagactggaggccatgctgtatgccatcgaccagattaataaagatccagacctactaagcaacataactctgggcgtgcgaatcttagatacctgtagcagagatacctacgccttagagcagtccctgacctttgtgcaggcacttattgaaaaagacgcatccgacgtaaagtgcgctaatggcgatccacctatattcacaaaaccggacaaaatctctggcgtgataggcgctgccgcctctagcgttagcatcatggtcgccaacattctccgactctttaagattcctcagatttcatatgccagcacagccccggagctcagtgacaatactagatacgactttttctctcgggttgtaccaccagattcgtaccaggcccaggcaatggttgacatcgtcacagccttaggctggaattatgtcagcaccctcgcctctgagggcaattatggcgagagtggcgtagaagcattcacacaaatctcacgtgaaattgggggtgtgtgcatcgctcagagccaaaagatcccaagggagccgcggccaggtgaatttgagaaaatcattaaacgtctcctcgaaaccccgaacgccagggccgtgatcatgttcgccaacgaagatgatattcgcagaattctggaggcagcttag

SEQ ID NO: 118619 - DNA, 1122 bp, synthetic construct
  misc_feature 1..1122: note = Description of Artificial Sequence: Synthetic coding sequence
  source 1..1122: mol_type = other DNA
atgactacgtccgcatcatcgcatctgaataagggtatcaagcaggtgtacatgagcctcccccagggagaaaaggttcaggcaatgtacatttggattgatgggaccggagaggggctaaggtgcaaaaccagaaccctggattcagaacctaagtgtgtggaagaactgccagagtggaatttcgacggcagctccacactgcagagcgaggggtcgaattctgacatgtaccttgttcctgcagctatgtttagggaccctttccggaaagatcccaataagctggtgctatgtgaggtgttcaaatataacaggcgaccagccgaaaccaacctccgccatacgtgtaagcggatcatggacatggttagtaatcagcatccctggttcggaatggaacaagagtatacattaatgggcacagacggacatccattcggatggcctagcaacggattccctggtccacaagggccctattactgcggtgtgggtgctgaccgggcctacggaagagatatcgtggaggctcattatcgggcttgcctttatgccggcgtcaagatcgctggaacaaatgcggaagtaatgccagcgcagtgggaattccaaattggaccatgtgaagggatttcgatgggggatcacctctgggtagctcgcttcattttacaccgggtctgcgaagacttcggagtcattgccacctttgacccaaagcctatccccggaaattggaacggagcgggatgccacacgaacttcagcaccaaggctatgagagaggaaaacgggctgaagtatattgaagaagccatcgaaaaactgagcaaaagacaccagtaccatatccgcgcctatgatccaaaaggggggctggacaatgcccgaagactcacagggtttcacgagacatccaacataaatgatttttctgccggggtggccaaccggtcggcaagcatcagaattccccggactgtcgggcaggagaaaaagggttatttcgaagatcgccgcccttccgccaattgtgaccctttctcagtgacggaagcactgatacggacgtgtctactgaatgaaaccggggacgagccattccagtacaaaaactag

SEQ ID NO: 118620 - DNA, 1122 bp, synthetic construct
  misc_feature 1..1122: note = Description of Artificial Sequence: Synthetic coding sequence
  source 1..1122: mol_type = other DNA
atgacaacttccgcttcctcccatttgaataagggtataaagcaggtgtatatgtcactgccccagggcgagaaggttcaggcaatgtacatctggatcgatggtacaggcgaaggattgagatgtaagacacgcacacttgactctgagccaaaatgtgttgaagaactccctgaatggaatttcgacggctcgagcacactgcagtccgaggggagcaactcggacatgtacctagtccccgccgctatgtttcgggacccctttcgaaaggatcccaataaactggtactgtgcgaagtgtttaagtataacagaagacccgctgagaccaacctgcgtcacacgtgtaaaaggatcatggatatggtgagtaaccagcacccatggtttgggatggaacaggaatacacacttatgggcacagacggccacccatttgggtggccatccaacgggttcccgggacctcaggggccttattactgcggcgtcggagccgatagagcctatggacgagacatcgtcgaagcacactatcgcgcttgtttatacgcgggtgtaaaaatcgccgggaccaacgcagaggttatgcctgcacagtgggagttccagattggcccctgtgaaggcatcagcatgggcgatcacttatgggtggcacggtttatactccacagagtttgcgaggacttcggggtgatcgcaacgtttgatcctaaacccattcccgggaattggaatggagcaggttgccatactaactttagcaccaaggctatgcgggaagaaaacggactgaaatatatagaggaggcaatcgaaaagctgtccaaaagacaccagtaccatattcgtgcttatgatccaaagggaggcctggacaacgccagaagattgacggggtttcatgagacttctaatattaatgatttctccgccggggtggccaatcgctccgccagcattcgtatccccagaaccgtgggccaggaaaagaaaggctatttcgaggaccgccggccctccgccaactgcgatccattttctgttactgaggccctcataagaacctgcctgttaaatgagaccggggacgaaccattccagtacaagaactag

SEQ ID NO: 118621 - DNA, 1122 bp, synthetic construct
  misc_feature 1..1122: note = Description of Artificial Sequence: Synthetic coding sequence
  source 1..1122: mol_type = other DNA
atgactacgtctgctagctctcaccttaacaagggcattaagcaagtctacatgagcctcccgcaaggcgaaaaggtgcaggccatgtacatctggatcgacggaacaggcgaaggcctcaggtgtaagacacgaacactcgactcagaaccgaagtgtgtggaggagctgcctgagtggaacttcgacggatcatccacgttgcaaagcgaaggcagcaactccgacatgtatttggttccggcagctatgtttcgcgaccctttccgcaaggacccaaataagttagtcctttgtgaggtgttcaagtacaaccggcggcccgctgaaaccaatctgcgacatacatgcaagaggatcatggacatggtttccaaccagcatccatggttcggtatggaacaagaatacaccttaatggggaccgacggacatcctttcggttggccgtctaacggctttccaggccctcagggtccttattactgtggagtcggtgccgatagagcctatggccgtgacattgtggaagcccattatcgcgcttgcctatatgcgggggttaaaattgctggaacaaatgccgaggtgatgcccgctcaatgggaatttcagatcgggccatgcgagggaatctcaatgggtgaccatctgtgggtggccagatttatactccatagggtttgtgaggactttggtgtgatcgcaacgttcgacccaaagcctatccccgggaattggaatggagctggctgccacacaaacttcagcacaaaggcgatgcgagaggagaacggtcttaagtacatagaagaagccattgagaagctgagcaaacggcatcaatatcatattagggcctacgaccccaagggaggacttgataacgcgcggagactgacgggcttccacgagacaagcaacattaatgactttagcgctggggtggccaaccggagtgcttcaatacgtatccctcgcacagtcggtcaggagaagaagggatatttcgaagaccgcagaccttctgcaaactgtgatcccttctcagtgaccgaggcccttattcggacttgtctgcttaatgaaaccggggacgaaccttttcaatacaagaattag

SEQ ID NO: 118622 - DNA, 1122 bp, synthetic construct
  misc_feature 1..1122: note = Description of Artificial Sequence: Synthetic coding sequence
  source 1..1122: mol_type = other DNA
atgactacctctgcgtccagccacctcaataaagggattaagcaggtgtacatgagcctgccgcagggtgagaaggtgcaagctatgtatatatggatagacggcactggagagggactgcgctgtaagacccggacgctcgacagcgaacccaaatgcgtggaagaattgcctgaatggaacttcgacgggagctctacactgcaatccgaaggctccaactctgacatgtatcttgtccctgcagccatgtttcgggaccccttcaggaaggaccccaacaaactggttctctgtgaggtgttcaagtacaacaggcgaccggcagaaactaatctgaggcatacctgcaagagaatcatggacatggtaagtaaccagcatccctggttcgggatggaacaggagtataccctgatgggcactgatggacaccccttcgggtggccctcaaatgggttcccaggccctcaaggaccctactactgtggggtcggcgccgacagagcatacggacgcgacattgtcgaggcacactatagggcctgtctgtatgcaggagtgaagattgccggtaccaacgccgaggttatgcccgctcaatgggagtttcaaattggaccctgcgaaggcatttcgatgggagaccacctctgggttgcacggttcatactgcaccgcgtgtgcgaagacttcggcgttatcgccacctttgaccccaagccaatccccggaaattggaacggcgctggctgtcacactaatttctctacaaaggcaatgcgcgaggagaatggtctgaaatatatcgaagaggcgatcgaaaaattaagtaagaggcatcagtaccatatccgggcctacgaccccaagggcggcctcgataacgcaagacggctgaccggcttccacgaaacttctaacatcaacgacttttcggcaggtgtggcaaaccgctccgcttccattcgaattccccgcaccgtggggcaggaaaagaagggatacttcgaagacaggaggccaagtgccaattgcgatccgtttagcgttactgaggcacttattaggacctgtctgctcaatgagacgggtgacgaaccctttcagtataagaattag

SEQ ID NO: 118623 - DNA, 702 bp, synthetic construct
  misc_feature 1..702: note = Description of Artificial Sequence: Synthetic coding sequence
  source 1..702: mol_type = other DNA
atgacaacaagcgcatcaagccatctaaacaaaggcattaagcaggtctacatgtcgttgcctcaaggcgagaaggttcaggctatgtacatttggattgacggtacgggggaaggtcttcggtgcaagacaaggaccctggacagcgagcccaaatgcgttgaggaactccctgagtggaattttgatgggtcgtccacactgcagtctgaggggagtaacagcgacatgtacctcgttcccgccgctatgtttcgcgatcctttccgcaaggacccgaataagctggtgctttgcgaggtgttcaaatataaccgcaggcccgcagaaaccaacctccgccacacatgtaagaggattatggatatggtttctaaccaacatccctggttcggcatggaacaggagtacacccttatgggtacagatggacatccctttggctggccctcaaatggctttcagggtcccagggtccacattacggtggtctgggagcagacggaacccatggcaggcacgtcttggagacctatcacaggccccgcatgcatgctggagagcagactgcgcggtttaatgcctcgctcttgtctgccatcaggcaacttcaggctcgacctggtcaaggagtcggcgtgggagatcatttcaggatggcccgttagttcctgcattgtttgtgttaagacacttgagtag

SEQ ID NO: 118624 - DNA, 678 bp, synthetic construct
  misc_feature 1..678: note = Description of Artificial Sequence: Synthetic coding sequence
  source 1..678: mol_type = other DNA
atggaccagcaggctatctatgctgagcttaacctcccaaccgactccggccctgagagctcgtccccatcaagtctgcccagagacgtttgtcagggcagcccatggcaccagttcgcacttaaactgtcttgcgccggcatcatcctgctggtgctggtggtgactgggttgtcggtgtccgtcacatcactgatccagaagtcatccatcgagaaatgtagcgtggatatacagcagtctcgtaacaaaacaacagagcgtcctggactgctcaactgtcctatctactggcagcagctgcgagagaaatgcctactttttagccacaccgtgaacccgtggaacaacagtctggcagactgttcaacaaaagagagttcactgctgctgatacgtgacaaggacgagctaatccacacacagaatttaataagggacaaggctatactgttctggattggtctgaacttttctctctcagaaaaaaactggaagtggattaacggatctttcttgaactccaatgaccttgagatcagaggcgatgcaaaggagaacagctgtatttcaatttcccagacaagtgtctactctgagtattgctcaacggaaatccggtggatttgccaaaaggaactcacccccgtgcgtaataaagtgtaccccgactcctag

SEQ ID NO: 118625 - DNA, 825 bp, synthetic construct
  misc_feature 1..825: note = Description of Artificial Sequence: Synthetic coding sequence
  source 1..825: mol_type = other DNA
atggggactgatagtagagcagccaaggctcttctcgccagagctcgtacactgcacctgcagaccggaaatcttcttaactgggggcggctcaggaagaagtgcccttcaacacacagtgaggagctccatgattgcatccagaagaccctaaacgaatggagtagtcagattaatcccgacctggttagagagttccctgatgtcttagaatgtacggtgtctcatgccgttgaaaagataaaccccgatgagcgcgaggagatgaaggtgagcgcaaagctgtttattgttgagtctaactcttcatctagcactcgctcagccgtcgatatggcttgttcggttctgggcgtcgcacagctcgattcagttatcattgcctctccccccatcgaggatggtgtcaacctgtctcttgagcacctgcaaccatactgggaggagcttgagaacctggtgcagtctaagaaaatcgttgctatagggaccagcgacctcgacaagacacagctggagcaattgtatcagtgggcccaggtgaagcccaactcaaaccaggtcaatctggcatcctgttgcgtcatgcctcccgatctgaccgcatttgccaagcaatttgacattcagctgctgactcataacgaccctaaagaattgctctcggaagcatcgttccaagaagccctgcaggaaagcatccccgacatccaagcacatgaatgggtgcccctgtggcttctccggtacagcgttattgtgaagagtagaggtatcatcaagagcaagggatacatcctgcaggctaaaaggcgagggtcctag

SEQ ID NO: 118626 - DNA, 1341 bp, synthetic construct
  misc_feature 1..1341: note = Description of Artificial Sequence: Synthetic coding sequence
  source 1..1341: mol_type = other DNA
atggcagcacggaaaggacggcgaaggacctgtgaaacgggcgaaccaatggaggcagagagcggtgatacttcaagtgaagggccagcgcaagtctacctcccaggtaggggccccccactcagagagggcgaggagctggttatggatgaagaagcttatgtcctgtaccacagagcccagactggagccccatgtctcagcttcgatattgttagagatcacttaggagacaatcggaccgaattgcccctcactttgtacctgtgcgctggcacccaggctgaaagcgcacagtccaatcgcctgatgatgctcaggatgcataacttgcatggcactaagcctccaccctcggagggcagcgacgaggaggaggaagaagaggacgaggaagacgaggaggagagaaagccccaactcgaactagctatggtgccccactacggaggaatcaacagggtacgcgtgtcttggctcggagaagaaccagtagcgggcgtctggagcgagaaaggacaggtggaggttttcgctctaaggcggcttctccaggttgtggaagaacctcaggctctcgccgcctttctgcgagacgaacaagcacaaatgaagcccatcttctcctttgccggacacatgggagaaggtttcgccttagattggtcaccgcgcgtgaccggacggctgctcacgggcgattgccagaaaaatatccatttgtggacacccacagacgggggcagttggcacgtggaccaaagacccttcgtcggccatacacgttctgtcgaggacctacaatggtcaccaaccgaaaataccgtcttcgctagctgcagcgcagacgctagtataaggatttgggacatccgggcagccccatctaaagcttgcatgcttactacagctacggcccatgacggggacgttaacgttataagctggtctagaagggagcccttcctgctgtcaggcggtgacgatggagccctgaaaatatgggatctgaggcagtttaagtcagggtctcccgtagccacttttaagcagcacgtcgcacctgttacgtcggtcgaatggcacccccaagattcaggagtattcgcagcaagcggtgccgaccatcagatcactcagtgggatctggctgtcgagagagacccggaggccggcgatgtcgaagctgatcctggcctggccgacctgccccagcagctgttgttcgtgcatcagggcgagacagagctgaaggagctgcattggcatccgcagtgccccgggcttctcgtctctaccgcccttagcggatttaccatatttcggaccatctccgtgtag

SEQ ID NO: 118627 - DNA, 1572 bp, synthetic construct
  misc_feature 1..1572: note = Description of Artificial Sequence: Synthetic coding sequence
  source 1..1572: mol_type = other DNA
atgcagcgtgccgctgctttagtccggagaggctgcggcccccgaactccttccagctgggggagaagtcagtcctctgccgctgccgaggccagcgctgtgctcaaagtgagaccggagcggagccgcagagagcggatcttaactctggaatcgatgaatccccaggttaaagcggtcgaatatgccgtgcgcggtccaatcgtgttgaaggcaggagagatagaattagagctgcaaaggggtatcaagaaaccattcaccgaagtaattagggctaatattggagacgcacaagccatgggtcagcagccaatcaccttccttcgccaggtgatggccctgtgtacctatcccaatcttcttgatagtccctcatttcctgaggatgctaaaaaacgagcgagacgcatcttgcaggcatgcggcggaaactccctgggatcatactccgcatcccagggagttaactgtattagggaagatgtggccgcatacattacccggagggatggcggcgtgccggcagatcccgataacatctatctgactacaggcgcctctgacggaatttctacaatactgaaaatactggtgagcggcggagggaagtccagaacaggagttatgatacccatacctcaatacccgctgtattctgccgtaatcagtgaacttgacgccattcaggtgaattactatctcgacgaggaaaattgctgggctctcaatgtgaacgagctgcgacgcgctgtacaggaagctaaagatcactgtgaccctaaggtgctgtgtatcatcaatcccggtaatccaaccggacaggttcaaagccgcaaatgtatcgaagatgtcatccatttcgcctgggaggaaaaactgttcctcctcgcggacgaagtgtatcaagacaatgtgtattcccccgattgtagatttcacagttttaaaaaagtattatatgagatgggacctgagtactcctcaaacgtcgagctggcctcatttcatagcacctccaagggatacatgggcgagtgtgggtataggggaggttatatggaagtgattaatctccatccagagattaaaggccagctggtgaagctgctcagcgtgcgcctatgcccacctgtgtctggccaagcagccatggacatagttgtaaacccaccagtggcaggagaggaatcttttgagcagttctccagggagaaggaaagtgtactgggcaacctggctaaaaaagctaagctgaccgaggatttatttaatcaggtgcccggcattcattgtaacccactgcagggggccatgtacgcttttcctagaattttcatccctgccaaggcggtcgaggctgcccaagcacaccaaatggcacccgatatgttctactgtatgaagttgctggaggaaaccggcatctgcgtcgtgcccgggtctggatttgggcagcgagaagggacctatcatttcagaatgacgattttgccgcccgtcgaaaagttgaagaccgttttgcagaaggtgaaggatttccacatcaacttcctggaaaagtacgcatag

SEQ ID NO: 118628 - DNA, 1272 bp, synthetic construct
  misc_feature 1..1272: note = Description of Artificial Sequence: Synthetic coding sequence
  source 1..1272: mol_type = other DNA
atggggcagcagcctatcacattcctccggcaggtaatggcgctctgcacgtaccccaatctgcttgattccccttcttttccagaggacgctaagaaaagagcgcgcaggatccttcaggcatgtgggggaaacagcctgggaagctactccgcatcccagggcgtcaactgtatccgcgaggacgttgccgcctacatcacaaggagagatggcggcgtgcctgccgatccagacaatatctatctgaccactggggctagcgacgggattagtaccattcttaagattctggtttctggcggcggtaaatctcgcacgggagtgatgattcctatcccccagtacccactgtactcagcggtgatctcggagctggacgccatccaggtcaactattatcttgatgaagaaaattgctgggctctgaacgtcaacgaactgaggcgcgcagtgcaagaagctaaggaccattgtgaccccaaggttttatgtattataaatccggggaaccccaccggacaggttcaatctcgtaagtgtattgaagacgtgatccattttgcatgggaggaaaaactgttcctcttggccgacgaggtgtatcaagataatgtatatagtcctgattgtcgattccactcctttaaaaaagtcctgtacgaaatgggcccagaatattctagcaatgttgaactcgccagtttccactccacgagtaaagggtacatgggcgagtgtggataccggggcggctatatggaagttattaatctgcatcccgaaattaagggtcagctcgtgaaactattaagcgtaaggctgtgcccccccgtgtcaggacaggcggcaatggacattgtggtgaacccgcccgtagccggtgaggaatcatttgagcaattctccagggaaaaggaatccgttttggggaatcttgccaagaaagcaaaactgacagaggacctcttcaatcaggtgcctgggatccattgtaacccgttgcagggcgccatgtacgcatttccccggattttcataccagcaaaagccgtggaggctgcgcaggctcatcaaatggccccagacatgttttattgtatgaaactactagaggaaactgggatttgcgtcgtgccagggtctgggttcgggcagcgggaaggtacgtatcatttcaggatgaccattctgcctccagtcgaaaagctaaaaaccgttttacaaaaagttaaagatttccatatcaattttctggaaaagtacgcgtag

SEQ ID NO: 118629 - DNA, 1242 bp, synthetic construct
  misc_feature 1..1242: note = Description of Artificial Sequence: Synthetic coding sequence
  source 1..1242: mol_type = other DNA
atggcccctccgtccgtctttgctgaggtcccacaggctcagcccgttctggtatttaaactgacggcagatttcagagaggacccagaccctcgaaaggtgaatttaggcgtaggcgcttaccggaccgacgactgccatccgtgggtgctgccggttgttaaaaaggttgaacagaagatagcgaatgataattcattaaaccacgaatatctgccgatccttggtctggccgaatttaggtcatgtgccagtcggctggctctgggcgatgactcacccgccctcaaagaaaaacgggtcgggggagtgcagtcccttggaggcacgggcgccttacggatcggggccgattttctagctcgatggtataacggcaccaacaataagaatacgcctgtgtacgtgtcttctccaacctgggagaatcacaacgccgtattctcggcagctggctttaaggacattagatcctaccgttactgggatgcagagaaaaggggattggatctgcagggcttcttgaacgacctggagaacgcacctgagttcagcattgtggtgctacatgcttgcgcccataaccctaccggtattgatcccacccccgaacaatggaaacagattgcctctgtgatgaagcatagattcctgtttcctttcttcgattcagcctaccaggggttcgcctcaggtaatcttgaaagagacgcctgggcaattcgatacttcgtctccgagggctttgagtttttttgtgctcagagctttagcaagaactttggcttgtacaatgaaagagtcggcaacctgaccgtcgtgggtaaggaacctgaatctatacttcaagtgttgtcccaaatggagaagatcgtgagaatcacctggtccaaccctcctgcccaaggggcaagaatagtcgcgtctacgctcagcaatcctgagctttttgaagagtggactggaaatgtaaagacaatggcggatcgtatactgaccatgagatctgaacttagggcgaggttggaggcactgaaaacccctggtacgtggaatcacatcactgaccagataggtatgttttccttcactggactgaaccccaagcaagtggaatacctggtaaacgagaagcacatctatctgctcccgagcggaagaataaatgtctccggtttaacaacgaagaatctggactacgttgccacttccatccacgaggctgttactaaaatccagtag

SEQ ID NO: 118630 - DNA, 1101 bp, synthetic construct
  misc_feature 1..1101: note = Description of Artificial Sequence: Synthetic coding sequence
  source 1..1101: mol_type = other DNA
atggctcctccgtcagtcttcgcagaggtgccgcaggcacagccagtactggtttttaagctaactgctgattttcgcgaggaccccgacccgcgcaaggtgaacttgggcgtaggcgcttacaggacagacgacagccctgcacttaaggaaaagagggtgggaggtgtgcaatccctgggaggtacaggggcactgcgcataggagcagatttcctcgccagatggtataacggaaccaataacaagaatacgcccgtgtatgtcagttctccgacatgggagaaccacaatgcagtgttttcagctgccgggtttaaggatattcgttcttacagatattgggatgctgagaagcgcgggttggatttgcagggcttccttaacgatctcgagaacgcaccagagtttagcattgtggtgctgcacgcgtgcgctcataatccgaccggcatcgatccgaccccagaacagtggaaacagatcgcatccgtaatgaagcaccggtttctttttccgttcttcgacagcgcctaccaaggtttcgccagcggtaacctggagcgggacgcctgggccatccgatactttgtttctgagggctttgaattcttctgtgcccagtccttctctaaaaattttggcctctataacgaaagggtgggtaacttaaccgtggtgggtaaggaacctgaatccatcctgcaagtgcttagtcagatggagaagatcgtccgaattacttggagcaatccacccgctcaaggcgccaggatcgtggccagcactttaagtaaccccgaactcttcgaagaatggacgggaaatgtcaagactatggcagaccggatactgactatgagaagcgaactgagagcccggttagaggccctgaaaaccccaggcacctggaaccatattacggatcagattggaatgttcagcttcactggcctgaatccaaaacaggtggaatacctggtgaatgagaaacacatctatctgctcccgtccggccgtatcaacgtatcaggattgaccaccaagaacctggattacgtggcgacgagtattcatgaggccgtgacgaagatccaatag

SEQ ID NO: 118631 - DNA, 1179 bp, synthetic construct
  misc_feature 1..1179: note = Description of Artificial Sequence: Synthetic coding sequence
  source 1..1179: mol_type = other DNA
atgcaggtctggtcaccttggaaaggagctatgtgcccgcgcccacacaaacccgcatatcgtaccgacgactgccatccttgggttcttcccgtcgtgaaaaaggtagaacagaaaatcgccaacgataactctctcaatcacgaatacctgcccatcctgggactggccgaattccgctcttgcgcctcacgactggctttaggggacgattcacccgccttgaaagagaagcgagtggggggcgttcagagcctcgggggcacgggagccctccggattggagcggatttcctggctcgctggtataacgggactaataataagaatacgcctgtgtacgtgagttccccaacatgggagaatcacaatgccgtgttctctgcagctggttttaaggatatacggagctaccgatattgggatgccgaaaagaggggactcgacctgcagggatttctcaacgacttggaaaacgctcccgagttctctatagtggttctacatgcatgcgctcacaatccaactggtatcgatccgactccagaacagtggaagcagattgcctcagtcatgaaacacaggtttctctttcctttttttgactcagcgtatcagggttttgcctctgggaatctcgagagggatgcctgggctatccggtattttgtttctgagggattcgaattcttctgcgcacagtctttctccaagaattttggcctgtacaacgaaagagtgggaaacctgaccgtggttggaaaggaacccgaatccatcctgcaggtcttgtcccaaatggagaagattgtgcggattacgtggtcaaatccccccgcacagggcgcacgtattgtggctagcacgctctctaatcctgagcttttcgaagagtggactggcaacgttaagaccatggccgaccgaattctgactatgcgttcagagctgagggcacggctcgaagcactgaaaactcctggcacatggaaccatatcacagatcagattggtatgttttcgttcacaggccttaacccaaagcaggtcgaataccttgtgaacgaaaaacatatctacctcttgcctagcggaaggattaatgtcagcggccttactacaaagaacctggattacgtggccacctcaatccatgaagcagtgaccaagatccagtag

SEQ ID NO: 118632 - DNA, 1293 bp, synthetic construct
  misc_feature 1..1293: note = Description of Artificial Sequence: Synthetic coding sequence
  source 1..1293: mol_type = other DNA
atggctctcctgcacagtggacgcgtgcttccagggatagcagccgcgttccatccaggcctggcagccgcggcctctgccagagcctctagttggtggactcacgtcgagatgggccctccagatccaatactgggcgtcaccgaggcctttaaacgagatacaaattcgaagaagatgaacctgggggttggggcatacagagatgataatggcaaaccatacgttctccccagtgtccgtaaggcagaggcccagatcgccgcgaaaaacttagataaagagtacctgccaatcggagggttggccgagttctgtaaggccagcgccgagttagcgttgggcgaaaactcagaagtacttaaatccggccggtttgtgactgtccagaccatctccgggactggcgctctgcgtataggggcttccttcctgcagaggttttttaagtttagccgtgatgtgttcctgccgaaacctacatgggggaaccatacgcccattttcagggatgccggcatgcagctgcagggttacagatactacgaccctaaaacttgtgggttcgattttaccggagctgtcgaggacatcagtaaaatcccggagcagtctgtacttctcctgcatgcatgtgcacacaatcccactggagtcgacccaaggcctgagcagtggaaggagatcgcaaccgttgtcaaaaaacgaaatctgtttgcattctttgacatggcgtaccagggcttcgcctccggcgacggggacaaagatgcctgggctgtgcgccacttcattgagcagggaattaatgtctgtctgtgtcagagctacgccaaaaatatgggactgtatggggagagagtgggagcttttactatggtgtgtaaagacgctgatgaggcaaaacgggtggagtcccaactgaagattcttatccggcccatgtactctaacccgccattgaatggcgctcgtatcgccgccgcgatcctgaataccccagatttgaggaaacagtggctccaagaagtgaaagtcatggcagaccgaattatcgggatgcgcacccagctcgtgtcaaaccttaagaaagagggctctacccacaattggcagcatattactgatcaaattgggatgttctgtttcacgggactgaaaccagaacaggtggagagactgataaaggaattcagcatttatatgaccaaggatgggcgtatctccgtcgcaggtgtgacaagctccaatgttgggtacctggcccacgccattcatcaggtgaccaagtag

SEQ ID NO: 118633 - DNA, 570 bp, synthetic construct
  misc_feature 1..570: note = Description of Artificial Sequence: Synthetic coding sequence
  source 1..570: mol_type = other DNA
atggcgctcctgcacagtggacgggtgctccccggaatcgccgcagccttccatccagggcttgccgccgctgcctcggccagggcctcctcctggtggacccatgtggagatgggaccccctgaccctattctgggagtcactgaagccttcaagcgcgacacaaactctaaaaagatgaacctgggggtgggggcatatcgggacgataacggcaagccatacgtgctgcccagtgtacgaaaagccgaagctcagatcgccgctaagaatttggataaggagtatctcccgataggtggccttgcagaattctgtaaggacttcttgagctctgctgaaatgtcattttgccctaatcagcctggtgagaccacacatcctagttctggtatgctcgcttgtagttataaagtaatcggcatcatgacgccccgtttggctgttctcactagccaggcactgtggaggatcttccagaagtatcagagtcgggtcttcttcttctgtatgccagctcccaccattccaagggaatggactcgggtgagaaattctggtcgcaagtag

SEQ ID NO: 118634 - DNA, 1164 bp, synthetic construct
  misc_feature 1..1164: note = Description of Artificial Sequence: Synthetic coding sequence
  source 1..1164: mol_type = other DNA
atggcccttttgcacagcggtagagtcctgccgggcatcgccgccgcgtttcaccccggactggcagccgcggcttcggcaagggcatcttcatggtggactcacgtcgaaatgggtccacctgacccgatactcggcgttacggaggcttttaagagagatactaatagcaagaagatgaaccttggggtcggcgcttatcgagacgacaacggaaagccctacgtcctcccctccgtccgcaagtttgtgacagtccaaaccatctccggaaccggagctctgagaataggggccagtttcctccagaggttttttaaatttagtagggacgttttccttcccaaaccaacttggggaaatcatacaccaatcttccgagacgctggaatgcaactgcaagggtacaggtattatgacccgaagacatgtggatttgattttacaggggccgtcgaggatatcagcaaaatccccgagcaatccgttctgcttctgcacgcgtgcgctcacaaccccacaggagtagaccccaggcctgagcagtggaaagagatagctaccgtagtcaaaaagagaaacttatttgcattctttgatatggcataccagggattcgcttcaggcgacggggataaggacgcctgggctgtccggcacttcattgaacaaggaattaatgtctgcctctgccagtcctatgccaaaaacatgggcttgtacggtgaacgagttggagctttcacaatggtctgtaaagacgcagatgaggccaagcgggttgagtctcagcttaagattctgatcagacccatgtatagcaacccccccttgaatggtgccagaatagccgccgcgatcctaaatacacctgatctgcgaaaacagtggctccaggaagtgaaggtcatggcagaccggatcattgggatgcgcactcaacttgtgtctaacctgaaaaaggagggtagcacccataactggcagcacatcacagaccagattggcatgttttgtttcacaggccttaagcctgagcaggtggaacgcctcattaaggagttctccatatatatgacaaaggatggccgcatcagcgtagcgggcgtgacgagcagtaatgtcgggtacctagctcacgccatacatcaggtcacaaagtag

SEQ ID NO: 118635 - DNA, 1491 bp, synthetic construct
  misc_feature 1..1491: note = Description of Artificial Sequence: Synthetic coding sequence
  source 1..1491: mol_type = other DNA
atggccagttctacgggcgatagatctcaggcggttcgccatggattgcgcgctaaggtgctcacactggatggaatgaatccccgggtgcggagggtggaatacgcagtgcgaggcccaattgtacagcgcgctctcgagctcgagcaggagcttaggcagggcgtgaaaaaacccttcaccgaggtcattcgagccaacatcggagacgctcaggctatgggccaaagaccgatcacgttcctgcggcaggtcttggctctctgcgttaatcccgatctgctgagttcacccaatttcccagacgatgcaaagaagcgagctgaaaggattctccaagcctgtggaggtcacagtcttggtgcatattccgtatctagtgggatccagctgattagagaggatgtagcccgctacatcgaaagacgagacggtggcattccagcggaccccaacaacgtgttcctgagcaccggcgcatctgatgcaatagtaacggtgttaaagctgttggtggctggggaggggcatacgcgaacaggagtcctcataccaatcccccagtacccgttatactccgccactttagccgaacttggcgctgttcaagtggactactacctggatgaggagcgggcctgggccctggacgtagcagagctgcacagggctttgggacaggctcgggatcactgtcgccctagggcattgtgcgtgatcaatcccggtaaccctaccggtcaggtgcagactagggaatgcatcgaggccgtgatcagatttgcttttgaggagcgactgttcctgctggctgacgaagtgtatcaggacaatgtgtatgccgcaggttctcagttccactcctttaagaaggtgttaatggagatggggcctccatatgccggccagcaggaacttgccagcttccatagtaccagtaaggggtacatgggagaatgcgggttcagggggggttatgttgaagtggtgaatatggacgctgcagtgcagcagcagatgctgaagctcatgtctgtaaggctgtgccctcctgttcctggacaggcactgctagatctggtcgtttcgccacctgcaccgaccgatcccagcttcgcacaattccaggcagagaaacaggcagtgctagcggaactggctgcaaaggccaaacttacagagcaagtgtttaacgaggcacctgggatctcctgcaacccagttcagggtgccatgtattctttccctcgggtgcagctccctccccgggcggttgagcgggcacaggaactcgggctggcgcctgacatgttcttttgcctacgtttattggaggagaccggaatctgcgtcgtgcctggctccggattcggccagagggaggggacttaccactttcgaatgactatcttgccccccctggagaagctgcggctcctgttggaaaagctgagcagattccacgctaagtttaccctggagtactcctag

SEQ ID NO: 118636 - DNA, 1491 bp, synthetic construct
  misc_feature 1..1491: note = Description of Artificial Sequence: Synthetic coding sequence
  source 1..1491: mol_type = other DNA
atggcaagtagtaccggtgaccgttctcaggccgtaaggcatgggctacgagctaaggtcctcacactcgatgggatgaacccacgggttcgaagagttgagtacgctgtgagaggccctatcgtccagcgggcacttgagttagaacaggaacttaggcagggggtcaagaagcccttcaccgaggtgattcgtgctaacatcggagacgcgcaagccatggggcagaggccaatcacctttcttcgacaggtactcgctctatgtgtgaatccagacctgctgagctctccgaatttccccgatgatgccaaaaagcgcgcagaacgtatcctgcaggcatgcggcggccattccctgggtgcctacagtgtgtcgtctgggatccagctgatcagggaagatgttgcccggtatatcgaacgtcgcgatggaggcattccagcagacccaaacaacgtgttcttaagcaccggggcctccgatgcgatcgttacagtactgaaactgctggtagcaggtgagggccacactcgcacaggggtcctaatccccattcctcagtacccattgtacagtgccaccctggccgaactaggagccgttcaggtcgattactacctagatgaagaacgagcctgggcccttgacgtggcagagctgcaccgcgccctggggcaggctagggaccactgcagacccagggccctgtgcgtcatcaatccgggaaaccccactggccaagtccaaacccgcgaatgcatagaggctgtaattcgcttcgcattcgaggaacggctctttcttctggctgacgaggtgtatcaggacaatgtctatgcagccggttcccagttccacagtttcaaaaaagtgctgatggaaatgggcccaccttatgccggtcagcaggaactcgcttcatttcacagcactagtaaagggtatatgggggagtgcggcttccggggtggatacgtcgaggttgtaaacatggacgcagctgtacagcaacagatgctcaaactgatgtctgttaggttgtgtccccccgtaccaggccaggcattactcgacttagtggtatcgccacctgcccctacagacccatcattcgcccaatttcaggccgaaaagcaggctgttctcgccgaactcgcagcgaaggcgaagctcacggaacaggtgtttaatgaagcgccgggtatatcatgcaatcctgtgcagggcgccatgtatagttttcccagagtacagctccctccacgggccgtggaaagagcccaggagctgggcctagcgcctgacatgtttttttgcctccggctactggaggagactgggatttgcgtcgtgccgggaagcggtttcggccagcgcgaaggaacctaccatttccggatgactattctgcctcctttggaaaagttgagactcctgttagagaaattatcccggtttcacgccaagttcactctggagtactcctag

SEQ ID NO: 118637 - DNA, 2010 bp, synthetic construct
  misc_feature 1..2010: note = Description of Artificial Sequence: Synthetic coding sequence
  source 1..2010: mol_type = other DNA
atgatgagactgcggggttcggggatgctgagggacttgctcctgcgaagccctgctggagtcagcgcaacgctccgcagggcccagccactggttaccctgtgcaggcgccctagaggcggcggaaggcccgccgcaggaccggctgccgcagctcggcttcacccgtggtgggggggaggagggtggcccgctgagcctctcgctcggggtttgtcctcgtcccccagcgaaatccttcaggagctgggtaagggctctactcacccgcagcccggcgtgagcccccccgcagctcctgctgcacctggaccaaaggacgggcctggtgagactgacgcctttggaaactcggaagggaaagaacttgttgccagcggggagaataagattaagcagggactattgccttcgcttgaggacctgcttttctacacaatcgccgagggacaggaaaagattcctgtgcataagtttattacagctctcaaatcaaccgggctaaggaccagtgatcctcggcttaaggagtgcatggatatgcttagactcaccctacagaccacatcggacggggtgatgcttgataaagacctgtttaagaagtgcgtccagtctaatatcgtcttgcttacacaagcctttcggagaaagttcgttatccccgacttcatgagcttcacaagtcatattgatgagttatacgagagcgccaagaaacagagcggtggtaaagttgccgattacatcccacagcttgcgaagttttcccctgacttatggggagtaagtgtctgcacagttgacgggcagcgccacagcactggcgacactaaggtccccttctgtttgcaatcgtgcgtgaagcccctgaagtacgccattgccgtgaacgatctgggtactgaatacgtgcatcggtacgttggcaaggagccatccggcctaaggttcaataaactgtttctgaacgaggatgacaagccccataacccgatggtaaatgcaggggcaatcgtggtcacatctctcatcaaacagggggttaacaatgccgagaaattcgactacgtgatgcagtttttaaataaaatggcagggaacgagtatgtgggcttttcgaacgccacgttccagtctgaaagagagtccggcgaccggaatttcgctattggttactacctgaaggagaagaaatgcttccccgagggaaccgacatggttggaatactggatttttatttccaactctgctcaattgaagtgacatgcgaatctgcttcggtcatggccgcgaccctggcgaacggagggttctgtccaatcaccggggagcgcgtactgtcaccagaagcagtaaggaacaccctcagcctgatgcactcctgcgggatgtacgatttttccggccagtttgcctttcatgtaggactcccagcgaaatcaggggtggcaggcggcattttgctcgtcgtgcccaacgtgatggggatgatgtgttggagccccccactcgacaagatgggaaactccgtgaagggcatccacttctgccacgatctggtctccttgtgcaatttccacaactacgacaacttacgccatttcgctaagaaactcgatccacggcgcgagggtggcgatcaacgcgtcaagtccgtcatcaacctgcttttcgctgcctatacgggtgacgtgtccgccctccgtcgctttgcgttgtctgccatggatatggagcagagagattacgactcccgaactgccctgcacgtggctgccgccgagggccatgttgaggtagtaaaattcctgctggaagcctgcaaggtgaacccatttcctaaagaccgctggaacaacaccccaatggatgaagccctgcattttggtcaccatgatgttttcaagatccttcaggagtatcaagtgcagtatacaccacaaggcgacagtgacaacggcaaagaaaatcagacagttcacaaaaacctggatgggctgctatag

SEQ ID NO: 118638 - DNA, 1797 bp, synthetic construct
  misc_feature 1..1797: note = Description of Artificial Sequence: Synthetic coding sequence
  source 1..1797: mol_type = other DNA
atgatgaggctacgaggaagcggtatgcttagggacctgctgctccgcagcccggctggtgttagcgccacactgcgtagggctcaacccctggttacgctttgtagaaggccgcggggcggcggacggccagcagccggccctgccgccgcagcgcggttgcatccctggtggggaggcggcggctggcctgccgagccacttgccagaggcctctcaagttccccttctgagatcctgcaggagcttggcaagggatctacccatcctcaaccgggagtttctccgcccgccgcccctgccgccccaggacccaaagatggaccgggtgagactgacgcttttggcaacagtgaaggcaaagagctggtggcaagtggcgaaaataaaatcaaacaggggctactgccgtctttagaggatctgctgttttacaccatcgctgagggacaggaaaagatccccgttcacaaattcatcacggccctgaaaagtacaggtctccgcacttctgatccaaggttaaaggagtgtatggatatgctgcggctaacactacagactactagtgatggggtgatgctggacaaagatttgttcaaaaagtgcgtacagtctaacattgtgttactgacccaggcctttcgccgaaagtttgtgatccccgacttcatgtcatttaccagccacatagacgagctgtacgaatctgccaagaaacagagtggcggcaaggtcgcagattatattccacagctggccaagtttagcccagacctgtggggagtaagtgtatgcactgtcgacggccaacggcattcaactggcgacacaaaggtacccttttgtctgcagtcttgcgtcaaacctcttaagtacgccattgccgtgaacgacctggggacagaatatgttcaccggtacgtgggaaaagaaccatcaggtctgaggtttaataagctctttttgaacgaagacgataaaccacacaaccctatggttaatgccggggcaattgtggtcacttctttgataaaacaaggggtgaacaacgccgaaaagttcgattatgtgatgcagttcctcaacaagatggctggtaacgaatacgttggctttagtaatgcaaccttccagagcgagagagagtcgggcgatcggaacttcgccatcggttactacttgaaggaaaaaaagtgttttcctgagggaaccgacatggtcggaatcctagatttttattttcagctctgttctatcgaggtaacttgcgaaagcgcaagtgttatggccgcgacactcgctaacggaggattctgtcctatcaccggcgaaagagtcctgtctcccgaagccgttcgcaacaccctatccttgatgcactcatgcggtatgtatgatttttcgggacagttcgctttccacgtcggactgccagctaagagcggagttgccggggggatcctgctggtcgtgcccaatgtgatgggcatgatgtgttggtcacctcctctcgacaagatgggcaactcggtgaaggggatccatttttgtcatgatttggtgtctctgtgcaattttcacaactacgacaatttgagacacttcgccaagaagctggatccccggcgggaagggggcgatcaaaggcactcattcggtcccttggattacgaatccttgcagcaggagcttgctttgaaagagacagtatggaagaaagtgtcccctgagagcaacgaggacatctccaccacagtagtttaccgtatggaatccctgggggagaaatcttag

SEQ ID NO: 118639 - DNA, 525 bp, synthetic construct
  misc_feature 1..525: note = Description of Artificial Sequence: Synthetic coding sequence
  source 1..525: mol_type = other DNA
atggggatgatgtgttggagtccacccttggataaaatgggcaattcagtaaaaggtatccacttctgccatgacttagtgagcctgtgtaactttcacaactacgataacttacgtcatttcgcgaaaaagctggatcccagaagggagggcggcgatcagagggtgaaatccgtcattaatctgctgtttgccgcatacacgggagatgttagcgccctgcggaggtttgccctttctgcgatggatatggaacagcgggactacgattctcgaacggctcttcacgttgctgctgccgagggccacgtggaggtcgtgaaattcctgctggaggcttgcaaggtgaatccgttccccaaagaccgttggaacaacacccctatggatgaggctctgcatttcgggcaccatgatgtcttcaagattttacaggagtaccaggtccagtacacgccccagggggactctgacaacggaaaggaaaatcagacagtgcacaagaatcttgacggcttgctgtag

SEQ ID NO: 118640 - DNA, 1809 bp, synthetic construct
  misc_feature 1..1809: note = Description of Artificial Sequence: Synthetic coding sequence
  source 1..1809: mol_type = other DNA
atgagaagtatgaaagctttgcagaaagctctgagccgggcgggcagtcattgcggaagaggaggctgggggcaccctagcagaagccccctcttgggtggtggcgtgcgccaccaccttagcgaggcggcagcccaaggacgtgaaacgccccactctcatcagccccaacatcaggatcatgactcttcagaatcggggatgttgagtcgactcggcgatctgctattttataccattgcagaagggcaggaaaggatacctattcacaaattcacaacagctctcaaggctaccggccttcagacctccgacccacgcctcagagattgcatgtcagaaatgcaccgagtggtgcaagagagttcctctggcggattacttgatcgcgatctgtttagaaagtgtgttagctcgaacattgtcctgctgacccaggccttccgaaagaaatttgtgatcccagatttcgaggagtttaccgggcacgtggaccggatcttcgaggacgtgaaagaattgacaggagggaaggtagcggcttacattccacagctggccaagtcaaacccagacttgtggggtgtctcactctgcaccgtcgatggacaacggcacagcgtgggccatacaaagatacctttttgtctgcagagttgcgtaaagcccctgacctatgcgataagcatctcgacgctgggaaccgactacgtgcacaaatttgtcggaaaagaacctagcggactgagatacaacaaattaagccttaacgaggaggggatccctcacaacccaatggtcaatgccggggccatcgtcgtgagctctctgattaagatggattgtaacaaagccgagaaattcgattttgttttgcaatatttaaacaaaatggctggaaacgaatatatgggatttagcaatgcaacattccagagtgaaaaggaaactggagatcgcaattatgccataggttactaccttaaagagaaaaagtgtttccccaaaggggtcgacatgatggccgccttggatctttattttcaactctgcagcgtggaagtgacttgcgagagcggttccgtgatggctgcgaccctagctaatggaggcatctgcccgatcacaggcgaatctgttttgtccgccgaggccgtccggaacaccctgagcctcatgcacagctgtgggatgtatgacttcagcgggcagtttgcttttcacgtgggtcttccagccaagagtgccgtgagcggggctattctgctcgtggtgccaaacgtgatggggatgatgtgcttaagcccccctctggacaagctgggtaatagtcaccggggaacttctttttgccagaagttggtctcactgtttaattttcacaattatgacaatctgaggcactgcgctagaaaactcgatcctcggcgggagggagccgagatccgcaataagaccgtagtgaaccttctctttgccgcgtatagcggcgacgtctctgccctgagaaggttcgcactgtctgcaatggatatggagcagaaggactacgattcgcggacagcactgcatgtagcggccgctgaagggcatatagaagtagtgaagtttctgatcgaggcgtgtaaggtgaacccttttgcaaaggataggtgggggaacataccacttgatgacgccgtgcaattcaatcacctagaagtggtgaagctgttgcaggattaccaggactcatacactcttagcgagactcaagctgaggctgcagctgaagcccttagtaaagaaaatctcgaaagcatggtctag

SEQ ID NO: 118641 - DNA, 534 bp, synthetic construct
  misc_feature 1..534: note = Description of Artificial Sequence: Synthetic coding sequence
  source 1..534: mol_type = other DNA
atgagaagcatgaaggcccttcagaaagcactgagcagagcaggttcacattgtggtcggggaggatgggggcatccttcacgtagccccctgctaggaggcggagtgcgtcatcacctgagcgaggccgccgcccaagggagagagacaccacactctcatcagccacaacatcaggaccacgactcttccgaatccggtatgctctcccgcctcggggaccttttgttttacaccattgccgaaggtcaagagaggatacccatccacaaattcacgacagcactgaaagcaacgggcctgcagactagcgatcctaggttaagagattgcatgtccgagatgcaccgggtggtccaggagagctcttccggggggctgctggatagagacctgttcaggaaatggcagccaacatctctcagctggccctcacaaacacagacgtgtggagtgagcccttgcgctctatggatggtgaacggaaccctgtgggctacacagaggagtccttctgcatgctctccggtgtag

SEQ ID NO: 118642 - DNA, 2049 bp, synthetic construct
  misc_feature 1..2049: note = Description of Artificial Sequence: Synthetic coding sequence
  source 1..2049: mol_type = other DNA
atgtgcgggatcttcgcctatatgaattaccgagtgcctcgcacacggaaggaaatatttgagactttaatcaagggcctgcaaagactggagtaccgtggttatgatagtgcgggggtcgccatcgacggaaacaaccacgaagttaaggagagacatatccagctagtgaagaagagaggaaaggtgaaggccctggacgaagagctctataaacaagattctatggatctcaaagtagagtttgaaacccattttggtattgcccacaccagatgggctacccacggcgtgccatcggccgttaattcacatcctcaaaggtcagataaggggaacgagttcgtggttattcacaacggcatcatcacaaattacaaagatttgaggaaattcctcgagagtaaggggtacgagtttgaaagcgaaactgacaccgagacaatcgccaagctgataaaatacgtgtttgataacagggagactgaggatattaccttttcaacgctggtggaacgcgtgatccagcagttagaaggggcctttgcgctggtatttaagagtgttcattacccaggggaggcggtcgccacacggaggggatccccgctgttaattggcgttcgaagtaagtataaactgagtaccgaacaaattcctatcctgtaccggacctgtacactcgagaatgtgaagaatatttgtaagacacgcatgaagcggctggacagctcggcctgtctgcacgctgtgggtgacaaggccgtggagttcttcttcgcatcagatgcctccgccattatcgaacatactaatcgggtaatcttcttggaggacgatgacatcgccgcagtggcagatggcaagctcagcatccatcgagtgaagcgcagtgcctcggatgacccatcccgggcaattcagacccttcagatggaactgcagcaaataatgaagggcaatttcagcgcctttatgcaaaaagagatttttgagcagcccgagtccgttttcaataccatgcgcggacgcgtgaactttgagacgaatacagtgctcttgggcgggctaaaggatcatctaaaagagattcgtcgctgccggcgccttatcgtgattggctgtggcacgtcctatcatgcagcggtagcaacgagacaagtgttggaagagcttacagagctcccggtgatggttgaattggcatccgattttttagaccgcaatacacctgtttttcgcgacgacgtttgcttcttcatctcccagagcggtgagacagccgatactctgctggccctgagatactgcaaggatcgaggtgcccttaccgtcggagtgacgaacactgtaggttcttctatcagccgagagacagattgcggagtgcatatcaatgctggcccagagattggcgtcgcaagcaccaaggcatacacgagccaattcatctcacttgtgatgttcggactcatgatgtctgaagatcgcatttcgcttcaaaaccggaggcaggaaattataagggggttgcgcagcctacctgaacttatcaaggaggttctctcacttgaggaaaagattcacgatctggccctggaactctacactcagaggagcttgctggttatgggtaggggatacaattacgcaacttgcctcgagggggcgttgaaaattaaggaaataacatatatgcactcggagggaatactagccggcgaactcaaacacgggccactagccctgattgacaaacagatgccagtaattatggtgattatgaaggatccctgcttcgctaaatgtcagaatgcgttacagcaagtgaccgcccggcagggtaggccaattattctgtgctccaaggatgacacagaatcatctaagttcgcttacaaaacgatcgagctgccacacaccgtcgactgccttcagggaatccttagcgtgatccccctacagctgctgtcctttcatttggccgtcctgaggggatacgatgtggactttccaagaaatttagccaagtcggtcaccgtagagtag

SEQ ID NO: 118643 - DNA, 1086 bp, synthetic construct
  misc_feature 1..1086: note = Description of Artificial Sequence: Synthetic coding sequence
  source 1..1086: mol_type = other DNA
atggccggcggtcgccataggagagtggtgggaaccctccacctattattgctggtcgctgcactcccttgggccagtcggggcgtatcccccagcgcctctgcctggcccgaagaaaagaattaccaccaacccgcaatcctgaattcatctgcccttagacagattgcagaggggacctcgatctcagagatgtggcaaaatgatctgcagccacttctgattgaacggtatcccggcagtccaggctcctatgccgcccggcagcacattatgcagaggattcaacgcctgcaggcagattgggtgttggaaattgacacctttctgtcacaaaccccatatggataccggtcattttccaacatcatatcaacactcaaccccactgcaaagagacacctggtgctagcctgccactatgacagcaagtacttctctcattggaacaaccgcgtctttgtgggggctactgactctgccgtgccctgcgctatgatgcttgagctggctcgcgccctcgacaagaagctgctgtcactgaaaacagtttctgacagcaaaccagatctgtccctccagcttattttttttgatggcgaagaggctttcttgcattggtctccccaggactctttgtacgggagtcgacacttggcggccaagatggcatcaaccccccatcctcctggcgctcgcggcacctcccagctgcatggcatggacttgctcgtactgctggacctgataggggccccaaatcccaccttccccaatttcttcccaaatagcgcccggtggttcgaaaggctgcaggctatcgaacacgaactacacgagctcgggcttcttaaagatcactctctggaaggcaggtacttccagaactattcatacggaggcgtcatccaagacgatcacatccctttccttcgccggggcgtccccgtattacatcttatcccttcaccctttcctgaggtgtggcatactatggacgacaacgaggagaacttggacgagtctacgattgataaccttaataaaattttacaggtcttcgtgctggaatacctgcatttatag

SEQ ID NO: 118644 - DNA, 939 bp, synthetic construct
  misc_feature 1..939: note = Description of Artificial Sequence: Synthetic coding sequence
  source 1..939: mol_type = other DNA
atggccggcggccgacaccgcagagtagttggcaccctgcacctactgctactcgtggcagcgcttccatgggcaagtagaggggtgtcacctagtgcttctgcatggcccgaggagaagcacatcatgcagagaattcagcggttgcaggccgattgggtgttagagatcgatactttcttatcccaaactccctatggctacagaagcttctctaacataatctccacacttaaccccaccgcaaagcgacacctggtgttagcctgtcattacgactcaaagtacttttcacactggaacaatagagtgtttgtgggggcgaccgacagcgccgtgccctgcgccatgatgctagagctcgctcgagctctcgacaaaaagcttctgtcactgaagactgtgagcgacagcaagccagatctgtcgttacagctaatcttctttgacggtgaagaggcttttctacattggtcccctcaggactctctctatgggtcgaggcatctggcggcaaagatggcaagtacaccccacccccctggggcacggggtaccagccagcttcacggcatggacctcctggtgttgctcgaccttatcggcgctccgaatccaaccttccccaattttttccctaattccgcgcggtggttcgagcggctacaggcgattgaacacgagctgcatgagctggggctgctcaaggaccactctctcgagggccgttactttcaaaactattcttacggcggagtcatccaagatgaccatattccctttctccggcggggagtgccagttctccatctgattccctctcccttccccgaagtctggcatactatggatgataacgaggaaaatctggacgagagtactattgacaacctcaataagatcctccaggtgtttgtgctcgagtacctgcatctctag

SEQ ID NO: 118645 - DNA, 2328 bp, synthetic construct
  misc_feature 1..2328: note = Description of Artificial Sequence: Synthetic coding sequence
  source 1..2328: mol_type = other DNA
atggcagcactggactcgctatccctgttcacaagcctgggtttgagcgagcagaaagcaagagaaactctgaagaattcagcactctcagcccagcttagggaggctgctacgcaggcacagcagacgctgggatcgacgatcgacaaggccacaggaatcctgctctatggtttggcgtctagactgcgagacacacgccgcctgtccttcctcgtttcgtatatcgctagcaaaaagattcacactgagcctcagttgtccgctgctttagaatatgtccgttctcacccgctggatccgatagacaccgttgacttcgagagagaatgtggcgtaggggtgattgtgactcccgagcagatcgaagaagcggtggaggccgctatcaacaggcataggccccaactgctcgtggagcgctatcacttcaacatgggcctcctcatgggcgaggcaagggccgtcctgaagtgggccgacgggaagatgattaagaacgaagtcgatatgcaggtgttgcatctgctcgggcccaaattggaagccgatctcgaaaagaaattcaaggtggccaaggctagactagaggagacggacagaagaactgccaaagatgtggtggaaaatggcgaaacagccgaccagacattgtcgctcatggagcaattgcgtggagaggccctgaaattccataaacccggcgagaactataagacacccgggtacgtcgttactcctcacaccatgaatctgctcaagcagcatctggaaataaccggcggacaagtgaggacacgctttcccccagaacctaacggcatcctccacattgggcatgctaaggccatcaattttaactttggttatgccaaagccaataacgggatctgcttcctgcgtttcgacgacactaatccggagaaggaagaggcaaaatttttcacggctatctgtgatatggttgcgtggcttggctataccccttacaaagtgacctacgctagtgactacttcgatcaattgtacgcctgggccgtggagctgatcaggagagggctggcgtacgtttgccatcagagaggggaagagctaaaggggcataatacgttgccatccccatggcgcgaccgtccgatggaggagtccctgctgctctttgaggccatgcggaagggaaaattttccgagggcgaggccacactgcgaatgaagctggttatggaggatggaaagatggaccctgtggcttaccgtgtaaagtacaccccacatcaccgcacaggggataaatggtgcatatatcctacctacgactacacccactgcctttgcgacagtatagagcacatcacacattcactgtgcaccaaggagtttcaggctcgacggtcgagctatttctggctttgcaatgcgctggacgtctattgtcctgttcagtgggagtacggccggctgaacctccactatgcagtcgtatccaagcgaaagattctgcagttggtggccaccggggcagtgcgggattgggatgaccctcgcctgtttaccctcaccgctctccgaaggcggggtttccctcccgaggctatcaataacttctgtgctcgagttggcgtcactgtggctcaaacaactatggaaccccatctcctcgaagcatgcgttagagatgtgctgaacgacaccgccccccgcgccatggcagttttagaatccctgcgggtcattataacaaactttcctgccgctaaaagtctagacatccaggtgcctaacttccccgccgatgaaactaaaggcttccatcaggttcctttcgcgcctatcgttttcattgagcgcactgatttcaaggaagagccagaacctggctttaaacgcctggcatggggccagcccgttggactacgccatacggggtatgtcatagagctccaacacgttgtgaaaggaccaagtggttgtgtggagtcgcttgaagttacttgccgccgagcagatgccggggaaaagcctaaggccttcattcactgggtgagccagcctttgatgtgtgaagttcggctatacgagcgcctattccagcataagaatcctgaggacccgaccgaggtccccggaggatttctaagcgatcttaaccttgcctccctgcacgtggttgatgcagctctagttgattgctccgtggctcttgctaaaccgtttgacaaatttcaattcgagcgacttgggtacttctcagtggacccagacagccatcaaggaaaattggtcttcaatcgcaccgtaaccctgaaggaggaccccggcaaggtgtag

SEQ ID NO: 118646 - DNA, 2295 bp, synthetic construct
  misc_feature 1..2295: note = Description of Artificial Sequence: Synthetic coding sequence
  source 1..2295: mol_type = other DNA
atggccgccttggacagccttagcctgtttacttccctcgggctcagtgagcagaaggccagagagactctcaagaatagcgccctgtctgctcagctccgggaggccgcaacccaggcacaacaaacacttggcagcaccatcgacaaagctacaggcatcctgctgtatggacttgctagtcggctccgcgatactaggagactgtcattcctcgtctcttatatcgccacggccctcgaatacgtgcgttcccatcctctcgatccgatcgacactgtcgattttgagcgggagtgtggggtgggagtgatcgtcactcctgagcaaatcgaagaggccgtggaggccgccataaaccgccaccggccgcagttgctggtggagcgatatcattttaatatggggctcctcatgggagaggctcgggctgtcctgaagtgggccgacggaaagatgattaagaacgaggtggacatgcaggtgctgcacctcctggggccaaagttagaggctgatctggagaaaaaattcaaagtcgcaaaggctcgattagaagagactgacaggcggacagcaaaagatgtggttgaaaacggggagaccgccgaccaaactctctccctaatggaacaactgcggggcgaagccctcaaatttcataaaccaggcgagaactacaaaacacctggatacgtggttacgccccacacaatgaatctgctaaaacagcacctggaaataacaggggggcaagtaaggacccggtttccccccgaacccaatgggatcctgcatattggccatgccaaggcgattaactttaatttcggatacgccaaagcaaacaacggcatctgcttcttgcgtttcgatgatacaaaccccgagaaagaggaagccaagtttttcacagccatatgcgacatggtcgcctggctaggttacacaccctacaaagttacatatgcgtccgattattttgatcagctgtatgcgtgggccgtggaactgattagaaggggattagcctatgtgtgccatcaacgtggggaggagcttaaaggccataacacacttccaagtccctggcgtgacaggcccatggaagaaagcttgctcttattcgaagctatgcggaagggtaaattcagcgagggcgaagccacactcaggatgaaattggtgatggaggatggcaaaatggacccagtcgcctatagggtgaaatacacgccgcatcacaggactggcgataaatggtgcatttacccaacatacgattacacacactgtctatgtgatagcattgaacatattacgcattctctgtgcaccaaagagttccaagcacgccgctcctcttacttttggctatgtaatgctctggacgtgtactgcccagttcagtgggagtacgggcgactgaacttgcactatgccgtggtcagtaaaaggaaaatcctgcagctcgtagcgactggggctgtacgcgactgggatgacccgaggctgttcacactcacagcactccgtaggagaggatttcctcccgaagccataaacaacttctgcgccagggtaggagtcaccgtggctcaaacaacaatggagccccacctgctggaggcctgtgtgcgggatgtgttgaacgacaccgcgccacgggctatggccgtgctggagtccttgagagtcattattactaatttccccgctgcgaagagtctggacatacaggtcccaaactttccggcagacgaaaccaagggttttcaccaggtaccttttgcccccatcgttttcatcgagaggaccgactttaaggaagaacctgagcctggattcaagagattagcctggggccagcctgttgggctccgtcatacgggttatgtaattgaacttcagcacgtggtgaaaggaccctctggctgtgtggagagtcttgaggttacatgtagaagggccgatgccggcgagaaaccgaaggcgtttatccactgggtctcccagcctctgatgtgcgaggtgcgtctgtatgagaggctctttcagcacaaaaaccccgaggaccctaccgaagtcccagggggctttttgagtgatctgaatctggcatcacttcatgtggtggatgccgccctggtcgactgctcagttgctctggcaaagccttttgataaattccaatttgagaggctgggatatttttctgttgacccagattcccaccaggggaaactcgtgttcaacaggaccgtcaccctgaaagaggatccaggcaaagtgtag

SEQ ID NO: 118647 - DNA, 849 bp, synthetic construct
  misc_feature 1..849: note = Description of Artificial Sequence: Synthetic coding sequence
  source 1..849: mol_type = other DNA
atgcccacatgccgcctggggcccaagtttctcttggtctccggggtcagtgctatggccgccttggattccctttcgctttttacttctctagggttaagcgaacagaaggctagagaaaccctgaaaaattccgctctcagcgctcaattgcgagaagctgccacgcaagctcagcaaactttgggctctacaatcgacaaagctactggcatcctgctctatggcctagcctcgagactaagagacacccgccggttatcattccttgtttcctatattgcatctaagaaaatccacactgaaccacagttgagcgcagcccttgagtacgtgcgttctcatccccttgacccaatcgatactgtagacttcgagagagagtgcggcgtaggggtcattgtgacaccagaacagatcgaggaggccgtggaagccgcgatcaaccgacacagaccacagttactcgtggaaaggtaccattttaatatgggcctgctgatgggtgaagcgagggccgtactcaagtgggcagatggtaaaatgatcaagaacgaagtggatatgcaggttctgcatctcctcggcccaaaacttgaagccgacctcgaaaaaaaatttaaagtcgccaaggccaggcttgaggagacggacaggcgtaccgctaaggatgtagttgagaacggcgagacggctgatcagacactgagtctcatggagcagttaagaggcgaagcgttaaagttccacaaaccaggcacttaccccgtacccgccaggacacagtggaacccagcttattggacatgccaatcacaccagttccaactgtggttatgccaagtgtag

SEQ ID NO: 118648 - DNA, 2874 bp, synthetic construct
  misc_feature 1..2874: note = Description of Artificial Sequence: Synthetic coding sequence
  source 1..2874: mol_type = other DNA
atgaatttcgccgaacgagagggcagcaagcggtattgcattcagactaagcatgtggctattctttgtgctgttgtggtgggcgttggtctcatcgttggcctggctgtcggcctcactaggtcttgtgactcctcaggagacggtggaccaggtaccgctcctgctccatctcacctgcccagctccaccgccagcccgagcgggccccccgcccaggatcaggatatctgccccgccagcgaggatgagagcggacaatggaaaaactttcgccttccagactttgtgaatcctgtgcactatgacctgcacgtcaagccgttgttggaggaggacacttatactggcacagtcagcatctccatcaatctctctgccccaacccgctacctgtggctgcatcttagagaaactagaatcaccagactccccgagctgaaacgcccatcaggcgaccaagttcaggtgcgccggtgctttgagtacaagaaacaggagtatgtagtagtggaggcagaagaggagcttaccccctccagcggtgacggactctatctgctgaccatggagtttgcaggctggttgaatggatcactggtgggcttctaccgcacaacatacaccgagaatggccaagtgaagagtatagtggccaccgaccacgaaccaactgatgcccgcaagtcttttccctgtttcgatgagcccaacaaaaaagccacctatactatttctatcacacacccaaaagaatatggtgctctgagcaacatgcccgtggctaaagaggagtccgtcgacgacaagtggacccgtaccacctttgaaaaaagcgtgcccatgagtacataccttgtatgttttgccgtgcaccagtttgactcagtgaagcggatctcgaactctgggaaacctctgactatatacgtgcagccagaacagaagcacaccgctgagtacgctgccaacattacaaaatccgtcttcgactacttcgaggagtatttcgcgatgaactatagtctacctaagctggataagatcgccatccctgatttcggaacgggagccatggagaattggggattaatcacctaccgtgaaacaaatctgctttatgaccccaaggagtccgcgtcaagtaatcaacaacgggtggctaccgtggttgcacacgaattagtgcaccagtggttcggcaacatcgtgactatggactggtgggaagatctatggctgaacgaaggctttgctagtttctttgagttcctgggcgttaaccatgccgagaccgattggcagatgcgcgatcagatgctgctggaagatgtactacccgtgcaggaggatgactccctgatgagttctcacccaattatcgtaaccgttactactcccgacgagattacaagcgtcttcgatggcattagctactcaaaagggtcttctattctccgtatgctagaagattggattaagcccgaaaactttcagaagggatgtcagatgtatctggaaaagtaccagtttaagaatgcaaaaacatctgatttttgggcggcactggaggaggcgtcacgcttgccggtgaaggaggttatggacacctggaccagacaaatggggtacccggtgcttaatgtaaacggtgtgaagaatataacccagaagcggttcttgcttgacccccgcgcaaacccctcacagccccctagcgacctcggctatacatggaatatccctgttaagtggaccgaggataatatcacgagctctgtcttgttcaacaggtcagaaaaggagggcatcaccttgaacagtagtaatccatcaggcaacgcgttcttgaagataaatccagatcacatcggattctatcgcgtgaattacgaggtcgcgacatgggattcaatagccacagccctgagcttgaatcacaagactttctcttccgccgatcgtgcctcactaattgacgatgcttttgcactggcaagggcccaattactcgattataaggtggccttaaacctcacaaagtacctcaagagggaggaaaactttttgccctggcagcgagtaatttccgccgtgacgtacatcattagcatgtttgaagacgataaagagttataccccatgatagaagaatattttcagggccaggtgaaacccattgccgacagtctgggttggaatgatgccggggatcatgtgaccaaactgctgagatcatcagttctgggctttgcctgtaagatgggtgacagggaagctttaaacaatgcatcaagcttatttgagcaatggctgaacggcaccgtgagtttacccgtgaatctgaggctactcgtgtacagatatggcatgcagaactctggaaatgaaatcagttggaactacaccctagaacagtatcaaaaaaccagcctcgcacaagaaaaggaaaaactgctgtacgggctggcgagcgttaaaaacgtgacgctcctgtccagatatctggacctgcttaaggacactaatcttataaagacacaagacgtttttacagttattcgctatatatcttacaactcttacggaaagaatatggcatggaattggattcagctgaattgggattatctggtgaatcgttatacattgaacaaccggaacctcgggcggatagtaaccattgccgagcccttcaacaccgagctccagctgtggcagatggagagtttcttcgctaagtatccccaggcaggcgcaggtgagaagccgagagaacaagtgctggagactgtgaaaaataatattgagtggctcaagcaacacagaaacaccattcgtgagtggttcttcaatttattggagtctggctag

SEQ ID NO: 118649 - DNA, 4539 bp, synthetic construct
  misc_feature 1..4539: note = Description of Artificial Sequence: Synthetic coding sequence
  source 1..4539: mol_type = other DNA
atggcgacactaagtttgaccgtgaattccggggatcccccattgggggcattgctggctgtggaacacgtgaaggacgacgtttccatttctgtggaagagggaaaggagaatatccttcacgtctctgagaacgtaatctttacagacgtgaattctattctccggtacttggccagggtggccactacagccggtctttacggcagcaatttgatggaacacacagagatcgaccactggttggagttttccgctactaaattatcatcttgcgattcattcacatcaaccattaacgagctgaaccattgcctttccctaagaacctatctggtcggaaattctctgagtctggcagatctctgcgtatgggcgactctgaagggcaatgcagcctggcaagagcagctgaagcaaaaaaaagctccggtgcatgtcaaacgctggttcggcttcctggaagcacagcaggcttttcagtccgttgggacaaaatgggacgtatccaccaccaaggccagagttgcgccagagaagaagcaggacgtgggcaagtttgttgagttgcctggcgccgaaatgggcaaggtgaccgtgcgcttcccccccgaggcaagcggttacttacacattggccacgccaaggccgccctcctcaaccagcattatcaagtgaattttaaagggaaattgataatgaggtttgacgacacaaatcccgagaaggagaaagaagattttgagaaagtgattctcgaggatgtcgctatgttacacattaagcctgatcagtttacttacaccagcgaccacttcgagaccattatgaaatacgccgagaagctgattcaagagggaaaggcatatgtggatgacactcctgccgaacagatgaaggctgagagggagcaaaggatcgactcaaagcacaggaaaaatcctatagagaagaatcttcaaatgtgggaggagatgaagaagggcagccagttcgggcagagctgctgtttgcgggcaaagatcgatatgagctcaaataatggatgtatgagagatccgacactttaccgctgtaagatccagccacacccgaggactggtaacaaatacaacgtgtacccaacttatgactttgcctgtcccatagtggatagcattgaaggtgttactcatgccctaagaacaacagagtaccatgacagagacgagcaattttattggattattgaagctctaggtatccgcaaaccctatatctgggaatatagccggctcaacctgaataacactgtactttcgaagcgtaaactgacctggtttgtgaatgagggtctcgtggatggctgggatgatccaagatttcctaccgtgaggggtgtgctaagaagaggtatgaccgtcgaaggcctgaagcagtttatagccgcccaggggtcttcccgttctgtcgtcaatatggagtgggataagatatgggccttcaataaaaaagtgatagaccccgtcgccccacgctatgtggcacttctgaagaaagaagttatccccgtgaacgtccccgaagcccaggaggaaatgaaagaggtggccaaacaccccaaaaatcctgaggtaggtctgaagccagtctggtacagccctaaggtcttcatcgagggcgccgatgcagagacatttagcgagggcgagatggtcacattcattaactggggaaacttgaatatcaccaaaatccacaagaacgcggatgggaaaatcatttcgcttgatgccaaattgaatcttgagaacaaggactacaagaaaacaaccaaggtgacttggctcgccgaaacaacccacgccctaccaataccagtgatctgcgtgacctacgagcacctgattaccaaaccagtgcttgggaaggatgaagacttcaagcaatatgtcaataagaactctaaacacgaggagctgatgctcggcgatccatgtctgaaagatctgaagaagggcgatattattcagctgcagcgcaggggattttttatttgtgatcagccttacgaaccagtatccccctattcttgtaaagaagctccgtgtgtgctgatatatatcccagacgggcatacgaaggaaatgcccactagcgggtctaaggaaaagaccaaggttgaggctacaaagaacgagaccagcgcaccctttaaggaaagaccaacacccagcctaaacaataactgtacaacctccgaagactcacttgtgctttataacagagttgccgtgcaaggagacgtagtgagggaacttaaagcaaaaaaggctccaaaagaggatgtcgatgctgcggtcaagcagcttctgtcactcaaggccgagtacaaggagaaaactgggcaagagtataaacccggcaaccctccagcagaaatcggacaaaacattagttcaaactcatccgctagcattctcgagagtaagagcctttacgacgaggttgctgcacaaggcgaggtcgtgcgtaagctcaaagccgagaagtcacccaaggccaaaattaatgaagccgtagaatgtctgctctcactgaaggcccagtacaaggagaagacaggcaaagagtacattccaggccaaccacctctgtctcagagcagcgattccagccccacgaggaactctgaaccagccggtctggaaaccccagaggcaaaggtgttgttcgacaaagtagcctcacaaggggaggtggtccgcaaactcaagacagaaaaagcaccaaaagaccaggtcgatatcgccgtccaagaattacttcagctcaaggcacagtataagagcttgatcggggtcgagtataagccggtcagcgccactggagctgaggacaaagacaagaagaaaaaggaaaaggagaataaatccgaaaaacagaataagccacagaagcagaatgatgggcaaaggaaagacccctccaagaatcagggaggtggcttatcttcgagcggagccggagagggccaaggtccaaagaagcagacacgtctgggcctggaggccaagaaggaagaaaaccttgctgattggtacagccaggtcataacgaagtcagagatgatcgagtaccacgatattagtggctgttatatcctccggccttgggcctatgctatctgggaggctatcaaagacttcttcgatgcagaaatcaagaagctcggcgtggagaattgctacttccccatgtttgtgagccagagcgctctggagaaggagaagacccacgtcgccgatttcgcccccgaggtggcctgggtaactagatccggcaagaccgagttggcagaacccattgcaatccgacccacctccgaaacagtaatgtatcctgcttacgccaaatgggtgcagtcccatagggatctgcccatcaagttgaatcagtggtgtaacgtggtccgctgggaatttaaacacccgcagccgtttttgcggacccgagagttcctgtggcaggagggccattctgcttttgccaccatggaagaagccgctgaagaagttctccagatccttgacctctacgctcaggtatatgaggagttattagcaattccggtggtcaaaggaagaaagacagagaaggaaaaattcgctggtggggattacacaacaaccatcgaagcgtttataagtgccagtggacgcgctatacaggggggaacttcccatcatctgggacagaacttttctaaaatgttcgaaatagtcttcgaggatcccaagatcccaggagagaaacagttcgcctaccagaactcctgggggctcactactaggacgattggtgtcatgacaatggtgcatggagacaacatgggcctggtgcttccacccagggttgcttgtgtgcaggtggtgattataccttgcggcattacgaacgccttgtctgaggaagacaaggaagccctgattgccaaatgcaacgattataggagacgcctcttgtcagtgaacatccgggttcgggcggacctgagggacaactactcccccgggtggaagttcaatcactgggaactcaagggggtccccatcaggctcgaggtgggacctcgagatatgaagtcttgccagttcgtcgcagtgcgtcgcgataccggcgagaagctcacagtcgcagagaacgaggccgaaaccaagctgcaggctatcctggaggacattcaggtgacactgttcactagggcctccgaagaccttaaaactcatatggtggtggcaaataccatggaagactttcaaaaaatattagatagcgggaagatcgtccagatacccttctgtggcgagatcgactgcgaggactggataaaaaaaaccacagcacgcgaccaggacttggaacctggcgcaccgtcgatgggcgccaaatctctgtgtattccatttaaacctctctgcgagctgcagcctggtgccaaatgtgtatgcggtaagaaccctgccaaatattatacactcttcggcagaagctactag

SEQ ID NO: 118650 - DNA, 2964 bp, synthetic construct
  misc_feature 1..2964: note = Description of Artificial Sequence: Synthetic coding sequence
  source 1..2964: mol_type = other DNA
atggccacactgtcactgactgtgaatagcggggatcctccccttggcgccttgctggcggtcgaacacgtcaaggacgacgtctccatcagtgtggaggagggtaaggagaacattctgcacgtcagtgagaacgtgattttcactgatgtcaactcaatattgagatacctggctcgcgtcgcaaccaccgccggcctgtacgggagtaatttgatggaacatacagagattgaccattggctcgagttttctgctacaaagttgagttcctgcgattcatttacctctaccatcaacgagcttaatcactgcctttccctgcggacttatctcgtaggaaactcccttagcttagccgacctatgtgtctgggcaaccctaaagggaaacgctgcctggcaggagcagctgaaacaaaagaaggcaccagttcacgtaaagcgatggtttggcttcctcgaagcccagcaggcttttcagtcagttggcaccaaatgggacgtgtccaccaccaaggcgcgtgtggccccagagaaaaaacaagacgtgggcaaattcgtggagctgcctggagcggagatgggtaaggtcacagtgaggttccccccagaagctagtgggtatctgcacatcggccatgctaaagccgctctgttgaaccagcactaccaagttaacttcaagggaaagctcatcatgcggtttgacgacaccaaccctgagaaagaaaaggaggatttcgagaaagtgattaagagtgtcgtgatgacgctgtgccagaagtcaatcaaggtgacggggctgccgaacacattcatggtgattttagaggatgtcgccatgcttcacattaagccagaccagttcacctatacgagtgatcacttcgagacaattatgaagtacgcggagaagctcatccaagaggggaaggcatacgtcgatgatacacccgccgagcagatgaaggcagagcgggagcagaggattgatagcaaacatagaaagaaccctatagaaaagaatctgcagatgtgggaggagatgaaaaaagggtcccagttcggacaatcttgttgcctgcgcgctaaaatcgacatgtcttcgaacaacggctgtatgagagacccaactctgtatcgctgcaagatacaacctcatccacgcactggaaataaatacaacgtgtacccgacgtacgacttcgcatgtcctatcgtagattccatcgagggcgtgacccatgccctgcggacaacagagtaccacgaccgcgacgaacagttttactggatcatagaagcccttgggatccgcaagccgtacatttgggagtatagtcgcttaaacctgaacaataccgtcctttccaagcgcaagctaacttggttcgtaaacgaggggctcgtggacgggtgggacgatcctcggttccctactgttaggggagtcctaagacgtgggatgactgttgaagggctcaagcagttcattgctgcacagggctcatctagaagcgtcgtaaatatggaatgggacaagatttgggctttcaacaagaaagtgatcgatccagtggcacctaggtacgtggcattgcttaaaaaggaagtcattcctgtaaatgtgccagaagcacaggaagagatgaaggaggtggctaagcatccgaagaaccccgaggtaggcctaaagcctgtctggtactcgccaaaggtgtttatcgaaggcgctgatgccgaaacattctcggagggggaaatggtcacttttatcaattggggcaacctgaatattactaagattcacaaaaatgctgacgggaagatcatcagtctggatgccaagcttaatctcgagaacaaggactacaaaaagactacaaaagtaacctggctcgctgaaacaacacatgccctgcccatcccggtaatttgcgtgacttacgaacacctcataacaaagcctgtgctcgggaaagatgaagatttcaaacaatacgtcaacaagaatagtaaacacgaagaactgatgctgggcgatccatgcttgaaagacctaaagaaaggtgatatcattcagctccaacggaggggctttttcatatgtgaccagccctacgagcccgtctccccatactcatgcaaggaagctccgtgtgtgctgatctacattcccgatggacacaccaaggagatgccgacatccggctcaaaggaaaaaaccaaggtcgaagcaaccaaaaacgagacatctgcccccttcaaagagcggccaacaccttctctaaataacaactgcactacaagtgaggattccttggtgttgtataaccgcgtggccgttcagggagatgttgtgcgcgaactgaaggcaaaaaaagctcccaaagaggacgtcgatgcggcagtaaagcagctgctctctctcaaggcagaatataaggagaagactggacaggagtacaaacccggaaaccctcctgctgaaatcgggcagaacatatcctccaactccagcgcgtctatcctggagtctaagtccctgtacgacgaagtggctgcccagggagaggtggtacgtaagctcaaagcagagaaatcaccgaaagccaaaatcaatgaggcagtagaatgccttctgtctctgaaagcccagtacaaagaaaagactgggaaggaatacattccgggacagccaccattaagccaaagtagcgactccagccccactcgtaacagcgagccggctggcctagaaacgccagaggcaaaggtactattcgataaagtggcctcccagggcgaagtcgtacgcaaactgaagaccgagaaggcacccaaggaccaagtggacatcgcagtgcaagagttgttgcaactgaaggcccaatataaaagcctcataggggtggagtataaacctgtcagcgccaccggtgcagaagacaaggataaatag

SEQ ID NO: 118651 - DNA, 2928 bp, synthetic construct
  misc_feature 1..2928: note = Description of Artificial Sequence: Synthetic coding sequence
  source 1..2928: mol_type = other DNA
atggctactctctctctgacagtgaatagcggcgacccgcctcttggggcactgttagccgtggagcatgttaaggacgacgtgtctatttctgtggaggagggaaaagaaaatattttgcacgtttcggagaacgtgattttcacagacgtgaactcgattctgaggtacctcgctcgagtggccaccaccgctggtctctatgggtcgaatctaatggagcataccgagatcgaccattggctagagttttccgccactaaactctctagctgtgactcctttaccagcactatcaacgaactcaatcactgtctctccctgcggacatacctggtagggaacagcctttcacttgctgacctctgtgtttgggccaccctgaaagggaatgccgcatggcaggaacagctgaaacagaaaaaggcccccgtacacgtgaagcgatggtttgggttcttagaagcacaacaggcctttcaaagtgtagggacgaagtgggacgtatcgacaacaaaggcacgagtcgcccccgagaaaaagcaagacgtgggcaagtttgtggagttgccaggcgccgagatgggaaaagtgaccgtcaggttccctcctgaagcatcaggttacctgcacataggacacgccaaagcggcactcctcaatcagcattatcaggtaaatttcaagggcaaattaatcatgagattcgacgatacgaacccagaaaaagagaaggaggatttcgagaaggttattctggaggacgtcgctatgctgcacatcaagccagaccagtttacatatacctctgatcactttgaaaccattatgaagtacgccgaaaagctcatacaggagggtaaagcatatgtcgacgatacccctgcggagcaaatgaaggccgagagggagcaacgcatcgattcgaaacatcgcaagaaccctattgaaaaaaacctccagatgtgggaggagatgaaaaagggctcccaatttggacaatcttgctgcttgagggcgaagattgatatgagttccaataacggatgtatgagggacccaactctctacagatgcaaaatccagcctcacccgcgtaccgggaataaatacaacgtctacccaacctatgactttgcatgtccaattgtggactcgattgagggagtgacacacgctctgcggacaaccgaataccacgaccgggacgagcagttttattggatcatcgaagccctgggtatccgaaagccttatatctgggaatatagccggctgaacttgaataatacagtgctgtcaaaacggaaactgacatggttcgtgaatgaaggactggttgatggatgggatgaccctagattccccacagtccggggtgttctgagacgcggcatgacagtcgaagggctaaagcagtttattgccgcccagggcagttccaggagtgtggtcaacatggagtgggacaaaatttgggcttttaacaagaaattacgcgccctctgtaaaaaggtcatcgaccctgtcgccccgcgttatgtcgctctgcttaaaaaagaggtcatcccagtgaacgtcccagaggcccaggaagaaatgaaggaagttgctaagcatcccaaaaaccctgaggtcgggctgaaacccgtgtggtactcacctaaagtctttatcgaaggggcggacgccgaaacattctccgagggggaaatggtgacatttattaactggggaaacctgaatattaccaagatccacaagaatgccgacggcaagatcatctccctggatgccaagctcaatctggaaaataaggattacaaaaaaactaccaaggtcacctggctggcagagaccactcatgctttaccgatcccagtcatatgcgttacttatgagcacttgatcacaaagcccgtgctgggcaaggacgaggactttaagcaatacgtgaacaagaatagcaaacatgaggagctgatgctgggggatccttgtctgaaagacctaaagaagggagacatcattcagttgcagaggcggggcttctttatttgcgaccagccttatgagcccgtgagtccctattcttgcaaagaggcaccgtgtgtgttaatttacattcccgacgggcacaccaaagagatgccaaccagcggctctaaagagaaaacaaaggtggaagcaacaaaaaacgagacctccgcaccgttcaaggagaggcccactcctagtctgaacaataattgtacgacctcagaagattccctggtcctctacaacagagttgccgtccagggcgacgtggtcagggaattaaaggctaagaaagccccgaaagaagacgtagatgcagccgtgaaacagttgctttccctgaaagcagaatataaggagaaaacgggccaagagtacaaacccggtaatcctcctgccgagattgggcaaaatatatcctctaatagcagcgcctctatattggagtctaagtctttgtacgacgaggtggccgcacagggcgaagttgtccgcaagctgaaagccgagaagtcccccaaagcaaagattaacgaagctgttgagtgtctgttgagccttaaggcccagtataaggaaaagaccgggaaggagtacatacccggtcaaccacctctttcacagtcttctgattcatcccctacccgaaactctgaaccagcgggccttgagactcccgaggccaaagtgttgtttgataaggtggcttcacaaggtgaagtcgtaagaaagctgaaaaccgaaaaggcacctaaagaccaggtggacatcgcggtccaggagctgctgcagttgaaagcacagtacaagtccttaattggggtcgagtacaaacccgtcagtgcgacaggagccgaggacaaggataaaaagaagaaagagaaatag

SEQ ID NO: 118652 - DNA, 1572 bp, synthetic construct
  misc_feature 1..1572: note = Description of Artificial Sequence: Synthetic coding sequence
  source 1..1572: mol_type = other DNA
atggccgctctgctgagacgtttgctacaaagggaacggccaagcgccgccagcggcaggcccgtaggcagacgcgaggcaaatctcggaacagatgccggcgtggcagtgcgcgtgaggttcgcaccttcgccgacaggattcctgcatctagggggactgagaaccgcgctgtataactacatattcgcaaaaaagtaccagggatcgttcattttgcgcctggaagacaccgaccaaacgagggtcgtgcctggggctgccgagaacattgaagacatgcttgagtgggcagggatacctcccgacgaatcccctcgccgtggcgggccagccggaccctaccagcagtcacagcgcttggagctttacgcccaggccacagaagcactgctgaagactggggcggcgtatccgtgcttctgttcaccccaaagactcgaattgttgaagaaggaggctctgaggaatcaccagacccctcgctacgacaaccgctgtaggaacatgtctcaggaacaagtcgcccaaaagcttgccaaggatcccaagcctgccatcagattccgcctggaacaggtggtccccgccttccaagaccttgtttatggatggaatcgccatgaagtggccagcgttgaaggagaccccgtaataatgaagtctgacgggttccccacataccatcttgcatgcgtggtggatgaccatcatatgggcatctcccatgtcctccgcggcagcgaatggctcgtttccacagctaagcacctactgctgtaccaagctctgggttggcagccccctcactttgcccacctgccccttcttctcaaccgcgacggatccaagctatccaagaggcagggtgacgtcttcctcgagcattttgcggctgacggcttccttccagactccttattggacatcatcacgaattgtgggagcgggttcgcagagaatcagatgggacgaaccctgcctgagctgatcacacagtttaatttaacacaggtaacctgccactctgctctgctggatctcgagaagctgcccgagtttaacaggttgcatctgcagcgcctcgtgtccaatgagagtcagcggcggcagctggttggaaaattacaggtcctcgtggaggaagcatttggttgtcagttacagaaccgggacgtgttgaatccagtttacgtggaacgtatccttctgttgaggcagggacacatttgccgtctgcaggacctggtgtcgcccgtatattcgtacctgtggacccggcccgccgtcggccgagcccaattggatgcaatatccgagaaggtggacgttatcgccaagcgagtgctcgggctgctggagcgttcaagcatgagtctgactcaagacatgctgaacggagagctgaagaaactaagtgaggggttggaggggacgaagtatagtaacgtaatgaaactcctccggatggctctatccgggcagcagcaaggcccacctgtcgcagaaatgatgcttgccctgggaccaaaggaagttcgggagcggattcaaaaggtcgtgtccagttag

SEQ ID NO: 118653 - DNA, 1572 bp, synthetic construct
  misc_feature 1..1572: note = Description of Artificial Sequence: Synthetic coding sequence
  source 1..1572: mol_type = other DNA
atggccgcccttctcagacggctgctgcagcgagaaagaccatctgcagccagcgggagacctgtgggccgacgtgaggctaacttgggcacagatgctggcgtggccgtgagggtccgttttgcccccagtcccacaggtttcctacatctgggaggcctccgaaccgctttatataactacatcttcgccaagaagtatcaaggttccttcatccttcggctcgaggatacagatcagactcgagtggttccaggggcagctgaaaacattgaagacatgctggaatgggcaggaatcccccctgatgagagcccccggaggggcgggccagccgggccttaccaacagtctcaacggctcgagctgtacgcacaagcaacagaagccctgctgaagactggagccgcctacccctgcttctgcagcccgcagaggcttgaactcctcaaaaaagaagcgttgcgtaatcatcaaactccccggtacgataataggtgccggaacatgtcccaggaacaggtagctcagaaactggctaaagacccaaagcctgccatcagatttagactggagcaagtggtccccgctttccaggaccttgtctacggttggaatcgccacgaggttgccagcgtcgaaggggaccctgtcatcatgaagtccgacggcttccccacctatcatctggcctgtgtagttgacgaccatcacatgggtatctctcatgtgttaaggggctccgagtggctagtgtccaccgcaaagcatctccttctttaccaggccctcggctggcagccccctcattttgcacatttgcccctactattgaacagagacggtagtaaacttagcaagagacagggggatgtgttcctggagcacttcgctgcagacgggttcctccctgattcacttctggatatcatcacaaattgtggaagcggatttgcggagaaccaaatgggcagaactttgcccgagttgatcacacagttcaatctcactcaggtgacttgccactcagctctccttgatttagagaaattgcccgaattcaatcggctccatctgcagcgactcgttagcaacgagtcacaacggagacagttggtggggaaacttcaggttctagtggaggaagccttcggttgccagctccagaaccgagacgttctgaatcccgtgtatgtggaaagaattctgctcctgagacaggggcacatttgccggctacaggacctagtttcaccagtttactcttatctgtggaccaggccagccgtaggccgagcccaacttgatgcgatttctgagaaggttgatgtgatcgctaaaagggtcctgggactcctcgagaggtcatctatgtcactgacgcaggacatgcttaacggtgagcttaagaaactgtcagagggccttgagggaactaaatacagcaatgtgatgaagctcctgagaatggcactgagcgggcagcagcagggccctccagttgcagagatgatgctggctctcggaccaaaagaagtgagagaacggattcagaaggtggtgtcttcttag

SEQ ID NO: 118654 - DNA, 321 bp, synthetic construct
  misc_feature 1..321: note = Description of Artificial Sequence: Synthetic coding sequence
  source 1..321: mol_type = other DNA
atggctcaggagtttgtcaattgcaagatccaacccggaaaggtcgtcgtgttcatcaagcctacctgcccatattgcaggcgagctcaggagattctgagtcagttacctatcaaacaaggactgctggaattcgtggatattaccgccactaatcataccaacgagatccaagattatctgcaacaactgacgggggctcgcactgtacccagggttttcatcgggaaagattgtattggggggtgcagtgacttggtgtccctgcagcagagcggtgagctgctgacccgcctgaagcagatcggtgccctgcagtag

SEQ ID NO: 118655 - DNA, 321 bp, synthetic construct
  misc_feature 1..321: note = Description of Artificial Sequence: Synthetic coding sequence
  source 1..321: mol_type = other DNA
atggcccaagaatttgtcaattgcaaaatacagccaggtaaggtggtggttttcatcaaacccacttgcccatactgtagaagggcacaggaaatcctgtcccagctacccattaagcagggcctgctggaatttgtggatattacagctaccaaccacaccaatgagattcaggactatctgcagcagctgacaggggcccgtacagtacctagagtttttattggtaaggattgtatcggcggctgctccgacctggtctctttacagcaaagcggtgaattactgactcgcctaaagcaaatcggagccctgcagtag

SEQ ID NO: 118656 - DNA, 321 bp, synthetic construct
  misc_feature 1..321: note = Description of Artificial Sequence: Synthetic coding sequence
  source 1..321: mol_type = other DNA
atggcacaagagtttgtgaactgcaagatccagcctggtaaggtggtagtgtttatcaagccgacttgcccctattgcagaagagcacaggaaatcctaagtcagcttcccatcaagcaaggcctgctcgaatttgtggacatcaccgctaccaatcacacaaatgagatacaggactatctgcagcagctgaccggggctcgcactgtcccacgcgtgtttatagggaaggattgtatcggtggctgctctgacctagttagcttgcaacagtccggtgaactcctcacaaggctgaagcaaataggtgccctccaatag

SEQ ID NO: 118657 - DNA, 321 bp, synthetic construct
  misc_feature 1..321: note = Description of Artificial Sequence: Synthetic coding sequence
  source 1..321: mol_type = other DNA
atggcgcaggaatttgttaattgcaaaatccagccaggtaaggtcgtggtgttcataaagccaacctgtccatactgtaggcgcgctcaagaaatcctatcccagctcccaatcaaacagggtctcctggagttcgtggatatcacagccacaaaccacaccaatgagattcaggactacctgcagcaattgaccggagcccgcaccgtgccaagggtctttattggtaaggactgcattggaggatgttcggatctggtctccctgcagcagagcggagaactactgacccgcctgaagcagataggtgccctccagtag

SEQ ID NO: 118658 - DNA, 321 bp, synthetic construct
  misc_feature 1..321: note = Description of Artificial Sequence: Synthetic coding sequence
  source 1..321: mol_type = other DNA
atggctcaagagtttgtcaattgtaaaatccagccaggcaaagtggtggttttcataaaaccaacctgtccttattgtagacgggcgcaagaaatacttagccagctgccaatcaagcagggactgctggagttcgtcgatatcactgccaccaatcatactaatgagatacaggactacttacagcaactgacaggggcaaggaccgtaccccgtgtcttcattgggaaggattgcatcggcggctgtagcgacttggtatcgctgcagcagtccggggaactcctcacacgccttaagcagatcggcgctttgcagtag

SEQ ID NO: 118659 - DNA, 495 bp, synthetic construct
  misc_feature 1..495: note = Description of Artificial Sequence: Synthetic coding sequence
  source 1..495: mol_type = other DNA
atgatctggagacgagccgcgttggcaggcaccaggctagtgtggagtcgctctggtagcgcggggtggctcgaccgcgccgctggagctgcaggggcagcagccgcagccgcaagcggcatggagagtaacacatctagttctctggagaacttggctacggcacccgtcaatcagatccaagaaacgatttcagacaactgcgtcgttattttttcaaagacctcttgcagctactgtaccatggccaagaagctgtttcatgatatgaacgttaactacaaggtggtagagctcgacctgctcgagtatggcaatcagtttcaggacgccctgtacaagatgactggcgaaagaaccgttcctcgaatatttgtgaatggaacctttattggtggagctaccgatacccaccgcctccacaaagaggggaaacttctcccactggttcaccagtgctacctcaaaaagtcaaagcgaaaagaattccagtag

SEQ ID NO: 118660 - DNA, 498 bp, synthetic construct
  misc_feature 1..498: note = Description of Artificial Sequence: Synthetic coding sequence
  source 1..498: mol_type = other DNA
atgaacccgcgggataagcaagtaagccggttttcgccactgaaagatgtgtacacctgggtggcacttgccggtatccagagatccggctctccggggcggacgcgctcagccgcccgccgcatggagagtaatacctctagtagtctggaaaatttggctaccgctcccgtgaatcaaatccaagagactatctcggacaactgtgtcgtcatcttctccaagacttcgtgttcatattgtacgatggccaaaaaacttttccacgacatgaatgtgaactataaagttgttgaactggatctgcttgaatacggaaatcaattccaagacgctctgtataagatgacaggtgaacggaccgttccccgcatctttgtgaacggaacattcatcggcggggccactgacacgcatcgattgcataaagagggaaaacttctgcccctcgtgcatcaatgctaccttaaaaagagcaaacgaaaagaatttcagtag

SEQ ID NO: 118661 - DNA, 1008 bp, synthetic construct
  misc_feature 1..1008: note = Description of Artificial Sequence: Synthetic coding sequence
  source 1..1008: mol_type = other DNA
atggctgcaggtgcagctgaggcagccgtggcggctgtcgaagaggtcggcagtgcaggccaatttgaagaactgttaaggctgaaggctaagtctcttttggtggtccatttttgggctccgtgggcgccccagtgcgcccagatgaatgaagtgatggccgaactggctaaggaactcccacaggtatcttttgtgaaattggaggccgagggagttcccgaagtctctgagaagtatgaaatatcatcagtgcccacgttcctgttctttaaaaacagccagaaaatcgaccggctcgatggtgctcacgccccagaactaacaaagaaagttcaacgccatgcaagctcaggatcgtttctgccttccgccaatgaacatcttaaagaagatcttaacctccggctcaaaaagctcactcatgccgcaccatgtatgttattcatgaagggcacccctcaagaacctcgctgtggatttagtaaacagatggtggagatcctccataagcataatattcagttctcttcctttgatatatttagcgacgaggaagtgaggcagggactgaaggcatactcctcatggcccacatatccccaattgtatgtctccggcgaactaatcggaggattagacatcatcaaggagctcgaggcaagcgaggagcttgacaccatatgcccaaaagcacctaagttggaagaaagactgaaggtcctgactaacaaggcctccgtgatgttgtttatgaaaggcaataaacaggaggctaagtgcggcttttcaaaacagatactggaaattctcaactctaccggcgtggaatacgagaccttcgatatcctggaggatgaagaggtccggcaggggctgaaagcctactccaactggcctacttatccgcagctgtacgtgaagggcgagctggtaggcggcctcgacatagtgaaagagctgaaagagaacggcgaactactcccaattctccgaggggagaattag

SEQ ID NO: 118662 - DNA, 1008 bp, synthetic construct
  misc_feature 1..1008: note = Description of Artificial Sequence: Synthetic coding sequence
  source 1..1008: mol_type = other DNA
atggcagctggcgccgcggaagctgctgtcgccgcagttgaggaggtgggctcagccggccagtttgaagagttgctgaggttgaaggccaagtccctcctcgtagtgcacttttgggctccgtgggctcctcagtgcgcccagatgaatgaggtgatggcagaactcgccaaagagttgccacaggtgtcgttcgtaaagctggaagctgagggagtgcccgaggtgagcgagaaatatgaaatctccagcgttcccaccttcctcttctttaagaactcccagaaaatcgatcgcctcgacggagcacatgcccctgagctgactaaaaaggtccagcgccatgcctcttccggtagttttttacccagtgcaaatgaacacctgaaggaggatctcaatctacgtcttaagaagctgactcacgctgctccgtgcatgctttttatgaaaggcacaccacaggaacccagatgtggctttagcaagcaaatggttgagatcctccacaagcataacattcagttctcttcattcgatatcttttcagatgaggaggtgaggcaggggctgaaggcgtactcctcctggccaacctatccccaattatatgtgagcggagaactcattggtggattggatataatcaaggaactggaggccagcgaggaactggacaccatctgtcctaaagcccctaagttggaggagagactcaaagtgctgacaaacaaagcttcagtaatgttgtttatgaaggggaacaagcaagaggcaaagtgcgggttttcaaaacagatactggagatattaaattctaccggagtagaatatgagacattcgatatcctggaagacgaagaggtaaggcaagggctgaaagcttacagtaactggcccacatacccacagctgtatgtcaaaggtgagctcgttggaggcctggatattgtaaaagaattaaaagagaatggagagttgctgcccatcctgcggggggagaattag

SEQ ID NO: 118663 - DNA, 1008 bp, synthetic construct
  misc_feature 1..1008: note = Description of Artificial Sequence: Synthetic coding sequence
  source 1..1008: mol_type = other DNA
atggcagcgggggctgcagaagctgccgttgctgccgtggaagaggttgggtccgcgggccagtttgaggaactcctgcgcctcaaggcaaaatccctgttggttgtgcacttctgggccccctgggccccccagtgtgcacaaatgaacgaagttatggcagagctagccaaggagttgcctcaagtgagcttcgtcaaactcgaggccgagggtgtacctgaagtgtctgaaaagtatgagattagcagtgtgcccacattcctcttttttaagaatagtcaaaaaattgataggctggatggggcgcatgcacccgaattgacaaaaaaggtgcagcgacacgcctcctccggttctttcctacctagtgccaacgaacatttgaaagaggacctgaatttacgattgaagaagctcacccacgctgccccatgcatgctctttatgaaaggtacaccccaggagcctcgatgtggctttagcaagcagatggtggaaatccttcacaagcataatatccagttttcaagcttcgacatattctcagacgaagaagttcgccaaggactgaaggcctattcgtcctggccaacatatccacagctctacgtaagcggggagctgattgggggcctcgatattattaaggagctggaggccagcgaggagctcgacaccatctgcccaaaagctcctaagctagaggagaggctaaaggtcctgactaacaaagctagcgtgatgcttttcatgaagggtaacaaacaggaggccaaatgtggattctcaaagcagatcctggagatcctcaacagcaccggggtggagtacgagacattcgacatcctggaggacgaggaagttagacagggcctgaaggcctactcgaattggcctacatacccacagctgtacgtgaagggggagctggtaggaggcctggacatcgttaaggaattgaaggaaaacggcgagctgctccccattttgaggggcgaaaattag

SEQ ID NO: 118664 - DNA, 474 bp, synthetic construct
  misc_feature 1..474: note = Description of Artificial Sequence: Synthetic coding sequence
  source 1..474: mol_type = other DNA
atgagtggaagtctggggcgggccgctgccgccctcttaagatggggtcgtggtgctggtggcggtggactctggggccccggggtccgcgccgccggtagcggtgctggggggggcggctcagcagaacagctcgacgctctggttaaaaaggacaaggttgtggtttttctgaaagggactccagagcagccccaatgcggcttctccaacgcagttgtgcagatattacggttgcacggggtgcgggactacgccgcttataatgtgctggatgatcccgagcttcggcagggtattaaagactattccaactggcctacaatcccacaggtgtatctgaacggagaattcgtgggaggctgcgacatcttgctccagatgcaccagaatggagatctggtggaggagctgaaaaagttgggaatccattcagcgctgttggacgaaaagaaagaccaggattccaaatag

SEQ ID NO: 118665 - DNA, 873 bp, synthetic construct
  misc_feature 1..873: note = Description of Artificial Sequence: Synthetic coding sequence
  source 1..873: mol_type = other DNA
atgcttaagagggaaatgaagcccgaatctgatcgaccgagaaaagtgcggttcaggatcgcttcctcccatagcggccgtgtgttaaaggaagtgtatgaagacggccagcccagtggatccctagacagcgagtgcgctagcatctgcggaatagatggcctcggcgatagcgatggacagcagaatgggcatatagagagcgagggagatgagaacgagaacgaccaagacagcctcctcgtccttgctcgcgctgctagtgaaaaaggcttcggtactagaagagtcaatattttgagcaagaacggcacagtgcggggtgtgaagtacaaggtaagcgctgggcaggcgctcttcaacaacctgactaaggtgctgcagcagccctctactgatctcgagtttgaccgcgtagtaatctacacgacgtgtctgagggtcgtgagaactacattcgagcggtgcgaactggtccggaagattttccaaaatcacagggtgaagttcgaggaaaaaaatatagccttgaatggcgagtatggaaaggaactggacgaacggtgccgacgcgtgagtgaggccccatcgcttcctgttgtctttatcgatggacactacttggggggggccgaaaagatcctgagtatgaatgaatctggggagctgcaggacatcctgactaagatagagcgcgtacaacacccacatgaatgcccgagttgcggagggttcggatttttgccgtgcagcgtgtgtcacggcagtaaaatgagtatgttccggaattgtttcactgatagctttaaagccctgaaatgtacagcctgcaacgagaatggcctccagagatgcaaaaactgcgcaggttag

SEQ ID NO: 118666 - DNA, 828 bp, synthetic construct
  misc_feature 1..828: note = Description of Artificial Sequence: Synthetic coding sequence
  source 1..828: mol_type = other DNA
atgagccactgctcctcccgcgctctgaccctcctgagctccgtgtttggtgcttgcgggctgcttctggtggggatcgctgtctccactgattattggctttatatggaagagggaactgtgctgccacagaatcagactaccgaagtcaagatggctctgcatgctggactgtggcgggtctgctttttcgctggacgcgaaaaagggcgctgcgtcgcttctgaatactttctggaacctgagatcaacctagtgaccgaaaataccgagaacattctcaagaccgtacggaccgcaacacccttcccaatggtctccctcttcctggtgttcactgccttcgtcatctcgaatattggacatatacggccccagaggactattctcgcttttgtgtccggcatcttttttattctttctggcctgtctctggtcgtgggtctggtgctgtatatcagcagtatcaacgatgaggtgatgaaccgcccttctagctccgagcagtacttccactaccgatatggctggagttttgcttttgccgcttcctctttcctcctcaaagagggcgcaggtgttatgagtgtctatctctttacaaagagatacgccgaggaggaaatgtataggcctcaccctgccttctaccggcctcgcctgagtgattgttcagattattctgggcagtttctgcagccagaggcctggcgcagaggccggtctcccagcgatatttcctctgatgtttctatacagatgacacaaaattaccctccagcgatcaagtaccctgatcaccttcacatttcaacctccccctgctag

SEQ ID NO: 118667 - DNA, 987 bp, synthetic construct
  misc_feature 1..987: note = Description of Artificial Sequence: Synthetic coding sequence
  source 1..987: mol_type = other DNA
atggccctccggggcgttagcgtgcgtctgttgtcgagagggcccggactgcatgtactgcggacatgggtaagcagcgccgcccagactgcctctagacccgagttcgattggcaagatcctttggtgctggaggagcaattgactacagatgagatattgatcagagacacctttaggacttactgccaggaacgcctcatgccccgcattctcttggcgaaccggaatgaggggtatggttgcgcgggggtgagctccgtcgcctatgggcttttagctcgagagttggaacgcgttgactccggctacaggagcgctatgagtgtccagtcttccctcgttatgcaccccatctatgcttatggaagtgaggaacagaggcagaaatatctgccacagttggccaaaggggagttgttaggatgctttggactcacagagcctaacagcggtagcgatccgtcaagcatggagactcgtgcacattataactcgagcaacaaatcatacaccctgaatggcaccaagacctggatcaccaatagccctatggcggacctatttgtcgtgtgggctcggtgcgaggacggttgtataagagggtttctgctggagaaaggcatgaggggccttagtgccccccggatccagggaaagttcagtcttagagcctcggccaccggcatgatcataatggacggagtggaggtgccagaagaaaacgtcctccctggcgccagcagccttggtggtccctttggctgtcttaataacgcgcgctacgggatcgcatggggcgttctgggtgcttccgagttctgcctgcacaccgcacgccagtatgccttggacagaatgcagttcggcgtccccctcgcgcgaaaccagctgattcagaaaaagcttgccgatatgttgacggagattacactcggcctgcacgcgtgtctccagttggggcggcttaaagaccaagataaatag

SEQ ID NO: 118668 - DNA, 1185 bp, synthetic construct
  misc_feature 1..1185: note = Description of Artificial Sequence: Synthetic coding sequence
  source 1..1185: mol_type = other DNA
atgagatctagcagcgggaccccctctgccccgactgcccgccgcgactcatgcctggctagctgttggcccatcgcgactaagagcctcgcactgttgccgcggttggaatgctcaggtaccattttagcccactgcaagttttgtctgccaggatcgtcagactccccagcttcaacccccctcgttgccggaatcactggatacgggtgcgccggagtgagtagtgtggcctatggtctgcttgcaagggagctagagagagtagactccggttaccgcagcgccatgtccgtacaatctagtctggtgatgcatcctatatacgcctatgggtcagaggagcagcggcagaagtatctcccgcagctggctaaaggagaactcctgggatgtttcggtctgacggaacctaacagcgggtctgatcctagttccatggagacacgggcacattataacagctctaacaaatcatacacactgaacggtacaaagacatggataacgaactctcctatggccgatcttttcgtagtgtgggcacggtgtgaggacggctgcattcgagggttccttctcgagaaaggaatgaggggattgtctgcccccaggattcaaggtaaattctcactgagggcgagcgcgaccgggatgataatcatggatggtgtggaagtgcccgaggagaacgtcctcccaggcgcttcttctctaggcggtcccttcggttgtctgaataatgcccggtacggtatagcttggggtgtcttaggcgcttccgagttctgtctgcacacggctaggcagtatgccttggaccgcatgcagttcggcgtgcccctagcacggaatcagttgatccagaaaaagttagccgacatgctgactgagattaccttgggcctgcacgcctgtctgcagctggggcggctgaaggaccaagacaaagcagcacccgaaatggtcagcctgctcaagcgcaacaattgcggaaaagcactcgacatcgctagacaggcgagagacatgctgggcggaaatgggattagtgacgagtatcatgttattcgccatgcgatgaacctcgaggcagtcaatacatacgaaggaacacatgacatacacgctctgattctgggcagggctattacaggcatccaggcattcacggcttctaagtag

SEQ ID NO: 118669 - DNA, 1287 bp, synthetic construct
  misc_feature 1..1287: note = Description of Artificial Sequence: Synthetic coding sequence
  source 1..1287: mol_type = other DNA
atggctttgcgtggagtgtccgtccgcctgctgtcccggggacctggcctgcatgtattgagaacatgggtctcatccgcagctcagacagagaaaggagggcggacacaaagtcagctggccaagagctccagacctgagtttgattggcaggatcctctggtgttagaagagcaacttactactgatgaaatcttaattagggacaccttccgcacgtattgtcaggagcgtttgatgccgagaatcctgcttgctaaccgaaacgaagtgtttcaccgggaaatcatctctgagatgggcgaattgggagttctgggtcctacaataaaaggctatggctgtgcaggggtctcctctgtggcttacgggcttctcgcgcgcgaattagagagagtggactccggttatcggagtgccatgagcgtgcagtctagtttggtgatgcatccgatctacgcatacggatccgaggagcaaaggcaaaaatacctaccccagctggccaagggcgaactgctgggatgtttcgggctaactgaaccaaatagcggcagcgacccatccagcatggagacccgcgcacactacaactctagcaacaagagctatacactaaacggcacaaaaacctggataactaactcgccaatggctgatctgttcgttgtttgggcaaggtgcgaggacgggtgcatccgagggtttctactcgagaaagggatgagggggctgagtgctccccgtatccaggggaagttttccctgcgggcatcagccacaggtatgattatcatggatggggtggaggtgcccgaagagaacgtgctgccgggagcctcatctctcggcggccctttcggttgcctaaataacgcaagatacggcattgcatggggagttctcggggctagcgagttctgtttacacaccgccaggcaatacgcactggaccgcatgcagtttggggtgcctctggccaggaatcagttgatccagaagaagctggctgacatgctgaccgagataactttggggctgcacgcctgcctgcaattgggaagactcaaagatcaggataaggctgcacctgaaatggtcagcctgctcaagagaaataactgcggtaaagccctggacattgctcgccaagctcgggatatgctcgggggtaatgggatatcagatgaatatcacgttatacgccatgcgatgaatctggaagctgtgaatacatatgaagtggtgcagatgtgttccctgaagcggaggtggaatagcttgtag

SEQ ID NO: 118670 - DNA, 297 bp, synthetic construct
  misc_feature 1..297: note = Description of Artificial Sequence: Synthetic coding sequence
  source 1..297: mol_type = other DNA
  misc_feature 1..144: note = DNA
  misc_feature 145: note = RNA
  misc_feature 146..297: note = DNA
atgtgcgcggctcgtctagctgcagctgcagcagcagcacagagcgtttatgcattttccgcgagacctctggccggtggcgagcccgtgtcccttgggagcttacgaggtaaagtgcttttaatcgaaaacgttgcctcactgtgaggtacgacggtgcgggattacactcagatgaatgaattgcaacgcagacttggtccaaggggactggtggtgctgggttttccttgtaaccaattcggccatcaggtccgcagggccgagagaggaggcgctggagcagacgtacagtag

SEQ ID NO: 118671 - DNA, 612 bp, synthetic construct
  misc_feature 1..612: note = Description of Artificial Sequence: Synthetic coding sequence
  source 1..612: mol_type = other DNA
  misc_feature 1..144: note = DNA
  misc_feature 145: note = RNA
  misc_feature 146..612: note = DNA
atgtgcgcagccagactggccgcagccgccgccgccgctcagtctgtatatgctttcagcgcccggcccctggcaggaggagagcccgtctctctgggctcattgcgcgggaaggtccttctgatagaaaatgttgcatcactttgaggcactaccgttcgggactacacacaaatgaacgagctgcagcggaggctcgggccgcggggcctggtagtgttgggttttccctgcaaccaattcggccatcaggaaaacgctaagaatgaagaaattttaaatagccttaagtatgttcgtcccggaggcggcttcgagcccaacttcatgctctttgagaaatgcgaggtcaacggagccggtgcgcacccgcttttcgctttccttagagaagctctcccagcgccttcagacgacgcgaccgcactgatgacagatcccaagctgattacatggtcacccgtctgccgcaatgatgtcgcctggaactttgaaaagttcttggtcggccctgacggtgtaccgcttaggagatactccaggagattccagactattgacattgaaccagatattgaggctctgctgtctcagggcccctcttgcgcctag

SEQ ID NO: 118672 - DNA, 573 bp, synthetic construct
  misc_feature 1..573: note = Description of Artificial Sequence: Synthetic coding sequence
  source 1..573: mol_type = other DNA
  misc_feature 1..117: note = DNA
  misc_feature 118: note = RNA
  misc_feature 119..573: note = DNA
atggccttcatcgctaaaagtttttatgatttaagcgcaataagcctggacggagagaaagtcgactttaacacctttaggggcagggccgttctgatcgagaatgtggcctccttatgagggacgaccacaagagacttcacacaactgaacgaactgcagtgccgcttccctaggcgacttgtggtcctaggattcccctgcaaccagtttgggcatcaggagaattgccagaatgaggaaatccttaattctcttaagtatgtgcgacccggcggaggataccagccaacctttaccctcgtgcagaagtgtgaggtgaacggccagaatgaacatcccgtgtttgcgtatcttaaggataagctaccctatccatacgatgacccattctccctgatgactgatcctaaactcattatctggtcccctgtgagacgaagcgatgtggcttggaactttgagaagtttctcatcggacctgagggtgaaccatttcgtaggtattcaaggactttcccgactattaacatcgagccggacatcaaacggctcctaaaggttgctatctag

SEQ ID NO: 118673 - DNA, 594 bp, synthetic construct
  misc_feature 1..594: note = Description of Artificial Sequence: Synthetic coding sequence
  source 1..594: mol_type = other DNA
  misc_feature 1..216: note = DNA
  misc_feature 217: note = RNA
  misc_feature 218..594: note = DNA
atgagcctgggacggctctgcaggctgctcaaacccgcccttctgtgtggggccctcgcagcccctgggctcgccggtaccatgtgcgccagtcgcgatgactggcgatgtgcacggagtatgcacgagttcagcgcgaaagacatcgacggccacatggtgaatctggataaataccgggggttcgtgtgcatcgtcacaaacgtcgcgtctcagtgaggtaagacggaggtgaattacactcagttggtggacttgcacgctcgctacgctgagtgcggcttaagaattcttgccttcccctgcaatcagttcggaaagcaggagcctggctccaatgaggagatcaaggagtttgcagccgggtacaatgtcaagtttgacatgttttctaagatttgcgtgaacggcgatgacgcccatcccctgtggaagtggatgaagatacagcccaagggtaagggcattctcgggaacgcaatcaagtggaacttcacgaaatttctcatcgataagaacggctgcgtcgtgaaacggtacggcccaatggaagagcctctagtgatcgaaaaagacctcccacactacttctag

SEQ ID NO: 118674 - DNA, 666 bp, synthetic construct
  misc_feature 1..666: note = Description of Artificial Sequence: Synthetic coding sequence
  source 1..666: mol_type = other DNA
atgactacccagttgcgggtggtgcatctcctccctctcctcctggcgtgcttcgttcagacctcacctaagcaggaaaagatgaagatggattgtcataaggacgaaaagggtactatatatgattatgaggctatcgccctgaataaaaatgaatatgtctcttttaagcagtacgtaggtaagcacatcttgttcgtcaatgtcgctacatattgtgggctgaccgcacagtacccagagctcaatgcgttacaggaggagcttaagccatatggccttgtggttctcggctttccgtgtaatcagttcgggaagcaagaacctggagataacaaggaaatcttacccgggctgaaatacgttagacctggcgggggcttcgtgcctagcttccagctgtttgagaaaggcgatgtaaacggagagaaggagcagaaagtcttttcttttctgaaacattcatgcccacatcctagtgaaattcttggtaccttcaaatcaatcagctgggatcctgtgaaggtgcatgacattagatggaacttcgagaaatttttggttggccccgatggcatcccagttatgaggtggtcacaccgtgccaccgtatctagtgtgaagacagatattttggcttacctcaaacagttcaaaactaaatag

SEQ ID NO: 118675 - DNA, 303 bp, synthetic construct
  misc_feature 1..303: note = Description of Artificial Sequence: Synthetic coding sequence
  source 1..303: mol_type = other DNA
atgaccacgcagctgcgcgtggtgcacttgctgcctctcttactggcatgtttcgtccagacatcacctaaacaggagaagatgaaaatggattgccacaaggacgagaaaggaacaatttatgactacgaggctattgcgctgaacaaaaatgaatacgtttccttcaaacagtatgttgggaaacacatattattcgtgaatgtggccacttattgtggcctcactgcacagtaccccggaatgagcgttcagggcgaggatctgtacctagtgtcatcttttcttaggaaggggatgtag

SEQ ID NO: 118676 - DNA, 573 bp, synthetic construct
  misc_feature 1..573: note = Description of Artificial Sequence: Synthetic coding sequence
  source 1..573: mol_type = other DNA
atggctgagaagacccagaaatctgtaaagattgccccgggcgcagtggtgtgcgttgaatcggaaatcaggggtgacgtaaccatagggccacgcacggtcatccaccccaaggctaggataatcgccgaagcggggcctatcgtcatcggagagggtaatttgattgaggagcaagccctgattattaatgcctatccggacaacatcactcccgatacagaagatccggagcctaagcccatgattattggcacaaataacgtgtttgaggttggatgctattcgcaggccatgaaaatgggagataataacgtcatcgaaagcaaggcttatgtgggccgtaatgttatactaacttccggatgcatcattggggcctgctgcaatctgaatacgttcgaagtcattcctgagaacacagtcatttacggggccgattgcctccggagggtccagacagagagaccccagccacaaactctgcaactggacttcctgatgaagatcctccctaattaccatcatctaaaaaaaaccatgaaggggtcatccacgccagttaaaaattag

SEQ ID NO: 118677 - DNA, 1440 bp, synthetic construct
  misc_feature 1..1440: note = Description of Artificial Sequence: Synthetic coding sequence
  source 1..1440: mol_type = other DNA
atggcttgccgccaggaaccccaacctcagggaccaccccctgccgctggagccgttgcctcgtatgactatctggtcatcgggggcgggtccggcggactggccagcgctcgccgggctgcagaattgggagccagggccgccgtcgttgagagccacaaactgggcggcacgtgcgtaaacgtcggttgcgttcccaagaaggttatgtggaacacagcagtccattccgaattcatgcatgaccacgccgactacggctttccaagttgtgagggcaagtttaattggagagttattaaggaaaagagggatgcatatgttagcaggctcaatgcgatctatcagaacaacttaaccaagtctcacattgagattattagggggcacgccgcctttactagcgatcccaaaccaaccatcgaggtgtcaggtaaaaaatacaccgctccccacattctgatcgccaccggaggcatgccctcaactcctcacgaatcccagatcccaggggcaagtttgggcattacatccgacgggtttttccagttggaagagctgcccgggcgctctgtgattgtaggcgcaggttacattgctgttgaaatggcagggatactcagcgccttgggatcaaagacctctttgatgatccggcatgataaggtcttgcgctctttcgacagtatgatttcgaccaattgtaccgaggagttggagaacgcaggtgttgaagtcctcaaattcagccaagtgaaagaggtgaagaagaccctgagcggtttggaagtttccatggttaccgccgtgccagggcgcctgcctgtgatgactatgattcccgacgtggattgcctgttatgggccattggccgggtgcctaacaccaaggacctgagtttgaataaactgggtattcagacagacgacaaagggcacatcatcgtcgatgagtttcagaataccaatgtgaagggaatctacgcagttggtgatgtatgcggaaaggccctgctaacgcctgtggccatcgctgccggtagaaagctggcacaccggcttttcgagtacaaggaagatagtaagctggattataacaatattcccacagtggtcttctcccacccccccattggcactgtcggactaactgaggatgaagccatccacaagtacggtatagagaatgtcaaaacctacagtacttcgtttacaccaatgtatcatgctgttaccaaacggaaaactaaatgtgtcatgaagatggtttgtgcaaacaaagaggaaaaagtggtcgggatacacatgcagggactcggctgtgacgaaatgctgcaaggctttgctgtcgcggtcaagatgggggccaccaaagctgatttcgataataccgtggcaattcatcctacctcttctgaggagctagtgacactccgctag

SEQ ID NO: 118678 - DNA, 1323 bp, synthetic construct
  misc_feature 1..1323: note = Description of Artificial Sequence: Synthetic coding sequence
  source 1..1323: mol_type = other DNA
atggctctcctgcctcgcgccctctccgctggagccggtccatcatggaggcgggccgcgcgggctttcagagggttcctgctgctcctgcccgaacccgcagccctgacgagggcgctgtctagggctatggcctgccggcaagaacctcagccccagggacctcctcctgcagctggcgctgtcgcaagctacgactaccttgtaataggtggaggttctggggggctggccagcgcccgaagggccgctgaactgggcgccagggcagccgttgtggagagccataagctcgggggcacctgcgttaacgtgggctgcgtgccgaaaaaggtgatgtggaatacagctgtccactctgagtttatgcatgatcatgctgattacggatttccttcatgtgaaggaaaattcaattggagagtgatcaaagagaaacgggatgcttatgtgtcccggctcaatgccatttaccagaacaatctgaccaaatcccatatagaaattatacgaggacacgctgcattcaccagcgatcctaagcctacaatagaagtatctggcaagaagtataccgcccctcacatcctgatcgcgaccggtggtatgccttctacgcctcacgagtcccagattcccggcgccagtcttggaataacgtctgatggtttctttcagcttgaggaacttcccggacgctctgtaatagtgggggccggttatatcgctgttgaaatggcaggcattcttagcgcccttggctccaagacctccctgatgattaggcatgataagggcattcagacagacgacaagggccacattatcgtggacgaattccagaacaccaacgtaaagggaatttacgctgtgggggacgtctgcggtaaggctttgcttaccccagtggctatagccgcgggtagaaagttggctcatcggctctttgagtacaaggaggacagcaagttggactacaataacattcccacggtagttttcagccaccctcccatcggtaccgttggactgacggaagatgaggcaatacataaatatgggatagaaaacgttaaaacctactctacgtcctttaccccaatgtaccatgccgtcaccaagaggaaaactaaatgtgtcatgaaaatggtgtgcgccaataaggaagagaaggtagttggcattcacatgcagggccttggttgtgacgaaatgctccaggggtttgccgtcgcagtgaagatgggcgcgacaaaagctgactttgataacaccgtcgccatacaccctacaagctcagaagagctggtcacgttaagatag

SEQ ID NO: 118679 - DNA, 1410 bp, synthetic construct
  misc_feature 1..1410: note = Description of Artificial Sequence: Synthetic coding sequence
  source 1..1410: mol_type = other DNA
atggcactgctacctcgagccctttccgctggggctggcccatcatggcggagagcggcccgggcctttagggggtttctccttctgctgccggagcctgctgccctgacacgcgccttaagccgggcaatggcttgcagacaggaaccccagccacaaggacctccgccagccgccggggcagtggccagctatgattacctcgttatcgggggaggaagcggaggactcgcaagcgcgcgacgggcagctgagctgggagctcgtgccgccgtggttgagtctcacaaactcggaggcacttgtgtcaacgtcgggtgcgttcctaagaaggtgatgtggaacacagctgtgcactctgaatttatgcacgatcatgccgactatgggtttccaagttgcgaggggaagttcaactggcgcgttatcaaggaaaaacgggatgcctacgtcagtcggttgaacgccatctaccagaacaacctcacaaaaagtcatattgagatcattcgcggccatgccgccttcacaagcgaccctaaacccacgatcgaggtgtctggcaagaagtacacagctccacatatcttgatcgcgactggcggtatgccatcgaccccccatgaaagccagattccaggtgccagtctcggcataactagtgatggattctttcagctggaggagttgcctgggaggagcgtgatagttggcgccgggtatattgccgtcgaaatggcagggatcctctcagctctgggctcaaagactagtctgatgattaggcatgataaagttctccgttcctttgattccatgatctccactaattgtaccgaagagctggagaacgccggtgtagaggtgcttaagttctcacaagggatccagacggatgacaaagggcatattattgttgacgaatttcagaatactaatgtgaaaggcatctatgccgttggggatgtttgcggcaaggccctccttacccccgtcgccatcgccgccgggcgcaagctcgcccataggctgtttgagtacaaagaggattccaagctcgattacaacaatatccctactgtggtcttctcccatcctcctataggaacggtgggtttgacagaagatgaggccatccacaagtacggcattgaaaatgtgaagacttacagtaccagcttcacacctatgtaccacgcagtgacaaagcggaagacaaagtgcgtcatgaagatggtatgtgccaacaaggaggagaaggttgtaggcattcacatgcagggccttgggtgcgatgaaatgctgcaagggtttgctgtggccgtcaagatgggtgcaaccaaggccgacttcgataatactgtggctattcacccaacatcttcagaagaactcgtcacccttagatag

SEQ ID NO: 118680 - DNA, 1482 bp, synthetic construct
  misc_feature 1..1482: note = Description of Artificial Sequence: Synthetic coding sequence
  source 1..1482: mol_type = other DNA
atggcgttattaccacgggctttgtcagctggggccggtcctagctggcgccgagcagctcgggcctttcggggttttctcctgctgctcccagagcccgccgccctgactagagctctttccagagcaatggcctgtagacaggaaccccagccgcaaggccccccacctgctgccggcgccgtggcctcttatgactacctggtaatcggaggcggctccggcggccttgcatcggcgaggcgcgctgccgagctgggcgctagagccgccgtggtagaatcccataaactcggtgggacctgcgtcaacgttgggtgtgtgcccaaaaaggttatgtggaacactgccgtgcactctgagtttatgcacgaccatgccgactatggatttccgagctgcgaaggtaaatttaattggagagtcattaaggagaagcgcgatgcctacgttagccggctgaacgcaatctaccagaacaaccttaccaagtctcacatagagattatacgcggacatgcagccttcacttccgacccaaagcccacaatcgaagtgtctgggaagaaatacactgcaccacatatcctcattgcgaccggaggaatgccgtctacaccacacgagagtcagattcccggtgcatctctcggcatcacctccgatgggttttttcagctggaagagctccccggcagatcggttatcgtgggggccgggtacatcgctgtggaaatggccgggattctgtctgcgctgggcagcaaaacaagtcttatgattcgccatgacaaggtgaaagaagtgaaaaagactctgtctggactggaggtttccatggtaacggcggtgcctggaagattacccgtgatgacgatgatcccagacgtcgattgtctgctctgggcgatcggccgtgtgccaaacacaaaggacctctccctcaacaagctaggtatacagacagatgacaagggacacatcatcgtggacgaattccaaaatacgaacgtgaaggggatttatgcagtgggagacgtgtgcggaaaggctttgttaacccctgtcgcaattgctgcagggaggaaactggctcatcggctcttcgagtataaggaagactccaagttggattacaacaacataccgaccgtcgtcttcagccaccccccaattgggacagttggcctgaccgaagacgaggctatccacaagtacggaattgaaaacgtaaagacttatagcacatccttcacgcccatgtaccatgcagtaacaaaacgcaagactaagtgcgtgatgaagatggtgtgcgcaaacaaggaagagaaggttgtggggattcacatgcaggggctcggatgcgatgagatgttgcagggtttcgccgtcgcagtgaagatgggcgcaaccaaggcggactttgataatacagtggctatccatcctaccagcagcgaggagctcgtaacactaagatag

SEQ ID NO: 118681 - DNA, 669 bp, synthetic construct
  misc_feature 1..669: note = Description of Artificial Sequence: Synthetic coding sequence
  source 1..669: mol_type = other DNA
atggccgagaagcctaagttacattacttcaacgcaagaggtagaatggagtcaactcgctggctgctagctgccgctggtgtcgagttcgaggagaagttcattaagtccgcggaggatctggacaagctgcgcaacgacggctaccttatgttccaacaagtgcctatggtggaaatcgatgggatgaagcttgttcaaacccgcgctatcctcaattacatcgcatcaaaatataacctctacgggaaagacataaaagaacgcgcattaattgacatgtacatagaaggaatcgctgacctgggagaaatgattctgttgctgccggtttgtccccccgaggagaaggacgccaaattagccctgatcaaagaaaagataaaaaaccgctatttccctgcctttgagaaggtgctcaaatcacacggccaggattacttggtggggaataaactgtccagagccgacatccacctagtagaactgctttactacgtggaggagctggacagcagtctcatttcatctttccctttactgaaggccctgaagactcgaatttccaacctgcccacagtgaagaagttcttgcagcctggatctcctaggaagcctcccatggatgaaaagtcactcgaggaggctcgaaaaatcttcagattttag

SEQ ID NO: 118682 - DNA, 669 bp, synthetic construct
  misc_feature 1..669: note = Description of Artificial Sequence: Synthetic coding sequence
  source 1..669: mol_type = other DNA
atggccgagaaacctaagctgcattacagtaacatccgaggtagaatggaaagcatccgttggctccttgccgccgctggagttgagttcgaggaaaagtttataaaaagcgccgaagatctggataagctcaggaatgatggctatctaatgtttcaacaagtgcctatggttgaaatagacggcatgaagctggtacagactagagcgattctgaactacatcgctagcaagtataacctatacggaaaggatatcaaagagaaggccttaatcgatatgtatatcgagggaatcgccgacctgggagaaatgatcctgttgctccccttctcccaaccggaagaacaggatgcaaagctggccttgatccaggagaaaacaaaaaacagatacttcccagcctttgaaaaagtgctcaagtcacatggacaggattatttggtaggtaacaaattgtcccgtgcagatatccatcttgtcgagctattgtattacgtggaggagctggattcatctctcatatctagcttcccactcttgaaagcccttaaaaccagaataagtaaccttcccactgtgaaaaagtttctgcagcccggatccccacgcaagccgccaatggacgagaagtcactggaagagtcaagaaagatattcagattttag

SEQ ID NO: 118683 - DNA, 729 bp, synthetic construct
  misc_feature 1..729: note = Description of Artificial Sequence: Synthetic coding sequence
  source 1..729: mol_type = other DNA
atgttgttactggccccccaaatgcttagtttgttgctgcttgcccttccagtgctcgcttcgccagcttacgtcgcccctgctccaggacaggccttgcagcagacaggcatcgtgggtggacaggaggccccgcgatcgaaatggccctggcaagtgtctcttagggtacgcggaccgtattggatgcatttctgtggtggatctttgatccatcctcagtgggtgctgacagccgcccactgcgtggagcctgatatcaaggacctcgcggccctgagggtgcagctgagggagcagcatctgtactatcaggatcagttactgccagtgagcagaataatcgtgcacccccagttttatattatccaaacaggtgcagacattgccttgctcgagctggaagagcccgtcaatatatccagccacatccatacagtgacacttccgccagcatctgaaacgttccccccaggcatgccttgctgggtaaccggctggggcgatgtcgataacaacgtccacctacctccaccatatccgttgaaggaggtagaggtcccagtcgtagagaatcacctgtgcaacgccgagtaccatacaggcctgcacacaggccactcgtttcagatagtgagagatgacatgctgtgtgcagggtccgaaaaccacgacagttgccaaggtgattccggcggacccctcgtgtgtaaagtcaatggaacttag

SEQ ID NO: 118684 - DNA, 519 bp, synthetic construct
  misc_feature 1..519: note = Description of Artificial Sequence: Synthetic coding sequence
  source 1..519: mol_type = other DNA
atgttccaacaggtgccaatggtggagatcgacggcatgaagctcgtacagacccgagccattctgaattatattgccagcaagtataacttgtatggtaaggacatcaaggaacgcgccttgattgacatgtacaccgaaggtatggccgacttaaatgagatgatactgctcttaccactatgtcgacctgaagaaaaagatgccaagatcgccctgatcaaagaaaagactaagtcccgatatttccctgccttcgagaaagtgttgcagtctcatggccaggactatctggttggaaacaagctcagccgtgccgatatttctctggtggagctgctctactacgtcgaagagctggatagttctctgatcagtaattttccactgctaaaagctctcaaaacacgaatatccaatctgcctacagtgaaaaagttcttgcagcctggcagccccagaaagccacccgctgatgctaaggccctggaagaagcacgtaagattttccgattctag

SEQ ID NO: 118685 - DNA, 327 bp, synthetic construct
  misc_feature 1..327: note = Description of Artificial Sequence: Synthetic coding sequence
  source 1..327: mol_type = other DNA
atgttccagcaagttcctatggtggaaattgacggaatgaaattggtgcaaaccagggctatcctcaattatatcgcctcaaagtataacctttacggaaaagacatcaaggaacgcgccctaatcgatatgtacactgagggaatggcagatctgaatgagatgatccttctgctgccgctgtgcaggcctgaagagaaggacgctaagatcgcactcataaaggaaaaaacaaaaagtaggtactttcctgcctttgaggccgacatctctctggtggagctgctgtattatgtggaggaactcgactcaagtttgatttcatag

SEQ ID NO: 118686 - DNA, 669 bp, synthetic construct
  misc_feature 1..669: note = Description of Artificial Sequence: Synthetic coding sequence
  source 1..669: mol_type = other DNA
atggccgccaggcccaagttgcattacccaaacggacggggccgcatggagtcggtgcgatgggtgctggccgctgcgggagtcgaatttgacgaagagttcctcgaaacaaaagaacaactgtataagcttcaggacggaaaccacctactgttccaacaggttccaatggtcgagattgacggtatgaaactggtgcagacacggtccatcctgcattatatagccgataagcacaacttgtttggcaagaatctgaaggagaggaccctcattgacatgtacgtggaaggaaccctggacttgttggagctcttgatcatgcacccattccttaaaccggacgaccagcagaaggaagtagtgaacatggcccaaaaggccatcattagatacttcccagtcttcgaaaaaatactgaggggccacgggcagagttttctggtgggcaatcaactgagcctcgccgatgtaatcctcctccagaccatcctggcactcgaagagaagattcccaacattttgtctgcatttcctttcttacaagagtatactgtgaagctatccaacatacccacgatcaaacgtttcctggagcccgggagcaaaaaaaaacctccacctgatgagatatatgtgaggactgtgtacaatatcttccgcccttag

SEQ ID NO: 118687 - DNA, 390 bp, synthetic construct
  misc_feature 1..390: note = Description of Artificial Sequence: Synthetic coding sequence
  source 1..390: mol_type = other DNA
atgtatgtggaaggcaccctggacctgttggagctgctgatcatgcatccttttctcaaacccgatgaccaacagaaagaagttgtgaacatggcccaaaaagccattatccgatacttccctgtgttcgaaaagatacttagagggcacggccagagttttctcgtgggcaaccaattatccctggctgatgtgattctgctgcaaaccatcctggcattggaggaaaagattcccaatatcctgtctgcttttccattcctgcaggaatacacagtgaaactgagcaacatccccaccataaaaaggtttcttgagcctggatctaaaaagaagcctccacccgatgagatttacgtccgcacagtctacaacatttttagaccttag

SEQ ID NO: 118688 - DNA, 669 bp, synthetic construct
  misc_feature 1..669: note = Description of Artificial Sequence: Synthetic coding sequence
  source 1..669: mol_type = other DNA
atggctgcgcgtccaaaactgcattatcccaacggtcgtggccgcatggaatcggttaggtgggtcctggcggccgctggcgtcgagttcgacgaggaattcctggagacaaaagagcagctttacaaactccaggacgggaaccatctcctgttccagcaagtaccaatggtggagattgatggtatgaagctagttcaaacgaggagtatactgcattatattgcagataaacacaacctgttcggaaaaaacctgaaagagagaacgctgattgatatgtatgtggaaggcacattggatttactggagctgctgattatgcatcctttcctgaaacccgatgatcaacagaaggaagtggtgaacatggctcagaaggctatcatccgttacttccctgtcttcgagaagatactcagagggcacggccagtcatttctggtggggaatcaactttccttagctgatgttatcttactccaaaccatattagcattggaagagaagatccctaacattctcagcgcctttcccttcttgcaggagtacactgtaaagctcagcaacatccccaccataaagaggtttctggaaccgggatccaaaaagaaacctccaccggacgaaatctacgtgcgcaccgtgtacaacatctttaggccttag

SEQ ID NO: 118689 - DNA, 270 bp, synthetic construct
  misc_feature 1..270: note = Description of Artificial Sequence: Synthetic coding sequence
  source 1..270: mol_type = other DNA
atgtatgtcgagggcacgctggatctcctcgagcttctaatcatgcacccctttctcaaacccgacgaccagcaaaaggaagtggtgaacatggcacagaaggccatcatcaggtacttcccggtgtttgagaaaattttacggggtcatggccagtcttttcttgtgggaaaccagctgtcgctcgctgatgtgatactgctgcagactatcctggctttggaagaaaaaattccgaacattctgagtgccttcccgttccttcagtag

SEQ ID NO: 118690 - DNA, 390 bp, synthetic construct
  misc_feature 1..390: note = Description of Artificial Sequence: Synthetic coding sequence
  source 1..390: mol_type = other DNA
atgtacgtagaggggaccctggatttgttggagctgctgatcatgcatccctttcttaaacccgatgaccaacagaaggaggtggtcaacatggcacaaaaggctattatacgatatttccctgtcttcgaaaagattctgcgggggcacggccagtcatttttagtcggtaatcagttgagcttggccgatgttatcctgctgcagacaatcttggccttggaggaaaaaattcctaacattctgtccgcttttccgttcttgcaagaatacacagtgaagctgtctaacattcctaccatcaaacggttcttagaacctggcagtaaaaaaaagcctcccccagacgagatttatgttcgaaccgtatacaacattttcaggccctag

SEQ ID NO: 118691 - DNA, 669 bp, synthetic construct
  misc_feature 1..669: note = Description of Artificial Sequence: Synthetic coding sequence
  source 1..669: mol_type = other DNA
atggcagaaaaaccaaaactacactactcaaacgcccgcggatccatggaatctattaggtggctgttggccgcagctggggttgagctggaagagaagtttctggagtccgccgaagatctggacaagctgcgtaatgacggctctcttctcttccagcaagtacctatggttgagatcgatgggatgaagctggtgcagactcgcgctatcctgaactacatagcctccaagtacaacctatatggaaaagacatgaaggaacgcgccctgatagacatgtataccgagggcattgtggatttgacggagatgatcctgttgttgctgatctgccagccagaggaacgggatgccaagacagctcttgtgaaagaaaaaatcaaaaaccgctatttccctgcctttgaaaaagtgttgaagtcgcacagacaggattatctagtcggaaacaagctctcttgggccgacattcacctggtggaactattctactacgtggaggagctggattcatctttgatcagctcttttcctctacttaaggctctgaagaccaggataagcaacctcccaaccgtaaagaaattcctacaaccagggtcccagcgaaagccaccaatggacgagaagtccctcgaagaggcgcggaaaatatttcggttttag

SEQ ID NO: 118692 - DNA, 669 bp, synthetic construct
  misc_feature 1..669: note = Description of Artificial Sequence: Synthetic coding sequence
  source 1..669: mol_type = other DNA
atggcagagaagcccaaactgcattactcaaatgcacggggctcgatggaaagcattcggtggctcttagcagcagccggcgtggaacttgaagagaagttcctggagtcggcggaggacttggacaaactcaggaatgacggcagccttctatttcagcaagtgccaatggtggagattgacgggatgaaacttgtacagacgcgcgccatcctcaattacatcgccagtaaatataacctttacggtaaagatatgaaagaaagggcgctcatagacatgtatactgaagggatcgttgaccttaccgagatgatcctgctgttgctcatttgtcagcctgaggagagggacgccaaaaccgccctcgtaaaagagaagatcaaaaatagatactttcctgcctttgaaaaggttctaaagtctcatcggcaggactacctggtgggcaataagttgtcttgggcggacatccaccttgtggagcttttctattacgtggaagagctcgactcttccctgatctcatcttttcccctcctcaaagccctgaagacaaggatctcgaatctgccgaccgtgaaaaaatttctgcagccgggctctcagaggaaacctcctatggacgaaaagtccctagaagaggcacgtaagatctttaggttctag

SEQ ID NO: 118693 - DNA, 657 bp, synthetic construct
  misc_feature 1..657: note = Description of Artificial Sequence: Synthetic coding sequence
  source 1..657: mol_type = other DNA
atgccaatgatactagggtactgggacatacggggtctagctcacgcaattagacttctactcgagtataccgatagctcatacgaagagaagaagtacaccatgggtgatgcgcctgattacgacagaagtcagtggctgaacgaaaagtttaagctgggtttagattttcccaacctcccttatttgatagatggggctcacaagattacgcagtctaacgccatactgtgttacattgcgcggaaacacaatttatgcggagaaaccgaagaggaaaagattcgtgtagatatcctagagaaccaaaccatggacaatcatatgcagctaggaatgatttgctacaatcccgagttcgaaaagcttaaacccaagtatctggaagaacttcctgaaaaactcaaactgtactcagagtttctcggcaagagaccttggttcgctggcaacaaaatcacgttcgtggactttctggtgtatgacgtgcttgacctccaccggatatttgagccaaagtgcctagacgcattccctaatttaaaagacttcatctcccgctttgaaggtttggagaaaatttccgcgtacatgaagagctccaggttcctcccgaggcctgtcttctccaaaatggcagtgtggggcaacaaatag

SEQ ID NO: 118694 - DNA, 546 bp, synthetic construct
  misc_feature 1..546: note = Description of Artificial Sequence: Synthetic coding sequence
  source 1..546: mol_type = other DNA
atgcctatgatactgggctactgggacataagagggttggcgcacgctatccgcctgcttctcgagtacaccgatagctcttacgaggaaaagaaatatacaatgggcgatgcccccgattacgatcggagccagtggctaaacgaaaagtttaagcttggcctggactttcctaacctgccatatttgatcgacggcgcacataagattacccagagcaatgcaattctgtgctacatcgcccgcaagcacaacctgtgtggtgagaccgaagaagaaaagatcagagtggatatcttagaaaaccagactatggacaatcatatgcagttaggcatgatatgttacaatcccgagttcgaaaaattgaagcccaagtaccttgaagagctgcccgaaaaactgaagttgtacagcgaattcttagggaagcgaccttggtttgccggaaacaaaggccttgaaaagattagcgcatatatgaagtcctctaggtttcttccaaggcccgttttttcaaagatggcagtgtggggaaacaaatag

SEQ ID NO: 118695 - DNA, 450 bp, synthetic construct
  misc_feature 1..450: note = Description of Artificial Sequence: Synthetic coding sequence
  source 1..450: mol_type = other DNA
atgccgatgatcctaggatactgggacatccgcggactggcccatgccattcggctgcttctggagtatactgactcaagctatgaggagaagaagtatactatgggcgatgcccctgattacgatagatctcagtggctgaacgagaagtttaagctgggcctggatttccctaacctgccttacctgatcgacggcgcgcacaagattacccagagcaatgccatcttgtgttacatcgcacgaaagcataatctgtgcggagagacagaagaggagaagatccgggtggatatcttggaaaatcaaactatggataaccatatgcagttaggtatgatctgctacaatcccgagtttggtctcgagaaaatttccgcttatatgaagtctagtcgcttccttccgcgccctgtgttcagtaagatggcagtgtggggtaataaatag

SEQ ID NO: 118696 - DNA, 714 bp, synthetic construct
  misc_feature 1..714: note = Description of Artificial Sequence: Synthetic coding sequence
  source 1..714: mol_type = other DNA
atgccaatgattctcgggtattgggacatccggggccttgctcacgccataaggctgctgctagaatacaccgactctagctatgaggagaagaaatataccatgggcgatgcgccagactatgataggtcacagtggctcaatgagaagttcaaactggggcttgatttcccgaacgggatgctgggcagcctcgtggctcagttatcatttgctggcttcccttccattcagctaccatatctgatcgatggagctcataagatcacacagtccaatgcgatcctatgttatatagcccgtaagcacaacttgtgcggtgaaacggaagaagagaagatccgtgttgatattcttgagaatcagaccatggacaaccatatgcagttggggatgatctgttataatcctgagtttgagaaactcaagccaaagtatctggaggaattgcccgaaaaactaaagctttactccgagttcctcgggaagagaccctggtttgccggaaacaagataacttttgtggactttctcgtctacgacgttctggaccttcataggatatttgaacctaaatgcctggacgcatttccaaatctgaaggattttatctcacgatttgaggggttagagaaaatcagcgcctacatgaaatcaagtcgtttcctgccgagacctgtgttcagtaagatggctgtatggggcaacaaatag

SEQ ID NO: 118697 - DNA, 657 bp, synthetic construct
  misc_feature 1..657: note = Description of Artificial Sequence: Synthetic coding sequence
  source 1..657: mol_type = other DNA
atgcctatgactttggggtactggaacattcgcggcctcgcgcattctattaggctgctgctcgagtacactgactcttcttacgaggagaagaagtacaccatgggcgatgcgcccgactatgatagatcacaatggctaaacgagaaatttaagctggggctagacttccctaacctgccctacttaatcgacggaacccataaaattactcagtccaacgcaatcctaagatacatcgcgaggaagcacaacctgtgcggggagtccgagaaggaacaaattagagaagacatcctggaaaaccagtttatggattccagaatgcagcttgctaaactctgttatgatccagattttgagaaattgaaacccgagtatttacaggctttgccggagatgcttaaactctattctcagttcctgggcaaacagccgtggttcctgggcgacaagatcactttcgtagactttatcgcctacgatgttcttgagcgaaatcaagtctttgagccaagctgccttgatgcctttcccaacctcaaagacttcatcagcaggttcgaaggcttggagaaaatctcggcatacatgaagtcctcccgttttcttcctaggcctgtgttcactaagatggccgtgtgggggaataaatag

SEQ ID NO: 118698 - DNA, 540 bp, synthetic construct
  misc_feature 1..540: note = Description of Artificial Sequence: Synthetic coding sequence
  source 1..540: mol_type = other DNA
atgaccctgggatattggaacatacgtggattggcccactcaatccgacttctgttagagtatactgacagctcgtatgaagaaaaaaaatacacaatgggtgatgcaccagactacgaccgcagccagtggctgaacgagaagtttaaactgggtttggatttccccaacctgccttacctaattgatggtacgcataagatcacacagtctaacgcgatcctaaggtatattgctcggaagcacaacctctgcggagagagcgaaaaggaacagataagggaagatatcctggagaatcagtttatggattcccgcatgcagctggctaagctgtgctatgatccggactttgaaaagcttaaaccagagtatctgcaggcacttccagagatgctaaagctgtattcacagtttctgggcaagcaaccttggttccttggagataaaggactcgagaagatctcagcatacatgaagtcaagtcggtttctgccgcggccggttttcacaaagatggctgtttggggaaacaagtag

SEQ ID NO: 118699 - DNA, 264 bp, synthetic construct
  misc_feature 1..264: note = Description of Artificial Sequence: Synthetic coding sequence
  source 1..264: mol_type = other DNA
atggattcccgcatgcagctggcaaaactttgctatgacccagatttcgaaaaactgaagcctgaatacctacaggctctacctgaaatgttgaaactctactcccagttccttggaaagcagccttggttcctgggcgacaaaataactttcgtggattttatagcctacgacgtgctggaacgcaatcaggtgttcgaaccaagctgtttggatgctttccctaatctcaaggacttcatctctcggttcgaacatagctag

SEQ ID NO: 118700 - DNA, 576 bp, synthetic construct
  misc_feature 1..576: note = Description of Artificial Sequence: Synthetic coding sequence
  source 1..576: mol_type = other DNA
atgccaatgaccctgggatactggaatatacgaggtctggctcacagtatcaggctgctgttagagtacaccgatagcagctatgaggaaaagaaatacacgatgggggacgctccagattacgataggagccagtggctgaatgaaaagttcaagctgggccttgacttccccaatttgccttatctcattgatgggacccacaaaataactcagtctaatgccattttaagatacattgctcgcaaacacaatctgtgcggtgagtccgaaaaagaacaaatacgagaggatatccttgaaaatcagttcatggacagccggatgcagctggcgaaactgtgctacgatcctgacttcgaaaagctgaagcccgaatatttgcaggctctacctgagatgctgaaactttattcgcagttccttgggaagcagccctggtttctgggcgacaaaataacttttgtggacttcatcgcctacgatgtgttggagcgtaaccaggtgtttgaaccgtcatgtttagatgccttcccgaacctgaaagatttcataagtagatttgagcattcctag

SEQ ID NO: 118701 - DNA, 576 bp, synthetic construct
  misc_feature 1..576: note = Description of Artificial Sequence: Synthetic coding sequence
  source 1..576: mol_type = other DNA
atgccaatgactctgggctattggaatatcagagggctagcccacagtattagattacttcttgagtacactgactcgtcttacgaagagaagaaatataccatgggagacgcgcccgattacgataggagtcagtggctcaatgagaagttcaaacttggtttggatttccccaatctgccttacctgatcgatggcacacacaaaatcacccagtccaatgcgatcctgaggtacattgcgcgaaagcacaacctctgtggcgagagcgagaaggaacaaatacgagaggacattctggagaaccagttcatggactctcggatgcagcttgccaaactatgctacgacccagactttgagaaattgaagcccgagtaccttcaagccttgcccgaaatgctcaaactctactcacaattcctgggcaagcagccatggttcctgggagacaagataactttcgtggattttatagcttatgacgttctggagcgcaatcaggtttttgaacccagctgtttggacgcctttcctaatctaaaagacttcatatctcggttcgagcacagctag

SEQ ID NO: 118702 - DNA, 678 bp, synthetic construct
  misc_feature 1..678: note = Description of Artificial Sequence: Synthetic coding sequence
  source 1..678: mol_type = other DNA
atgtcttgcgagtctagcatggtcctggggtactgggacatcaggggcttagcacacgctattagactgctgttagagttcacggacacctcatacgaggagaaacgctacacttgtggcgaggctccagattatgatagatctcagtggctggacgtgaagtttaaattggatctagatttccccaacttgccttacctgctggatggcaagaacaagattacacagtccaatgctatactccggtatattgcccggaagcataatatgtgcggagagactgaagaagagaaaattcgtgtggatattatagaaaaccaggtgatggattttcgtacgcagctgattcgcctgtgttattcttcagaccatgaaaagctgaaacctcagtacctagaggagctgccaggtcagcttaagcaattcagtatgtttcttgggaagttcagttggttcgcaggggaaaagctcactttcgtggattttctgacttacgacatcctggaccaaaataggatcttcgaccctaagtgtctcgatgagtttcccaacttgaaagctttcatgtgccggttcgaggctcttgagaaaatcgcggcctacttgcagagtgaccagttttgtaagatgcccatcaacaacaagatggctcagtggggcaataagcccgtttgttag

SEQ ID NO: 118703 - DNA, 678 bp, synthetic construct
  misc_feature 1..678: note = Description of Artificial Sequence: Synthetic coding sequence
  source 1..678: mol_type = other DNA
atgtcttgtgagtcttctatggtgctcggctattgggatatcagggggctggcccacgcgatcaggctcctcttagagtttacggacacctcatatgaggagaaaaggtacacatgtggagaggcccctgactatgaccgcagccaatggcttgatgttaagtttaaactagatctggactttccgaatctaccttatttgttggacggaaagaataagatcacgcagtctaatgcaatcctcagatatattgccaggaagcacaatatgtgtggcgagaccgaggaggagaaaatccgggttgacatcattgagaatcaagtgatggactttcgcacgcagctgatccgcctttgctacagcagtgaccacgaaaagctaaagccccagtacttggaggagctgcctggccagctgaagcagtttagcatgttcctgggcaagttcagttggttcgccggggaaaaactgacattcgtagacttcctgacctacgatattctggaccagaatcgaatttttgatcccaaatgcctggacgagttccccaatcttaaagcattcatgtgtagattcgaggctcttgaaaaaattgctgcatatctgcagtctgaccagttctgcaagatgcctatcaacaacaaaatggcacagtgggggaataaacctgtctgctag

SEQ ID NO: 118704 - DNA, 678 bp, synthetic construct
  misc_feature 1..678: note = Description of Artificial Sequence: Synthetic coding sequence
  source 1..678: mol_type = other DNA
atgagttgtgaatcttccatggtgttaggctactgggatattcgaggactggcccatgccattcgattgctgcttgagttcaccgatacatcgtatgaggaaaaaagatatacatgtggcgaggcgcctgattacgatcgttcccaatggctggatgtgaagtttaaattggatttggacttccccaacctgccctacctcctcgatggcaaaaacaagatcacacagtcaaacgcaattttgcggtatattgctaggaagcataacatgtgcggggagacggaagaagaaaagatcagggtcgatatcattgaaaatcaagtaatggactttagaacgcaactcattaggctctgctactcttccgaccatgaaaagctgaagccccagtacctcgaggagctgcccggccaactgaaacaattctcaatgtttttgggcaagttttcatggtttgcgggcgagaagttgactttcgtagattttctcacatacgatattctcgatcagaatcgtatttttgaccccaagtgtctggacgagtttccaaacctgaaagcattcatgtgcaggttcgaggccctggagaagatcgcagcctacctgcagagtgatcagttctgtaaaatgccaatcaacaataagatggcccagtgggggaataagcccgtctgttag

SEQ ID NO: 118705 - DNA, 588 bp, synthetic construct
  misc_feature 1..588: note = Description of Artificial Sequence: Synthetic coding sequence
  source 1..588: mol_type = other DNA
atgagcatgacactcggatactgggatatccgcggcctcgcacacgccataagactgttgctggagtacacagacagcagctacgaggagaaaaaatatactatgggtgatgcgccagattatgacagaagccagtggctgaacgaaaaatttaagctaggcctcgacttccccaatctgccatatctcattgacggcgcccacaaaatcacacagtctaacgctattctgtgttacatcgcacgaaagcacaatctatgcggggagacggaggaagagaaaatccgcgtggacatccttgaaaatcaagccatggatgtttctaatcagttggcccgcgtctgctatagccccgacttcgaaaagctaaagcccgagtatctggaagaactgcctaccatgatgcaacacttctctcaatttcttgggaagaggccatggttcgtgggagacaagatcacttttgtggatttcctcgcatatgacgttttagatttgcaccggatatttgagcctaactgcttagacgcctttcctaacctgaaggacttcatctctagattcgaagtaagttgcggcataatgtag

SEQ ID NO: 118706 - DNA, 474 bp, synthetic construct
  misc_feature 1..474: note = Description of Artificial Sequence: Synthetic coding sequence
  source 1..474: mol_type = other DNA
atgagtatgaccctgggatactgggacattcgtgggctcgcccacgctataagattgctgttagaatacaccgatagttcatatgaggaaaagaaatacaccatgggcgatgcccctgactatgacaggagccagtggctgaatgaaaaatttaagttggggctggattttcccaatgagaagctgaagcctgagtacctggaggagcttcccacaatgatgcagcacttttctcagtttctgggcaagcggccatggttcgtcggagacaagatcacattcgtggactttctggcctacgacgtcttagacttgcaccgcatttttgaacctaactgtctcgacgcattccctaatttaaaagattttatctctcgatttgaagggctggagaagattagtgcatatatgaaatctagcagatttcttcccaagcctctctatactcgggtggctgtgtggggaaacaaatag

SEQ ID NO: 118707 - DNA, 609 bp, synthetic construct
  misc_feature 1..609: note = Description of Artificial Sequence: Synthetic coding sequence
  source 1..609: mol_type = other DNA
atgctaggtagccttttggcccaattgtctttcccaggatttccgtccattcagctgccttatctcatcgatggcgcccacaagatcacacagtctaatgccatactttgttacattgcccggaaacataacctatgtggtgagactgaggaggagaagatcagggtggacatcctcgagaaccaggcgatggacgtttctaatcaactagctcgcgtgtgttacagcccagatttcgagaagctcaaacccgagtaccttgaagaacttcctacaatgatgcagcatttctctcagtttctggggaagcggccatggttcgtgggggataagatcacgtttgttgacttcctggcttacgacgttctagatctccaccggatttttgagcctaattgcctcgatgcctttcccaatttgaaggacttcatatcgcgctttgaggtcatgcccccctcttcgttcctcttcgacgcaccatgttccgtcacctcctttcagatgctgagccaatcctggagctacataaagaataatctgcacttgctcagcgcaggatttatgcctggtaccttgcctagtacactgtacctgtcctgtggcatttag

SEQ ID NO: 118708 - DNA, 657 bp, synthetic construct
  misc_feature 1..657: note = Description of Artificial Sequence: Synthetic coding sequence
  source 1..657: mol_type = other DNA
atgtcaatgactctgggctactgggatatccgcggactcgcacacgcaatcagactcctgcttgagtataccgatagctcttacgaagagaaaaagtatacaatgggagacgccccggactatgatcgcagccaatggctcaatgagaaattcaagctggggttggatttccccaatcttccgtatctgatagacggcgctcataaaatcactcaaagcaacgccattttgtgttacattgcccgaaaacataatttgtgtggcgagacagaggaagagaagatcagagtggatatactggaaaatcaagcgatggatgtgagcaatcagttagctagagtttgttactctcctgactttgagaagctgaagcctgagtacctggaggagttacctacgatgatgcagcacttcagccagttcttaggaaagcggccgtggttcgtgggggacaagataactttcgtcgatttcttggcgtacgacgttcttgatttgcaccggatcttcgaaccgaactgtctggatgcctttcctaacttgaaagatttcatttcccggtttgaagggctcgagaaaatctccgcatacatgaaaagttcccggttcctgcccaaacccctctacacgcgagtggcggtctggggcaacaagtag

SEQ ID NO: 118709 - DNA, 657 bp, synthetic construct
  misc_feature 1..657: note = Description of Artificial Sequence: Synthetic coding sequence
  source 1..657: mol_type = other DNA
atgccaatgacactcggctactgggacatccgcggcctggcccatgctattcgcctcttgctggaatatacagactcttcttatgtggagaagaaatataccttaggggatgcacctgattacgatagaagccagtggctcaacgagaagttcaaactcgggctcgatttccccaatctgccctacttgattgatggcgctcataaaattactcaatcgaatgcaattctcaggtacattgctaggaagcacaacctctgtggagagaccgaggaggagaaaatacgagtcgacatccttgagaatcaagtcatggacaatcacatggagctggtaaggttgtgttatgatccagattttgagaaattaaagccgaaatatctcgaggaattgccggagaaactgaaattatatagcgagttcctgggcaagagaccttggtttgcgggggacaagatcactttcgtggacttccttgcctacgacgtactcgacatgaagaggatctttgagcccaagtgtctggacgcatttctgaatctcaaggacttcatttcacgatttgaaggcctaaagaagatctctgcatacatgaagtcctcgcagtttctacgtgggctgctgttcgggaagtccgctacctggaattcaaagtag

SEQ ID NO: 118710 - DNA, 714 bp, synthetic construct
  misc_feature 1..714: note = Description of Artificial Sequence: Synthetic coding sequence
  source 1..714: mol_type = other DNA
atgccgatgaccctggggtattgggacataaggggcctcgcacacgccattcggctactgctggaatacaccgactcttcctacgtggaaaagaaatacacgctgggcgatgccccagactatgatcgatcccagtggctgaacgagaagttcaagcttgggctggattttcctaatgggatgctgggaagtcttgtggcgcagctttcatttccgggatttccgtccattcagctcccttatctcattgatggagcgcataaaattacccaatctaacgcaatactgcgttatatcgcccgtaagcataatctgtgtggagaaaccgaagaagaaaagattcgggtggatatcctggagaatcaagtgatggataaccacatggagttggtgcgcctgtgctatgacccggattttgagaagctcaaacccaagtacctggaagagctgccagaaaaactgaagctctactctgagtttctggggaagcggccctggttcgccggggataagataacctttgttgatttcctcgcatatgacgtgctcgacatgaaaaggatcttcgagcccaaatgcctcgatgcgttcttgaacctgaaggactttatatcaaggttcgaagggctgaagaagatttcagcgtatatgaaaagcagccagttcctccgtggactactgttcggaaagtccgccacatggaacagcaagtag

SEQ ID NO: 118711 - DNA, 609 bp, synthetic construct
  misc_feature 1..609: note = Description of Artificial Sequence: Synthetic coding sequence
  source 1..609: mol_type = other DNA
atgctcgggtccctagtggcccagctctccttccccggtttcccctcaattcagctgccctatctgattgatggagcccacaaaataactcagagcaacgctatactgaggtacatcgcccgcaaacacaatttatgcggcgagaccgaagaggagaaaattagagtagacattctagaaaaccaagtgatggacaatcatatggagttggtgcgcctgtgctatgacccagactttgaaaaactgaagccaaagtatttggaagaattacccgagaagctgaaactgtatagcgagttcctggggaagagaccgtggtttgcgggggataagataacgtttgtggattttctggcctatgatgtcttagatatgaagagaatttttgaacccaaatgccttgacgccttcctgaatctcaaagatttcatatctaggttcgaggtcatgccacccagttctttcttgttcgatgcaccgtgttcctttctatccttccagatgctgagtcagtcctggtcctatactaaaaataattcctacgtgctgagtaccggctttatgccaggaatcatgccgtctactctgtacctgagctgcagaatttag

SEQ ID NO: 118712 - DNA, 627 bp, synthetic construct
  misc_feature 1..627: note = Description of Artificial Sequence: Synthetic coding sequence
  source 1..627: mol_type = other DNA
atgtcaggggaatccgccaggtcacttggtaaggggtcggctcctccaggcccagtcccagagggatctattagaatctactccatgcggttttgcccgttcgccgagcgaacgagacttgtgctgaaagcaaaggggataaggcatgaagtcatcaatattaacctcaagaataagccagagtggttcttcaagaagaatccttttggactcgttccagtgctggagaatagtcagggacagctgatctacgagagtgctataacctgcgaatacctggacgaggcttacccgggaaaaaagctgctcccggatgacccttatgaaaaggcctgccagaaaatgatcctcgagctctttagtaaggtgctgaccaataaaaagacaaccttcttcggaggcaattcaatatctatgatcgactatcttatatggccttggtttgagcggctggaagccatgaagctgaatgaatgcgtggaccatacccctaaactgaagctttggatggctgccatgaaggaagatcctacagtgtctgctctactgacttctgaaaaggattggcagggatttctggagttgtatcttcagaattctccggaggcatgcgattacggcttgtag

SEQ ID NO: 118713 - DNA, 726 bp, synthetic construct
  misc_feature 1..726: note = Description of Artificial Sequence: Synthetic coding sequence
  source 1..726: mol_type = other DNA
atgtcaggggagtccgccagaagcctcggcaaggggtcagctccgcctggacccgtgccggagggaagtattcggatatacagtatgagattctgtcccttcgcggaacgaactcggctggtgctcaaggcgaaggggatacggcacgaagtaatcaatatcaacctgaagaacaagcccgaatggttttttaagaaaaacccttttggcctggtgcctgtcctggagaactctcagggccagctaatatacgagagcgcgatcacctgtgagtaccttgacgaagcctaccccgggaaaaagctgctccctgacgacccgtacgaaaaggcatgtcagaagatgatcctggaactgttctcaaaggtaccatctttggtggggtcattcattaggtctcagaacaaagaagactatgctggcttgaaggaggagttccgcaaagagttcactaaacttgaagaggtgctaacaaataagaagactacattttttggaggtaatagtatctccatgatcgactatctcatttggccctggtttgagcggttagaggccatgaagttaaacgaatgtgttgaccacacccccaagcttaaattgtggatggcagccatgaaagaagacccaaccgtgagcgcattgcttaccagcgagaaggattggcaaggcttcctcgaactgtacctccaaaactctcctgaggcctgcgattacggactgtag

SEQ ID NO: 118714 - DNA, 543 bp, synthetic construct
  misc_feature 1..543: note = Description of Artificial Sequence: Synthetic coding sequence
  source 1..543: mol_type = other DNA
atgagattctgtccttttgccgagagaaccaggctggtgcttaaggcaaagggcattcggcacgaggtcatcaatattaacctcaagaacaaaccagaatggttctttaagaagaaccctttcggcctcgtgcctgtgttggaaaacagccaagggcagctgatttacgaaagtgccattacgtgtgagtatctggacgaggcttaccctggcaaaaaactcttgccagacgatccctatgagaaagcttgccagaagatgattcttgaactgttctccaaggtactcaccaataagaaaacaaccttttttgggggaaatagtattagcatgatagattacctcatttggccttggtttgaaaggctcgaggccatgaagcttaacgagtgtgtggaccacacgcccaagctgaagctctggatggctgcgatgaaggaagatccaacagttagcgctttgcttacttctgagaaagattggcagggattcctagaattgtacctgcagaattcaccagaggcttgcgattatggcctgtag

SEQ ID NO: 118715 - DNA, 603 bp, synthetic construct
  misc_feature 1..603: note = Description of Artificial Sequence: Synthetic coding sequence
  source 1..603: mol_type = other DNA
atgaggttctgtcccttcgcagaacgtacccggctggttctgaaagcaaaagggatccggcacgaggttatcaatatcaatctgaagaacaagcccgagtggttttttaaaaagaacccattcggacttgtacccgtcttggaaaattctcaagggcagcttatttatgaaagcgccatcacttgtgagtatttagatgaggcgtacccgggtaagaaactccttcccgacgatccatatgaaaaagcttgtcaaaaaatgatcctcgagctgttcagcaaggtgccgtctctcgtcggctcttttattagatcccaaaacaaggaagactatgctggactcaaggaggaattcagaaaagagttcaccaagctagaagaagtcctgacaaataagaagacaacctttttcggagggaacagcatttctatgatagattatcttatttggccctggttcgaacgtctcgaggccatgaagctgaatgaatgtgtggatcacacccccaagcttaagctatggatggctgccatgaaagaggatcctacagtgtcggctctcctgacatcggagaaagattggcaagggtttttagagctgtag

SEQ ID NO: 118716 - DNA, 642 bp, synthetic construct
  misc_feature 1..642: note = Description of Artificial Sequence: Synthetic coding sequence
  source 1..642: mol_type = other DNA
atgcggttttgccctttcgccgagcgcacccggctcgtgctaaaggccaaagggatccgtcacgaggttatcaacattaacctaaagaataaacctgagtggtttttcaaaaagaaccctttcggccttgtccccgtattggaaaacagccagggccagctcatctatgagtctgccatcacttgcgagtacctcgacgaagcatacccagggaaaaaactgctgccggatgacccatacgagaaagcttgccaaaagatgattttagaactattctctaaagtcccctcactcgttgggagctttatacggagccaaaacaaagaggattatgcaggcctcaaagaagaatttcgtaaggagttcactaaactggaagaggtgctcacaaacaagaagacaaccttcttcggtggaaacagcatctctatgattgattacctgatatggccctggttcgaaagactcgaagctatgaagttgaacgaatgcgttgatcacacaccaaaactgaagctctggatggccgcgatgaaagaagatcctacggtctcagcattgctgacttccgagaaagattggcaaggatttctggaattatatctccagaattctccagaggcctgtgactatggactatag

SEQ ID NO: 118717 - DNA, 732 bp, synthetic construct
  misc_feature 1..732: note = Description of Artificial Sequence: Synthetic coding sequence
  source 1..732: mol_type = other DNA
atgagtggcgacgctacaaggacccttggcaaaggtagccaacctcctggtcccgtacccgaaggcctgattagaatttattcgatgaggttttgtccttatagtcacagaaccagacttgttctgaaagctaaagatatcagacatgaagtagttaacattaatctgagaaacaaaccagagtggtattatacgaagcacccatttggccacattccagtcctggaaacttcccagtgccagctcatctatgagtccgtgatagcatgcgaatatctagacgatgcctatccgggtcgaaagctttttccttatgacccttatgagcgggcacgccagaaaatgctgcttgagctgttttgcaaggtgccacacctcacaaaagaatgtctggtagctttgcgatgtggaagagagtgtacaaacctgaaagccgcattacggcaagagttttcgaaccttgaggaaatcctcgaataccaaaatactactttcttcggaggaacatgcatctccatgatcgattatttgctatggccatggtttgagcggctcgacgtttatggcattttggactgtgtgagccatacgcctgccctgcggctgtggatttctgcaatgaagtgggatccaaccgtttgtgcactgttgatggacaaaagcatcttccaaggttttttaaatctttacttccagaacaaccccaacgcatttgactttggactgtgttag

SEQ ID NO: 118718 - DNA, 648 bp, synthetic construct
  misc_feature 1..648: note = Description of Artificial Sequence: Synthetic coding sequence
  source 1..648: mol_type = other DNA
atgcgcttttgcccgtatagtcacagaactagacttgtgctcaaagcgaaagacattcgacacgaagtcgtgaacataaatctccgtaacaagccagagtggtactacaccaagcatccatttgggcacattccggtgttagaaacctcccagtgtcagttaatctacgagagtgtaatcgcatgcgagtatttggatgatgcatatccgggccgtaagctctttccatacgatccttacgagcgagccagacaaaagatgctgctcgagcttttctgcaaagtgccccacctgacgaaagaatgcctggtggcattgcgttgtgggcgggagtgcactaacctgaaggccgccctgagacaggagttctccaacctagaagagattttagagtatcagaatactaccttcttcggcgggacctgcatctcaatgatcgactacttattatggccttggttcgagcgacttgacgtctacggaatcctggactgtgtgtctcatacccccgccctgcgcctatggatatccgcgatgaaatgggatccaacagtgtgcgcactcctgatggataaatctatattccagggatttttgaatttgtacttccagaataatcctaacgcttttgacttcggcctttgctag

SEQ ID NO: 118719 - DNA, 732 bp, synthetic construct
  misc_feature 1..732: note = Description of Artificial Sequence: Synthetic coding sequence
  source 1..732: mol_type = other DNA
atgagcggcgatgctaccaggacactgggaaagggtagccagcctcccggaccggtgcccgagggccttatccgaatctatagtatgagattttgcccctactcccacaggacccgcctggtccttaaagctaaggacattcgtcacgaggtcgtgaatatcaatcttcgaaataagcctgagtggtactacaccaaacatccatttggacacattcctgtgcttgagacaagtcaatgtcaactgatctacgagtctgtcatcgcttgcgaatatttggacgacgcataccctggcagaaaactatttccgtacgacccatatgaaagggctcggcaaaaaatgctcttggagctattttgtaaagtcccacacctgaccaaagaatgtctggttgccttgagatgcggccgggagtgtacgaaccttaaagccgccctacgccaggagttctcgaaccttgaagaaatcttggagtatcagaacactaccttttttggggggacttgcatttctatgatcgactacctgttgtggccctggtttgagcgcctggatgtttacggaattcttgattgtgtgtctcacactccggccctgcgtctctggatcagcgcgatgaagtgggaccccactgtttgcgctctcctgatggataagtccatcttccagggctttctcaacctgtacttccaaaacaacccaaatgcgttcgattttggcctctgctag

SEQ ID NO: 118720 - DNA, 501 bp, synthetic construct
  misc_feature 1..501: note = Description of Artificial Sequence: Synthetic coding sequence
  source 1..501: mol_type = other DNA
atgagtggcgacgctactaggaccctgggcaagggcagtcaaccacccggcccagtgcctgagggcttgatccggatctattcgatgcgattctgcccctattcacataggacacgcttggtcctcaaagccaaggacatacgtcacgaagttgtgaacataaacctcaggaataagccagagtggtactatactaagcacccatttggacatatacccgtgctggagaccagtcaatgccagctcatttatgagagtgttattgcctgtgaatatcttgacgacgcgtaccctggaaggaagctattcccatatgacccctatgaacgcgcccgtcagaaaatgctgctggaactgttctgcaaggttccacacctaacaaaggaatgtttggtcgcgcttcgatgcgggagagaatgtaccaatctgaaggctgcactccggcaggaattctccaatctagaggaagataggaagaagagaaagttcatacccggatag

SEQ ID NO: 118721 - DNA, 366 bp, synthetic construct
  misc_feature 1..366: note = Description of Artificial Sequence: Synthetic coding sequence
  source 1..366: mol_type = other DNA
atgcggttttgtccatactcccatagaacccgccttgtacttaaggccaaagatatccggcatgaggttgtgaatattaacctgcgtaacaaaccagagtggtactatactaagcatccatttggtcacatcccagttcttgaaacctctcagtgtcaactcatttatgagagcgtgatcgcctgtgagtatctagacgatgcttaccctggtaggaagctgtttccttacgatccctacgaaagagcccggcaaaagatgctgctggaactgttttgcaaattgtgcgaaccacacgcgagccctgccgctctggatattagccacgaagttgggccccacagtctctgcagctcacatggctag

SEQ ID NO: 118722 - DNA, 630 bp, synthetic construct
  misc_feature 1..630: note = Description of Artificial Sequence: Synthetic coding sequence
  source 1..630: mol_type = other DNA
atgtctggcgatgcaactagaacactgggtaagggatcccagccccccgggccggtgcctgagggattaattcgtatctattcaatgaggttctgtccctatagtcaccgaactagattggtcctgaaagccaaagatattaggcacgaggtagtgaatataaacttgcgaaataagccagagtggtattatacaaaacacccttttggacacatacctgtcctggagaccagccagtgtcagttgatctacgaaagtgtaatcgcctgtgagtatctcgacgatgcttacccgggaaggaaactgtttccctacgacccctacgagagagctaggcagaaaatgctccttgagctgttctgcaaaatcctggaatatcagaatacaacattctttggcgggacctgcatctccatgattgattatttgctgtggccatggttcgagcggctggacgtatacggaatactggattgcgtatctcacactcctgccctaaggctgtggattagcgccatgaaatgggatccaaccgtctgcgcccttctgatggacaagtcaattttccaggggtttcttaatttgtactttcaaaacaatccaaatgcctttgattttggcctttgctag

SEQ ID NO: 118723 - DNA, 723 bp, synthetic construct
  misc_feature 1..723: note = Description of Artificial Sequence: Synthetic coding sequence
  source 1..723: mol_type = other DNA
atgggcctggaactgtacctcgaccttctgtcacagccgtgccgggccgtttacatctttgccaagaaaaatgacatcccatttgagctgcgaatcgttgacctaataaaaggccaacacctgtctgacgcgttcgctcaggtcaatccgctgaaaaaagtgccagcattaaaggatggagactttacattaactgaatccgtggcaatactactttaccttaccagaaagtacaaggttcctgactattggtacccccaagatcttcaggcccgggcacgcgtcgacgaatacctggcctggcaacatactacattacgccgcagctgcctccgagccctgtggcacaaagtgatgtttccggtcttcttgggggagcccgttagcccacagacactcgcagccactctcgccgagctcgacgtcacactgcagctcctggaagacaagtttttgcaaaataaggcctttctcaccgggccccacatttctctggccgacctggtggccattaccgaactcatgcaccccgtgggggctggctgccaagtgttcgaaggtcgcccgaagctggccacttggaggcaaagagtagaggccgccgtaggcgaggacctatttcaagaagcccatgaggttatcttgaaggctaaagatttcccccctgctgatcccaccataaagcagaaactgatgccctgggtcttggccatgattcggtag

SEQ ID NO: 118724 - DNA, 486 bp, synthetic construct
  misc_feature 1..486: note = Description of Artificial Sequence: Synthetic coding sequence
  source 1..486: mol_type = other DNA
atgggacttgagctgtacctggatcttttatcacaaccctgcagagccgtgtacatcttcgccaagaaaaacgacatccctttcgagcttcgcatagttgacctcatcaagggcgtgatgttccctgtgtttcttggagagcctgttagcccacagactttagccgcaaccttggctgagctggatgtcaccctccaactgctggaagacaaattcctgcaaaataaggcctttttaactggaccccacatctcgcttgcagacttagtcgctataactgagttaatgcacccagtcggggccggttgccaggtgtttgagggccggcccaagctagcgacgtggcgacagcgggtcgaagctgcggttggtgaagatctgtttcaagaggctcacgaagtaattctgaaggcgaaagacttcccaccagctgatcctacaatcaagcagaagcttatgccctgggtgttggcaatgattcggtag

SEQ ID NO: 118725 - DNA, 369 bp, synthetic construct
  misc_feature 1..369: note = Description of Artificial Sequence: Synthetic coding sequence
  source 1..369: mol_type = other DNA
atgttcccagtgttcctgggggagcctgtcagtccacagaccctggcagccacactggcagagttagacgtgaccttgcagctgctagaagacaagttcctgcagaataaggcctttctaacgggtccacatatttcacttgctgatctcgtcgctatcacagagcttatgcatcccgtgggcgccggatgtcaagtcttcgaaggcaggcctaagctcgccacgtggagacagcgcgtagaagcggccgtgggagaagatttattccaagaagcccatgaagtaattctgaaggctaaagactttccacccgcagatcccacaatcaagcaaaaactgatgccgtgggtgcttgctatgattcggtag

SEQ ID NO: 118726 - DNA, 198 bp, synthetic construct
  misc_feature 1..198: note = Description of Artificial Sequence: Synthetic coding sequence
  source 1..198: mol_type = other DNA
atgggcctcgaactctacctggatctgttgtcgcagccctgcagggccgtttatattttcgccaagaaaaacgacatcccatttgagctccggattgtcgacctcattaagggtcaacacctgagtgacgccttcgctcaagtcaatcccctgaaaaaggtgccggccctgaaggatggtgatttcacacttacatag

SEQ ID NO: 118727 - DNA, 219 bp, synthetic construct
  misc_feature 1..219: note = Description of Artificial Sequence: Synthetic coding sequence
  source 1..219: mol_type = other DNA
atggggctggagctttatctagatctgttgagccagccttgtagagcggtgtacatctttgccaaaaaaaatgatattcccttcgagcttaggattgtcgacctcatcaaggcccgagggtgttggcttccttctttaaggcgtcccacccaggccgggcacatggcagctgcgcgagggggttcgtctggaggaggaccactgccgggtgggccctag

SEQ ID NO: 118728 - DNA, 405 bp, synthetic construct
  misc_feature 1..405: note = Description of Artificial Sequence: Synthetic coding sequence
  source 1..405: mol_type = other DNA
atgccctttctcgagttagacaccaatctcccagccaatcgcgtgcctgccggcctggaaaagagactatgcgctgccgcagcctctattctgggcaaacctgccgatcgcgtgaacgtgacagttagaccggggctggcaatggccttgagcggcagtacagagccttgtgcccagttatccatttcctctatcggcgttgtcggcactgccgaggataaccggtcccattctgcccacttcttcgagttcctgaccaaggagctggcactgggccaggacaggtttccaactgtcctgtccacttcccccgcagctcacggcggccctagatgtcctggagagattatagaagggaagaagtcatgcttaaatgaagaagctttgttcatctactttatctag

SEQ ID NO: 118729 - DNA, 831 bp, synthetic construct
  misc_feature 1..831: note = Description of Artificial Sequence: Synthetic coding sequence
  source 1..831: mol_type = other DNA
atgcccgtgcctgcctcatggccacaccctcccggccctttcctgctccttaccctgctcctgggcttaaccgaagtcgctggcgaagaggagctacagatgatccagcctgagaagctgcttttggtgaccgtgggaaaaaccgccacactgcactgtacagtgacctccctgttgccagtagggcccgtcttgtggttcagaggcgtcggaccggggagagagctcatctacaaccagaaagaaggtcacttccctagagtgactaccgtctcagacctcaccaagaggaataacatggactttagcatacggatcagcagtatcaccccagctgacgtcggaacctattattgcgtgaaattcaggaagggctctcctgaaaatgtggagttcaagtctggtcctggcacggaaatggctctcggcgctaagcccagtgcccccgtcgtcttagggccagcggcccggacaacaccggaacacacagtgagctttacttgcgagagccatggttttagtcccagggacatcactctgaagtggttcaaaaatggaaacgagctatccgactttcagaccaacgtggatcctaccggccagagcgtcgcctatagcatccgatctaccgctagggttgtgctagacccttgggacgtccggtctcaggtgatctgcgaggttgcacacgtgacactgcagggtgatcctttacgaggaacggcaaatctgtcagaggccatccgcggccctgcctcttccttgacagctctgctgctcattgccgtcctcctgggcccaatttacgttccctggaagcagaaaacctag

SEQ ID NO: 118730 - DNA, 1092 bp, synthetic construct
  misc_feature 1..1092: note = Description of Artificial Sequence: Synthetic coding sequence
  source 1..1092: mol_type = other DNA
atggcgacgaattggggatctctcctacaggataagcagcagctggaggagcttgcgcggcaggcagtggacagagctttagcagagggtgtgcttctgcgaacttctcaggagccgacgagtagtgaagttgtgagctatgcgccttttaccctgttcccttctttggttccatccgcactgctggaacaggcatatgctgtacaaatggactttaatttgctcgtggatgcagtttcacagaacgcagcctttctggaacagacactgtcgagtgccctcgtcctgctaatagctcaggagaaagaacgaaacatctttgatcagagggctatcgaaaatgagttgctggctaggaacattcacgtgatccggaggactttcgaggatatctctgaaaaggggtccttagaccaggataggaggctgtttgtggacggacaggaaatcgcagtcgtgtactttagagatgggtacatgccccgtcagtactcactccagaattgggaagcccggttacttttggagagatctcacgccgccaagtgccctgacatcgctacccagttagccggcaccaaaaaagtgcagcaagagctcagccgccccggcatgctggaaatgctgttgccggggcagccggaggccgtagcccggctgcgggcaacttttgcaggactgtatagcttggacgttggcgaggaaggcgaccaggccatagccgaggcactcgccgcgccctcaagattcgttctgaagccacagagagaaggggggggtaacaacctatatggtgaggagatggtgcaggccttgaagcaattgaaagatagcgaggagcgcgcctcgtatatccttatggagaagatcgagccagaaccctttgagaattgcctcctgcgtccaggcagcccagcccgggttgtgcagtgcatttccgaattgggaatttttggtgtttacgtcagacaggagaaaaccctggtcatgaataaacacgtcggccacttattgcgaactaaagccattgagcacgctgatgggggtgttgcagccggagtggctgtgctcgataatccataccccgtctag

SEQ ID NO: 118731 - DNA, 1041 bp, synthetic construct
  misc_feature 1..1041: note = Description of Artificial Sequence: Synthetic coding sequence
  source 1..1041: mol_type = other DNA
atgttccagaggagtgctgacgggtcccccgcgttgaagcagatcgaaatcaacacaatctcggcaagcttcggtgggctggcctcgcgcaccccagccgttcaccgacacgtgttgtcggtactctcgaaaacgaaagaggctgggaagattttgtccaataacccttccaagggattggctctaggcatcgccaaggcatgggagttatacggttctcctaacgctctcgtgttactcatagcccaggagaaagaacggaatatttttgaccagcgggccatagagaacgagcttctggcaaggaacattcatgttattcgtcgtacattcgaggacattagcgagaaaggcagcctggatcaggacaggagattgttcgtcgacggccaggagatcgcagttgtctactttcgggacggatacatgcccagacaatacagcctgcagaactgggaagctcgactactattggagaggagccacgctgccaagtgtcccgatatagctacccagctggcaggcaccaagaaagtgcagcaggagctgagcagacccggcatgctggagatgcttctgcccggccagcccgaggccgtagccagactcagggccacttttgcagggttatatagcttggacgttggggaagagggggatcaggctatcgctgaagccctggcagccccctcccgctttgtgctgaagcctcagagagaaggcggcgggaataatctctacggcgaggaaatggtccaggcacttaagcagttgaaggattctgaagaaagagcatcatatattctgatggagaaaatcgaacccgaaccgttcgagaattgtttgctacggccaggcagtcccgcgcgggtggtgcaatgcatctctgaactggggatatttggcgtgtatgtgcggcaggagaaaaccctggttatgaacaaacacgtggggcacctcctaagaactaaggcgattgagcatgctgatgggggagttgcggcaggtgtagccgttctcgacaacccatatcctgtgtag

SEQ ID NO: 118732 - DNA, 768 bp, synthetic construct
  misc_feature 1..768: note = Description of Artificial Sequence: Synthetic coding sequence
  source 1..768: mol_type = other DNA
atgtcttctatcggcaccgggtatgatttaagtgcttccaccttcagccctgacggacgagtttttcaggtggaatacgccatgaaggccgtggagaactcttccacagccatcggcattcgctgtaaggacggcgtggtattcggcgttgaaaaacttgtcttgtccaagttatacgaggagggaagcaacaaacggctttttaacgtggaccgccacgtcggcatggcggtggccggactcttggccgacgcacgcagtctggccgacatagcccgcgaagaagcatctaattttagaagcaatttcggatataacatcccactcaaacacctggcggaccgagtggcaatgtacgtccacgcgtatacgctgtattctgccgttaggcctttcggatgttctttcatgttaggatcgtatagcgtgaatgatggcgcgcagctttacatgatagatccatctggtgtttcttatgggtactggggttgtgccatcggcaaagccaggcaggcagcaaagacggagatcgagaagctgcagatgaaggaaatgacttgccgcgatatcgttaaagaagttgccaagatcatctacattgtccacgacgaagtcaaagacaaagcctttgaactggaactgtcatgggtgggggagctcaccaatggtagacacgagatagtgccgaaggacatccgcgaggaggcggagaagtatgctaaagaatctctgaaagaggaggatgaatcagatgacgacaacatgtag

SEQ ID NO: 118733 - DNA, 525 bp, synthetic construct
  misc_feature 1..525: note = Description of Artificial Sequence: Synthetic coding sequence
  source 1..525: mol_type = other DNA
atgcaggcaggaaagccaatactttattcatactttcggtccagctgtagttggagggttaggatagccctggctctgaagggtattgactatgagacggtgcctattaatctgataaaggacgggggccagcagttctccaaagacttccaggccttaaatccgatgaaacaagttcctaccttgaagatcgacgggattaccattcaccagagcaatctgagcgtgctgaaacaggtgggcgaggagatgcaactgacgtgggcccagaatgctattacatgtgggttcaacgccctggagcagatcctgcagtcaacggctgggatctactgcgtgggggacgaagtcaccatggctgatctgtgtctcgtcccacaggtggccaatgctgaacgatttaaggttgacctgactccctatccaaccatatcatcaatcaataaacgcctcctggtattagaggcgttccaggtgtcacacccttgcagacagccagacacccccacggagcttcgcgcgtag

SEQ ID NO: 118734 - DNA, 486 bp, synthetic construct
  misc_feature 1..486: note = Description of Artificial Sequence: Synthetic coding sequence
  source 1..486: mol_type = other DNA
atgaagcaagtccccacgctaaaaatcgatgggattaccatccaccagtccctggccatcatcgagtacttggaggaaatgagacccacgcctaggttgcttcctcaggaccccaagaaaagggcttctgtccgcatgatcagtgatctgatcgcaggaggtattcagcctctacagaatctttctgtcctgaaacaagtgggcgaggagatgcagttgacctgggcccagaatgctatcacctgcgggttcaatgctttagagcagattctgcaatctacagctggaatctactgcgtcggggatgaagtcacaatggctgacctctgccttgtgccccaggtcgccaatgccgagcgttttaaagtggacttgaccccctaccccaccatctcctccatcaataaacgcctcctcgtgctggaggcctttcaggtcagtcacccttgccgacagcccgacacaccgaccgaactccgggcctag

SEQ ID NO: 118735 - DNA, 486 bp, synthetic construct
  misc_feature 1..486: note = Description of Artificial Sequence: Synthetic coding sequence
  source 1..486: mol_type = other DNA
atgaagcaggtgccgaccctgaaaattgacggaatcaccattcatcagagtctggccattattgagtacctcgaggagatgaggcctacacccaggctcctgccacaagatccaaaaaagagggcttccgtacgcatgatctcagatcttatcgccggcggcatccaaccactgcagaacctgtctgtactgaagcaggtaggcgaggagatgcagctgacatgggcccagaacgcgattacgtgtgggtttaacgccctggagcagattttgcagtctaccgctggcatttactgcgttggagacgaggttaccatggccgatctgtgcctggtgccacaggtggcaaacgctgagcgcttcaaagtggatcttacaccttaccccactatatcttccattaacaaaagactattagttctcgaggcctttcaggtgagtcacccatgcaggcagcctgatacacccacggagctccgagcctag

SEQ ID NO: 118736 - DNA, 180 bp, synthetic construct
  misc_feature 1..180: note = Description of Artificial Sequence: Synthetic coding sequence
  source 1..180: mol_type = other DNA
atgaagcaagttccaaccctgaagatagacggtatcactattcaccaatccctggccatcatagaatacctcgaagagatgaggcctacccccagattgctgcctcaagatcctaagaagcgggcctctgtaagaatgatttccgatctcatcgcaggagggatacagccccttcagtag

SEQ ID NO: 118737 - DNA, 117 bp, synthetic construct
  misc_feature 1..117: note = Description of Artificial Sequence: Synthetic coding sequence
  source 1..117: mol_type = other DNA
atgaaacaagtcccgacactcaaaatcgacggcattaccattcaccagtcgctcgcaatcattgaataccttgaggagatgcgccccaccccgagactactgccacaggacccttag

SEQ ID NO: 118738 - DNA, 486 bp, synthetic construct
  misc_feature 1..486: note = Description of Artificial Sequence: Synthetic coding sequence
  source 1..486: mol_type = other DNA
atgaaacaggtgcccaccctgaagatagacggcatcacaatccatcagtcccttgctattattgagtatcttgaggagatgagaccgacccctagattactgccgcaagaccctaaaaagcgcgcgtccgtcaggatgatctcagatctgatagcgggaggcatacagcccctgcagaatctgagcgtcctcaaacaagttggggaagagatgcagctgacctgggcccaaaacgccatcacatgcgggttcaatgctctggagcagatcctccagtctacagccggaatctattgtgtgggggatgaggttaccatggccgacttgtgcctcgtaccacaggtggccaacgcagaaagattcaaggtggaccttaccccctacccgaccatcagtagcataaataaacggctgctagtcctggaagccttccaggtgtcacatccctgtcgccagccggacaccccgaccgagctacgggcgtag

SEQ ID NO: 118739 - DNA, 387 bp, synthetic construct
  misc_feature 1..387: note = Description of Artificial Sequence: Synthetic coding sequence
  source 1..387: mol_type = other DNA
atggccggtaatctgctgagcggagcaggcagacgtctttgggattgggtacctctggcctgtcggtccttttctctgggagtccctcggttgattggcatacgcctaaccctccctcctccaaaggtcgtggaccggtggaacgagaagagggcaatgttcggcgtgtatgacaatatcggtatcctcggaaactttgagaagcaccctaaggaactcatacgtgggcccatctggctgagagggtggaaaggtaacgaattgcaacggtgtatcaggaagaggaagatggtgggttccagaatgttcgcagatgatctgcacaatctgaataaaagaattagatatctctacaaacactttaatcggcatggtaagtttcgctag

SEQ ID NO: 118740 - DNA, 783 bp, synthetic construct
  misc_feature 1..783: note = Description of Artificial Sequence: Synthetic coding sequence
  source 1..783: mol_type = other DNA
atggaggaaatgagagaccctagcaaaattaaatggggagatgctggcgccgagtacgtggttgagagcacaggtgtctttactaccatggagaaggctggtgcccaccttcagggtggggcgaagagagttatcatcagtgccccgagcgccgatgctccgatgttcgtgatgggggtcaatcacgaaaaatacgacaacagcctgaaaattatctcgaacgcttcttgcacgacaaattgcttggcgccactggccaaggttattcacgataacttcggcattgttgaaggtcttatgaccacagtacatgctatcacagccacccagaagacggttgatgggccaagcggtaagctttggagggacgggcgaggggctcttcagaatataatccccgctagcaccggggccgctaaagcagtcggtaaggtgattccagaactaaatggaaagttgactgggatggcctttagagtacccacggccaacgtgtctgtggtagatctcacttgtaggttggagaaaccagctaagtacgatgacataaaaaaggttgtaaagcaggccagcgaggggcccctcaagggcattctgggctatactgaacaccaggtggttagcagtgactttaactccgatacccattctagcaccttcgatgccggcgccggcatcgccttgaacgaccatttcgtgaaactgatcagctggtatgataatgaatttggctactctaaccgggtggtggatctcatggcccatatggccagcaaggaatag

SEQ ID NO: 118741 - DNA, 882 bp, synthetic construct
  misc_feature 1..882: note = Description of Artificial Sequence: Synthetic coding sequence
  source 1..882: mol_type = other DNA
atggtgtatatgttccaatacgactccacgcacggcaaattccatggtacggtgaaagccgaaaacggcaagctggtcattaacggaaatccaatcactatattccaagagagggatcctagcaagataaagtggggtgacgctggcgctgaatatgtcgtcgaaagcactggagtcttcacgacgatggaaaaagcgggggcacacctgcaggggggagccaaacgggtgatcatcagtgccccgtccgctgacgcccccatgttcgtgatgggcgtgaatcatgagaagtatgacaatagcttgaagatcataagcaatgcatcctgtaccaccaactgcctcgctccactggccaaggtaattcacgacaacttcggaattgtggagggtctgatgacaacagtccatgcaattactgccacccagaagacagtcgacgggccttcaggcaaactgtggcgggacgggcgcggggcgctgcagaatatcataccagctagtacgggcgctgcaaaggcagttggaaaagttatacccgagctgaacggcaaattgactgggatggcctttcgggtgccgacagcaaacgtctcagtcgttgatctcacctgccgcctggagaagcccgcaaagtacgatgatattaagaaggtggtgaagcaggcctctgaaggtccactcaaggggattttgggctacaccgaacatcaggtcgtgtccagcgactttaactctgatacccactctagtacatttgatgccggcgccgggatcgccctgaacgaccattttgtaaaactgatctcctggtatgacaacgagtttggatattccaatcgcgtggtcgacctgatggcccacatggcctcgaaggaatag

SEQ ID NO: 118742 - DNA, 1008 bp, synthetic construct
  misc_feature 1..1008: note = Description of Artificial Sequence: Synthetic coding sequence
  source 1..1008: mol_type = other DNA
atgggcaaagtaaaagtgggggtgaacggcttcggccggataggcagattggtaacaagagccgccttcaatagcggaaaggtcgacattgtcgccattaatgatccattcatcgacctcaattacatggtgtatatgttccagtacgacagtacccacgggaagttccacgggacggtgaaggccgagaatggaaagctggttataaatggaaaccctatcaccattttccaggaaagggatcccagcaagattaagtggggggatgccggagccgagtacgttgtggagtccacaggtgtatttacaacaatggagaaggccggggcccacctgcaaggcggagcaaaaagagtgataattagcgctccaagtgcagatgccccaatgttcgtcatgggcgtgaaccacgagaaatatgataactcattgaagataatcagcaacgccagctgtactactaattgtctggcacccctcgccaaagttatccacgataatttcggcatcgtcgagggcctgatgactacagtgcatgcaatcacagcaacccaaaaaacagtggatgggcccagtggaaagctgtggagagatgggcggggggccctgcagaacatcatccccgcatctaccggagccgctaaagcagttggtaaggtgattccagaactgaatgggaagctcactggaatggctttccgcgtgcctacagcgaacgtaagcgtcgtcgacctaacctgccgactggaaaagcccgccaagtatgatgatatcaagaaagtggtgaagcaagcctccgagggccctctgaaaggaatattgggatatacggagcaccaggtggtctcttctgacttcaattcagacacacactcaagcacgttcgatgcaggtgcaggcatagctctcaacgaccactttgttaagttgatttcatggtatgacaatgagtttgggtattctaatcgagtggttgatttgatggcccatatggcctctaaggaatag

SEQ ID NO: 118743 - DNA, 1008 bp, synthetic construct
  misc_feature 1..1008: note = Description of Artificial Sequence: Synthetic coding sequence
  source 1..1008: mol_type = other DNA
atgggtaaggtgaaagtgggggtaaatggctttggtagaatcggacgcttggtgactcgcgccgccttcaacagcgggaaggttgatatcgtagccattaatgacccttttattgatctgaattacatggtctatatgttccagtacgattcaacgcacggtaaatttcacgggactgtgaaagccgagaacggtaagctcgttattaacggaaaccccatcactatctttcaagagcgcgatccgagcaagatcaaatggggagacgcaggggctgagtacgtggtcgaaagcactggagtgtttacaacaatggagaaggccggcgcccacctccaaggaggggcaaagcgagtcatcatcagtgccccctccgctgacgcaccaatgttcgtgatgggcgttaaccatgagaaatatgataacagtttgaagatcatttccaatgcttcttgcaccacaaattgcctcgcaccccttgctaaggtgatccatgacaattttgggattgtggagggccttatgactaccgtccacgccattacagccactcagaagaccgtagacggcccaagcggcaagttgtggagggacggccggggcgccctgcagaatataatccccgcttccacaggagcagctaaggccgtaggaaaggtgatccctgagttgaacggcaagctgaccggaatggcattccgggttccaaccgcaaacgtcagtgtagtggatttgacctgccggctggagaaacccgccaagtacgacgatatcaagaaggttgtgaagcaggcctcggagggccctctgaaaggcattcttggttatactgaacaccaggtggtgtcttcagattttaattctgacacgcactctagtacattcgatgcaggtgcgggcatcgctctgaatgaccacttcgtgaagcttatcagttggtatgataatgagttcgggtactccaacagggtagtggatctgatggcgcatatggcctcaaaggagtag

SEQ ID NO: 118744 - DNA, 648 bp, synthetic construct
  misc_feature 1..648: note = Description of Artificial Sequence: Synthetic coding sequence
  source 1..648: mol_type = other DNA
atggggaaagtgaaggtgggggtgaatggcttcggtcggatcggccgacttgtcacacgggccgccttcaacagcggcaaagtcgatatcgtggctatcaacgatcccttcatagatctgaattatatggtttatatgttccagtacgactctacccacggaaagttccacggcacagtgaaagcagaaaacggaaagctagtcattaacggcaatcctattacaatctttcaggagcgcgacccttcgaagattaagtggggggatgctggtgcggagtacgtggtggagtctactggtgtgttcacaaccatggagaaagcgggagctcacctgcagggaggagccaaacgagttatcatttcggcgccatccgccgatgcgccaatgtttgttatgggggtgaatcacgaaaagtatgataactccctgaaaattatcagcaatgcgtcatgcaccactaattgcctcgcgccgttggcaaaagttatacatgacaacttcggcattgtcgagggcctcatgaccacggttcatgcgatcacagctacccagagagaagcacactggcatgggctgccttgtccccactgccagcgggtctcagggggcccggatctgccttcaagaaaaacatgccagatatag

SEQ ID NO: 118745 - DNA, 675 bp, synthetic construct
  misc_feature 1..675: note = Description of Artificial Sequence: Synthetic coding sequence
  source 1..675: mol_type = other DNA
atgacactgtttcattttggaaactgttttgcactggcctattttccctactttattacatataagtgctccggtctttccgagtataacgcattctggaagtgtgtgcaggcaggagttacttatttgttcgtgcaattgtgtaaaatgttattccttgctacatttttcccgacttgggagggcggcatatatgatttcataggcgagttcatgaaggcttccgtggatgtggctgacctcatcggccttaacttggttatgagtagaaacgctggaaaaggtgaatataagattatggtcgccgcattggggtgggcaacagccgaacttataatgtctagatgcatccccctctgggttggtgctcgcggaattgagttcgactggaaatacattcagatgtctatcgatagtaacatatcactcgtccattatattgtcgcctccgcccaggtctggatgatcactcgatatgatctgtaccatacgtttaggcccgcagtcctcctcttaatgttcctcagcgtctacaaggcttttgtgatggaaacattcgtgcacctgtgctcactgggatcgtgggctgccctcctggcgagggctgtcgtcacggggctgcttgccctcagtacacttgctctgtacgtagccgtggttaacgtgcactcctag

SEQ ID NO: 118746 - DNA, 1104 bp, synthetic construct
  misc_feature 1..1104: note = Description of Artificial Sequence: Synthetic coding sequence
  source 1..1104: mol_type = other DNA
atggctgccgctttgcaggtgctgcctcggctcgcacgcgcgcctctgcacccattgctgtggcgaggctctgtcgcgagactggcatcatccatggctttggcagagcaggctaggcagttatttgaatccgccgtcggcgctgtccttcccgggcccatgctccaccgcgcactgtccctggaccccggcggaaggcagttaaaagtgcgcgaccgtaattttcagctcagacagaacctctacctcgtcggtttcggcaaagcggtcctaggaatggctgccgcagctgaagaactactgggtcaacaccttgttcaaggagtaatcagcgtgcctaaagggattagggccgcaatggagagggctgggaagcaggaaatgctgttgaaaccccattcccgggtccaggtgtttgagggagccgaagacaacctacctgatcgcgatgccctgagagcagcacttgctatccagcagctagcagagggactgaccgcagatgacctgctacttgttttgatatctggcggtggaagcgcccttctcccagccccgattccacctgttaccctggaggaaaaacagacacttacaagacttttggcagccaggggggccactatccaggaacttaacaccatacgaaaagcgctatctcagctaaagggagggggcttggcacaagctgcctaccccgcacaggtggtttcactaatcctctcggacgtggtgggtgacccagttgaggtgattgccagcggcccaaccgtggcctcatctcacaatgttcaggactgcctccacatccttaaccgttacggccttagagcagctctgccccgcagcgtgaagactgtgctttctagagccgacagcgatcctcatgggccacacacttgtggccacgttcttaacgtcataatagggtctaatgtcctggccctggctgaggcacagagacaagcggaagccttaggttatcaagctgtcgtcctgtctgcggccatgcaggggtgggggactcccgctgcccacagagatgacaggtatcagtgtcacggacacccaccgctggtgcctgccgccagtgtaatggcctag

SEQ ID NO: 118747 - DNA, 705 bp, synthetic construct
  misc_feature 1..705: note = Description of Artificial Sequence: Synthetic coding sequence
  source 1..705: mol_type = other DNA
atggctgctgcactacaagtgctcccgcggttggccagggcgcctctgcaccctctgctctggcgcgggtcagtggctcgcttagccagtagcatggctttggccgagcaggccagacagctgtttgaatccgctgttggcgctgtgttgccgggtccgatgctgcatcgagcactgtctttggatcctggcggtcggcagcttaaggttcgagaccggaatttccagctgcggcaaaacctgtacctggtggggttcggaaaggcagtgctgggcatggcagccgctgcagaagagctactgggccagcatctcgttcagggcgttatcagtgtgccgaagggtatacgggccgctatggagcgggcggggaagcaggagatgctccttaagccacactccagagtgcaggtgtttgagggcgcagaggataacctacctgatcgggacgcactgcgggcagccttggcaatccagcagttggctgaaggtctgacagccgatgatcttctgctggtccttatctcgggcggagaaccgcatccagtaaggtgcggtggaggaccctgcggcggtgactgccagtggcctcatcgaggccagtttcctcagtgtgctagattacctgcttatccccagtctttgaggcccccttgctctccagccactttctgcgaggactgcgcggtgtctggtcgcctttag

SEQ ID NO: 118748 - DNA, 1374 bp, synthetic construct
  misc_feature 1..1374: note = Description of Artificial Sequence: Synthetic coding sequence
  source 1..1374: mol_type = other DNA
atggctgcagcactccaggtactgccccggctcgctcgcgccccccttcatccattgctctggagaggttcagttgcaagacttgcctcgagtatggctcttgccgagcaggctcggcaactttttgaatcagcagtcggcgctgttctgcccgggccaatgctgcaccgcgccttgagcctggaccctggggggagacagttgaaggtaagggaccgtaattttcagctgcgccagaatctctatttagtgggatttggaaaagctgtcttaggtatggcagctgccgcagaggagctacttgggcagcacctggtgcagggagtgatttctgtgcctaaagggattcgcgccgcaccaatccccccagtaactctggaggaaaaacagaccctcacccggttgttggccgcccgcggagcgactattcaagaactcaatactattcgcaaggcattgtctcagctgaaggggggcgggctggcccaagccgcgtatcctgctcaggttgtcagtctgattctgtcagacgtcgttggggatccagtggaggtgatcgccagtgggccgacagtggccagctcacataatgtgcaggattgtcttcacattttgaacaggtatggcctccgcgccgccctaccacgatccgtgaaaacagtcctgtctagagccgattcagatccccacggacctcatacatgtgggcacgtgctgaatgtaataataggatcaaatgtgttagcactggccgaggctcagcgtcaagcagaggctttaggatatcaggccgtggtgttatccgctgctatgcagggagatgtaaagtccatggcccagttctatggcctcttggctcacgtggcccggactaggctaactcccagtatggcgggggcctcagtggaggaggacgcgcagctacatgaactggcagcagaacttcaaattcctgatctgcaactagaggaagctctggagaccatggcttggggtcgtggtcctgtatgtctcctggctgggggcgaacctacagtccaactccagggcagcggaagggggggacgcaaccaggaactcgccctcagggtgggagcagaattgagacgctggccactgggccctatcgatgtcctgtttctttctgggggcacggacggtcaggacggccccaccgaagccgccggggcctgggtgacgcccgaactcgcaagtcaggcagccgccgagggactcgatatcgccacctttctggcacacaatgatagccatacctttttctgctgcttgcagggtggtgctcaccttctgcacacaggaatgaccggcactaatgttatggatacacaccttctgttcctcaggcccagatag

SEQ ID NO: 118749 - DNA, 1572 bp, synthetic construct
  misc_feature 1..1572: note = Description of Artificial Sequence: Synthetic coding sequence
  source 1..1572: mol_type = other DNA
atggcagctgcactgcaggtgctccctaggcttgctagggcgccgctccatcccctgctatggcgtggctcagtggctcgacttgccagctccatggcgttggcagagcaagcccgtcagctttttgaaagcgccgtcggggcagtactgcccggacccatgctgcaccgagccctgagtctggatcctgggggccgccagttgaaggtgagagaccgcaacttccagctccgccaaaatctatacctcgtggggtttggaaaggccgtgctggggatggctgccgccgccgaggaattgctgggccagcatttggtgcagggagtgatcagtgtacccaaaggaattcgggccgcaatggagagggcagggaaacaggagatgcttcttaaacctcattctagggtgcaagttttcgagggtgcagaagacaacctcccagatagagacgccctgcgggccgccctggccatccagcaacttgccgagggcctgaccgcagacgacctcctcctggtcttgatcagcggcggcggctccgcactactgccggcacctatcccccccgtcaccctagaagagaagcagactcttaccaggcttctggctgcgaggggggcgactatacaggagttgaacactataaggaaggcgttgtctcaactcaagggaggtggacttgcccaggctgcgtatcctgcgcaggtagtttccttgatcctgtctgatgtcgtgggagaccccgttgaagtaatcgcctccggacctacagtggccagttcccacaacgtgcaggactgtctgcatattctcaatcgatacggtctacgcgctgcgctgccacggagcgtgaaaactgtattgtcccgtgccgacagtgaccctcatggccctcacacatgtggacacgtgttaaatgtgattattgggtctaacgtactggccttagccgaggcgcaaagacaggctgaggcacttggataccaggccgttgttctgtccgcggccatgcagggggatgtgaaaagcatggcacaattttatggtcttctggcccacgtggcaaggaccagactcactccttcaatggctggcgcgtccgtggaggaagatgctcagctccatgaactggccgccgagctgcagatccctgacctgcagcttgaagaagccctcgagacgatggcctgggggagaggtcccgtgtgcctgctggccggtggcgagcctaccgtgcagctgcagggatcagggagggggggacgcaatcaggagctggccctgagagttggcgccgaactgcgccgctggccactggggccaatcgatgtgctctttctctcaggcggcacagatggacaagatggcccgactgaagcagccggcgcctgggtgacgcccgagctggcatcacaagccgcggccgaggggctcgatattgccacattcctggcccataacgattcccacacgtttttctgttgtctgcagggaggagctcaccttcttcacactggaatgactggcaccaacgtaatggacacccacctgttgttcctcaggccaaggtag

SEQ ID NO: 118750 - DNA, 852 bp, synthetic construct
  misc_feature 1..852: note = Description of Artificial Sequence: Synthetic coding sequence
  source 1..852: mol_type = other DNA
atggaacttctcttgagtcagtcctgcatctggtggcccatggtgggggaaggtcgcactatcatcagttgtggcattaaagctatggaaagatccggcaactacttgatttggctgcagaagggcgagatgctgctgaagccgcatagtcgggtgcaggtctttgagggagcggaagacaatctcccggatcgcgacgctctccgcgctgccctggctatccaacagttagccgagggtctgactgcagatgacctgctgctggtactgataagcggcggggggtccgccctcttacccgcaccgatcccgcctgtgaccctggaagagaagcagaccctcacccggctgcttgccgcacgaggcgccaccattcaggagctcaataccatccggaaagctctgtcccagctgaaaggaggcggactggcacaggcggcatatccagcccaggtagtgtcactgatcctttccgatgttgtgggtgaccccgtggaagtgattgccagtgggcctacagtcgcgagttcgcataatgtgcaggactgtcttcatattttaaataggtacggcctgcgtgcggctttgccacggtccgttaagacagtcctcagtcgcgctgacagcgatccacacggcccacacacatgcgggcatgtactgaacgtgattatcggtagcaatgtacttgccctggccgaggcacaaaggcaagctgaggctctcggttatcaagccgtggtactgtcagctgctatgcaggggtgggggactcctgctgcacacagagacgacagataccaatgtcacgggcaccccccgctggtgccagccgcaagcgtcatggcctag

SEQ ID NO: 118751 - DNA, 723 bp, synthetic construct
  misc_feature 1..723: note = Description of Artificial Sequence: Synthetic coding sequence
  source 1..723: mol_type = other DNA
atgctgctgaagccacatagtcgggtgcaagtgttcgaaggagcggaggacaacctgcccgatcgggatgctctccgagccgcgctcgccattcagcagctggctgaggggctgacagcggacgatctcctgctggtactcatttccggaggcggttcggcgcttttgccggctccaattccccccgtgaccctcgaggagaaacagactttgactaggctgctggcggccagaggcgccactatccaggagctcaataccattcggaaggccctaagccaactgaaaggtggcggcctggcccaggcggcatatccggcccaggtggtctccctgatcctgagcgatgttgtgggggaccccgtcgaagtgattgcaagcgggcctaccgtggcaagttcccacaacgttcaggactgtcttcatatactaaatcgctatggactgagggccgccctgcctcgtagtgtcaaaaccgtgctttccagggccgactccgaccctcatggcccacacacctgcggacacgtgctgaatgtcataatcggctccaacgtgctggccttggccgaggctcaaaggcaggccgaggccctggggtaccaggccgttgttctgtccgccgctatgcagggctggggcacccccgcagcccatcgcgacgatcgatatcagtgccatggacacccacctctcgtccctgctgcatcggtcatggcttag

SEQ ID NO: 118752 - DNA, 618 bp, synthetic construct
  misc_feature 1..618: note = Description of Artificial Sequence: Synthetic coding sequence
  source 1..618: mol_type = other DNA
atggcagccgctttacaggttctcccccggttagccagagcccctctgcacccactgctgtggaggggctcagttgctaggttggcaagctcaatggccctggcagaacaagcgcgccagctgtttgagagcgccgttggcgccgttctgcccgggccaatgctccacagggcactcagtctcgacccaggaggaaggcagctcaaggtgagggatagaaactttcagttgcgccagaacctgtatctcgtgggctttggaaaagctgtgcttggcatggccgctgctgccgaggaactcctagggcagcatctcgtgcaaggcgtcatttctgtgcccaagggtattcgagctgctatggagcgggctggcaaacaggaaatgttactgaaaccgcacagcagagtgcaggtcttcgaaggggccgaggacaacctgcccgatagggacgctctgcgggccgctttggcaattcagcagctcgccgaaggactgaccgcggacgacctgctgttggtcttgattagcggttgggggactccagcggctcaccgagatgacaggtaccaatgccacggtcatccaccactggtgcccgctgcctccgtcatggcgtag

SEQ ID NO: 118753 - DNA, 705 bp, synthetic construct
  misc_feature 1..705: note = Description of Artificial Sequence: Synthetic coding sequence
  source 1..705: mol_type = other DNA
atggccgctgccctccaggtgctgccacggctggcccgtgcacctctgcatcctttgctgtggagagggagcgtcgctcggctggcctctagtatggcactggccgagcaggccaggcagctgttcgaatccgctgtgggtgccgtcttgccagggccaatgcttcaccgggctctgagtctcgatccagggggtagacagctcaaggtgagggatcggaactttcagctgcgtcaaaatctgtacctcgttggttttgggaaggcagtgctaggaatggctgcggccgcagaagagctgctgggccagcacctcgtccaaggcgtcatctccgttcccaaaggaattcgcgctgccatggagcgcgcgggcaaacaggagatgctgctgaagcctcactcccgggttcaagtgttcgaaggagcagaggataatctgcccgaccgcgacgctctgagggcagcactggccattcagcagctggcggaaggccttacagccgatgatttgctgctggtcctaattagtggcggcgaacctcaccctgttagatgtggtggcggtccatgtggaggtgattgccaatggccccataggggacagtttccccaatgtgcgcgcctgcctgcctatcctcagagcctccggccaccttgttctcccgccactttctgtgaagattgcgcggttagcggacgactctag

SEQ ID NO: 118754 - DNA, 285 bp, synthetic construct
  misc_feature 1..285: note = Description of Artificial Sequence: Synthetic coding sequence
  source 1..285: mol_type = other DNA
aaaatccttgatgccatgaacagggattgcggtatccccctttctcacctccaggtggatgggggtatgacgtctaataaaatactgatgcagttgcaggccgatattctgtatatccccgtcgttaagccctcgatgcccgagacaacagccctgggtgccgcgatggccgcgggggctgccgaaggggtaggggtgtggagcttggaacctgaggatttgagtgccgttactatggagcgattcgaaccgcagatcaacgctgagggaaccttcaaggagtag

SEQ ID NO: 118755 - DNA, 1662 bp, synthetic construct
  misc_feature 1..1662: note = Description of Artificial Sequence: Synthetic coding sequence
  source 1..1662: mol_type = other DNA
atggcagcttctaaaaaggccgtcctggggccactggtaggcgctgtcgatcaggggactagttccacaaggttcctggtgtttaacagcaagacggcagaactgctgagccatcaccaggtcgagatcaaacaggagtttcccagggaaggctgggtggaacaagatcctaaagaaatcctccatagcgtctatgaatgcattgagaaaacttgcgagaagctcgggcagctaaacattgacatcagcaacattaaagctatcggcgttagcaatcagcgcgagaccacggttgtatgggacaagataacaggcgaacccttgtacaacgcagtcgtatggctggatctgaggacccaatcaaccgtcgagtcactttccaagcgcattccaggaaacaataactttgtgaagagtaagactggcttacccctcagtacatatttctctgcagttaagctacgatggctgttggacaacgtaagaaaagtccagaaggccgtggaggagaagagggcactattcgggaccatcgattcgtggcttatatggagtctcactgggggtgtgaacgggggagtccattgcaccgacgtcacgaatgccagtaggacaatgctatttaacattcattcgcttgagtgggacaaacagctgtgcgagttttttggcatccctatggagatacttccaaatgtccgcagctctagcgagatctatgggctaatgaaggccggcgctctggagggcgttccgatttccgggtgcctgggagatcagagcgcagccttggtcgggcagatgtgctttcagatcgggcaagcaaaaaatacttatggaacaggctgttttttgttgtgtaatacaggccacaaatgcgtcttctcagatcacggacttctgaccactgtcgcttacaagctgggtagagacaaacccgtttactacgctctcgagggctctgtagcaatagcaggtgccgtaatcaggtggctgagggacaaccttggcattattaaaacatccgaagaaatagaaaaactcgctaaggaggtggggacttcctacggatgctacttcgtgcctgcctttagcggactctacgcaccttactgggagcccagcgcacgcggcataatctgtggtttgacgcagttcaccaataagtgccatattgcctttgctgcactggaagccgtctgttttcaaactcgcgagattcttgatgccatgaatcgggactgcggcattcccctctcccacctgcaagttgatggcggaatgacttccaacaagatccttatgcagctgcaggctgacatcctttatatcccagtcgtaaaaccttcaatgccagaaacaactgctctcggtgccgctatggctgccggagccgccgagggagtcggcgtgtggtccctggagcctgaggacctgagcgcagttactatggaaaggttcgagccacagattaacgctgaggagtctgaaattcgttacagtacgtggaaaaaagctgtcatgaagagcatgggttgggtgacaacccagtccccggagtccggagatcccagtattttttgctccctacccttgggcttctttatcgtgagttcgatggtgatgctaataggcgcgcggtacatatctggaattccatag

SEQ ID NO: 118756 - DNA, 1575 bp, synthetic construct
  misc_feature 1..1575: note = Description of Artificial Sequence: Synthetic coding sequence
  source 1..1575: mol_type = other DNA
atggccgctagtaagaaagcggttttaggacctttagtcggggcggtcgatcaaggcaccagttccacaaggttcctagtttttaattctaagactgccgaacttttgagccatcaccaagtagagattaaacaagaatttcctagggaaggctgggtagagcaggatcccaaagagatcctacactcagtctatgaatgcattgagaaaacatgcgaaaaacttgggcaactcaacatagacatctcaaacatcaaggccattggcgtctccaatcagagagaaacaacagtggtttgggacaaaatcacaggggagcctttatataatgccgtggtgtggctagacctaaggacccagagtacggttgagagcttgtctaaaaggatcccaggtaacaataatttcgtgaaatccaagactggattacctctgtcgacctatttctctgccgtaaagctcaggtggttgctcgacaatgtacggaaagttcaaaaagccgtggaagagaagcgtgccctgttcggcacgatcgattcttggcttatttggtcactgactggaggcgtcaacggcggtgtacactgcactgatgtcactaacgccagcaggacaatgctttttaatattcactcactggaatgggacaagcagctgtgcgaatttttcggtattcccatggaaatcctgcccaacgtccggtcatcgagcgagatatatggactgatgaaagccggtgcattagagggcgtccccatcagcggttgtttaggggatcagagcgccgccttggtgggtcagatgtgtttccagattggccaggcgaaaaacacctacggaacaggctgtttcctactgtgtaatacaggacacaaatgtgttttctcagaccacggactgttgacaactgtggcatataaactgggccgggacaagcctgtgtattatgcccttgaaggttccgtcgccatcgctggagctgttattagatggttgcgcgataatcttggaatcattaaaactagtgaggaaatcgaaaaactggctaaggaagtggggactagctacggctgttacttcgtacctgcattttcaggactttatgccccctactgggagccttccgcccgtggaataatctgtggtctaacacagttcaccaacaagtgtcacatcgcattcgccgccctcgaggcagtgtgttttcagacccgcgagatactggatgcaatgaatcgcgattgcggcatacccttgtcccacctgcaggttgacggagggatgactagtaataaaatccttatgcagctacaagcggatatcctgtatataccagtcgtgaagccatctatgccagagaccaccgctctgggcgccgccatggccgcaggtgctgcagaaggtgtcggagtctggtctctggaaccagaagacctgtctgcagtgacaatggagagatttgagccacaaatcaatgcagaggaatccgagattcggtattcaacttggaagaaggcagtgatgaagtccatggggtgggtcactactcaatcgccagagtcgggaattccctag

SEQ ID NO: 118757 - DNA, 1593 bp, synthetic construct
  misc_feature 1..1593: note = Description of Artificial Sequence: Synthetic coding sequence
  source 1..1593: mol_type = other DNA
atggccgcttccaagaaggcagttttaggaccactcgtcggggccgtagatcagggaacctcaagcacacgctttctcgtcttcaacagcaaaaccgcagagctcctgtcccatcatcaggtagagattaaacaggagttcccacgggaggggtgggttgagcaggaccccaaagagatacttcatagcgtctacgagtgcattgaaaaaacgtgtgagaaactgggtcagcttaatatcgatatctcaaacatcaaggccatcggtgtatctaatcagcgcgagaccaccgtggtgtgggacaagattactggagaacctctctacaacgccgtggtgtggctggacttacggacgcaaagtacagtagagagtctaagtaaaaggattccaggaaacaacaattttgtcaagtctaaaaccggactgcccctttccacttacttctctgctgtgaaactaaggtggctcttggataatgtgaggaaggtacagaaggcggtggaagaaaaaagagcccttttcgggacaatcgactcctggcttatatggagtctgacaggaggcgtcaatggaggagtgcattgcacagatgtgacgaatgccagtcgcacgatgctctttaacatccactcgctggagtgggacaagcagctctgcgagttcttcggtatacctatggagatcctaccaaatgtgcggagctcgagtgagatttacgggctcatgaagatctcacatagcgtgaaggccggtgctctggaaggcgtacccatctccggctgcttaggggaccagtcagccgctttggtgggacagatgtgtttccagatagggcaggccaagaacacgtatggtaccggatgtttccttctgtgtaacaccggtcataaatgcgtattctcagaccatggactgctgactaccgttgcttacaaactggggcgggacaaaccagtgtactatgccttggagggttccgtcgccattgccggggctgtgatcaggtggctgagagacaatctcggcataatcaagacctccgaggagatcgagaagctagccaaagaggtgggaacaagctatggttgctactttgttcccgcctttagcggactttatgccccatattgggagcctagcgcccgcggcataatttgcggacttacccaatttaccaacaagtgccacatcgcattcgcagcattggaggctgtctgcttccagacgcgggagatccttgacgctatgaatagagattgcggcatacccttaagccacttacaagtcgatgggggcatgacgtctaataagatcctcatgcaactccaagctgacattctgtacatccccgtggttaagccctctatgcctgagacaaccgccctcggagccgccatggcagccggagcagctgagggagtcggcgtgtggagcctcgagccggaggacctctcagcagtaacgatggaaagattcgagccgcagatcaacgccgaagagagtgagattaggtattcaacctggaaaaaagcagtgatgaagagcatgggctgggtaacaacgcagtcacccgagtccggcattccctag

SEQ ID NO: 118758 - DNA, 1065 bp, synthetic construct
  misc_feature 1..1065: note = Description of Artificial Sequence: Synthetic coding sequence
  source 1..1065: mol_type = other DNA
atgctgtttaatatacactcacttgaatgggataagcaactgtgcgaattcttcggaattcctatggagatccttccaaacgtgcgttcttcctcagagatatacgggctgatgaaaatcagccatagcgtgaaggccggcgctctggagggagtcccaatttctggctgccttggagatcagtctgccgcgttggtgggacaaatgtgctttcagatcgggcaggcgaagaacacttacggcacgggttgtttcctcctatgtaatactggccacaaatgcgtgttttcagatcatggattgctaactactgtggcctacaaattgggcagggacaagcctgtgtattacgccttggaggggtctgtggcgatcgccggagccgtaatacgctggcttcgagataatctcgggatcatcaagacctccgaggagatagaaaagctcgctaaagaggtgggcacctcctacggctgctactttgttccagccttcagtgggctgtacgccccctactgggaaccatcagctcgaggtatcatatgcggacttactcaattcaccaacaaatgtcacatcgcattcgctgccctggaggctgtgtgcttccagacccgggagatcctggatgctatgaatcgagattgtgggatcccgctaagtcacctgcaggtggacggcggaatgacatccaacaagatcctgatgcagctccaggccgacatcttatacatacccgtcgtcaagccgagtatgcccgaaactacggccctcggggccgccatggctgccggagctgccgaaggtgtcggggtgtggagcctggagcctgaggatctgtcagccgtgactatggaacggttcgaaccgcagatcaatgccgaagagtctgagatccggtacagcacctggaaaaaggctgtgatgaagtcgatgggctgggtcaccactcagagccccgaatctggagacccctccatcttttgtagcctgcctctgggattcttcattgtttcttctatggttatgttgatcggggcccgctatatttctgggataccttag

SEQ ID NO: 118759 - DNA, 1104 bp, synthetic construct
  misc_feature 1..1104: note = Description of Artificial Sequence: Synthetic coding sequence
  source 1..1104: mol_type = other DNA
atggcctaccttgacaactttaaaacaaacgcccgacacttcatcctgtttgtgaacatttctagcctgacaggaggcgtcaatggcggtgtccattgcaccgatgtcaccaacgcttctcgtaccatgctgtttaatatccacagtcttgagtgggataaacagctgtgcgagtttttcggcattcctatggagatcttacctaacgtgcggtcctccagtgaaatctacgggctgatgaagatatcacactcagtcaaggccggagccctggagggagtgccaatctctggatgcttgggcgatcaatctgcagccctcgttggtcaaatgtgctttcaaattggccaggccaaaaacacatacggaacaggttgtttcctgttgtgtaatacaggccataagtgcgtgttttccgatcatggccttctaactacggttgcttataagctcggcagggacaaaccagtgtactacgccctcgagggaagcgtcgcgattgccggggccgtgatcaggtggttgagagataatctgggcattattaaaacctccgaggagattgaaaaactggctaaagaagtcggcacttcctatgggtgttattttgtgccagctttcagtggactctatgctccctattgggagccgagcgctagaggcattatctgtggactcacccagttcaccaataagtgccacattgcttttgccgctctcgaggcagtgtgttttcagactcgagagattctagatgctatgaaccgggactgcggtatcccgctgagccacctgcaggtcgacggaggtatgacgtccaataagatcttgatgcagctccaagcagatatcctgtacatccctgtggtgaaacctagcatgcctgaaacaactgccctcggtgcggccatggcagctggagccgctgagggcgtaggagtctggtctttggagccagaggacctatccgcagtaactatggaaagattcgagccccagatcaacgccgaagaatccgagattcgctattcaacatggaaaaaagcggtgatgaaatcgatgggatgggttactacacagagtcccgagagtggcattccatag

SEQ ID NO: 118760 - DNA, 1680 bp, synthetic construct
  misc_feature 1..1680: note = Description of Artificial Sequence: Synthetic coding sequence
  source 1..1680: mol_type = other DNA
atggctgcctcaaaaaaggccgtactaggacctctggtcggagccgtagaccagggcaccagttccacaaggtttttggtcttcaactctaagactgccgagctgctgagtcaccatcaggtggaaataaagcaggaattccctagggagggttgggtggagcaagatcccaaggaaattttgcatagcgtgtacgaatgtatcgagaaaacatgtgagaaactaggacagctgaatatagacataagtaatatcaaggctatcggagtgagcaatcaacgggaaacaaccgttgtgtgggacaaaattaccggagaaccactttacaacgccgtggtttggctcgatctgcgtactcaatcaacagttgagtcactgagcaaacgtattccgggaaataataactttgtgaagtcaaaaacaggtctgcctttaagcacttacttctccgccgtaaagttgagatggctgctggataacgtccggaaagtgcagaaggcagtggaggagaaaagggccctgtttgggaccattgactcctggttgatttggagcctaaccggcggcgttaatgggggagtgcactgtacggacgtgacaaatgccagtcgaacaatgctattcaacatccacagcctggagtgggataaacaactctgtgagttttttggcattccaatggagatcctccccaacgtgagaagtagcagcgaaatttacggtttaatgactattcataattccaagaaggcaggggcccttgaaggcgtgcccatatctgggtgtctgggcgaccaatcggccgctttagtgggccagatgtgctttcagatcgggcaggccaagaacacctacggtaccggttgcttcctgctgtgcaacactgggcataagtgtgtgttcagtgaccatggcctactcacgactgtggcatataagctagggcgtgacaaacctgtgtactatgcactggaaggcagcgtggctatagcaggcgccgtaatccggtggctgagggataaccttggaatcattaaaacgtcagaggagatcgagaagctcgcaaaagaagttgggacctcatatgggtgctattttgtgccggcttttagcgggctttatgccccatactgggagccctcggccagaggaattatctgtggtctaacacaatttactaataaatgtcatatcgcctttgcagcacttgaagcagtgtgcttccagacaagggagatactggatgctatgaatagggactgtgggattcccctctcccatttacaggtagacgggggaatgacaagcaataagattctgatgcaacttcaggctgacatcctctacatcccagttgtcaagcctagtatgcccgaaactacagcactgggcgcagctatggcagccggcgctgccgaaggagtgggcgtctggagtcttgagcccgaggatctgagcgccgtgactatggaaagattcgaacctcaaatcaacgcggaggagagcgagatcagatattccacatggaagaaggccgtaatgaagtccatgggatgggttacaacccagtcgcccgaaagcggagaccccagcatcttctgttccctccccctgggcttcttcattgtatcttccatggtgatgcttatcggggctcgatatattagcgggattccctag

SEQ ID NO: 118761 - DNA, 1662 bp, synthetic construct
  misc_feature 1..1662: note = Description of Artificial Sequence: Synthetic coding sequence
  source 1..1662: mol_type = other DNA
atggcagctccaaagaccgcggccgttgggccactggtgggcgccgttgtgcaggggacaaattccacacgcttcctggtgtttaattccaagaccgcagaactgctgtcccaccataaggtggaactcacacaggagttccctaaggagggctgggttgagcaagatccaaaagagatcctgcagagcgtttacgagtgtattgcaagaacttgtgaaaaattagacgagctgaacatagatataagtaatattaaagcggtgggcgtgtccaatcagcgcgaaactacagtgatttgggacaagctgactggcgagcctctgtacaacgcggtcgtgtggctggatctacgtacacagactaccgtcgaagatttaagcaagaaaattccaggcaatagcaacttcgttaagagtaagaccggtcttcccctgagcacatatttcagcgcagtcaagctccgctggatgttggataatgtgcgaaacgtgcagaaagccgtggaggagggcagggcactgttcggcacaattgattcatggcttatttggtcgttaactgggggcgtgaatggcggggtgcattgtacggatgtgaccaatgctagccggacaatgctgtttaacatccattctttagagtgggataaggagctgtgcgacttcttcgagatccccatggatcttttgcctaacgtgttcagtagcagcgagatatacggtctcattaaaaccggggccctggagggtgtccctatctctggctgtttgggcgatcaatgtgctgctttggtcggtcaaatgtgtttccaggaagggcaggcgaagaacacatacgggaccggatgctttctgctatgtaataccggaaggaaatgtgtgttctctgaacacggtctgctgactactgtcgcctataagcttggacgtgaaaagcccgcctactatgctcttgagggcagtgtggccatcgctggagcagtgattagatggctgcgggataatttgggcatcattgaaactagcggagatatcgaaaggctggcaaaagaagtagggacttcctatggttgttacttcgttcccgccttcagtggactttacgccccctattgggagccaagcgcaaggggaatcctgtgtggactgactcaattcacaaataagtgtcatatcgcttttgctgccctggaagctgtctgctttcagacaagagaaattcttgaagctatgaatcgggactgtggaatcccactgcgccacctgcaggtggatggggggatgacaaataataaagttttaatgcagctgcaggccgacatattgcatattcctgtgattaaacccttcatgcccgagactactgccctgggcgcagctatggccgcaggagcagctgagggcgtgtcagtatggagcctggaaccacaggccttgtccgtgctgcgaatggagaggtttgagcctcagattcaagcaaccgagtctgagatccgctatgcaacgtggaaaaaagccgtgatgaaatccatgggctgggtgacaagtcagtccccagaggggggtgacccctccatcttctcaagtctacctctcggtttcttcatcgtgtcgtccatggtcatgttgatcggtgccaggtatatcagtggagttccttag

SEQ ID NO: 118762 - DNA, 1050 bp, synthetic construct
  misc_feature 1..1050: note = Description of Artificial Sequence: Synthetic coding sequence
  source 1..1050: mol_type = other DNA
atggcaagtaaaaaggtctgtatcgttggaagcggaaattgggggtccgcaattgctaaaattgtgggcggtaatgccgcacaactggcccagttcgacccaagggtaacgatgtgggtgttcgaggaagacattggtgggaaaaagctcacagaaatcatcaatacacaacatgaaaacgtaaaatatttacccggtcacaagctgccgcccaacgtcgtggctgtacccgatgtggttcaggccgcagaagacgccgatattctaatttttgtggtcccgcatcagtttattggaaagatctgcgatcagctaaaaggacacctgaaggcaaacgctaccggcatctccctgattaaaggagtcgatgagggtcccaatgggctaaagctgatatcagaggttatcggcgagagactgggcatccctatgtctgttttgatgggcgccaatatagccagtgaagtcgccgacgagaaattctgtgagactactatcggctgtaaggatccagcccagggacaactcctcaaagagctcatgcagacccccaacttccggattaccgtggtccaggaagtcgatactgtagagatttgcggagcactaaaaaatgtagtggctgttggcgccggattctgtgatggactggggttcggcgacaacacaaaagccgctgtgattagattggggctgatggagatgattgccttcgccaaactgttctgtagcggtcccgtgagctcggctacatttctagagagttgcggtgtggcagatttaatcaccacttgttatggaggccgcaatcgaaaagtggctgaggccttcgcaagaaccggtaagagtattgagcagttggagaaagaattactgaacggacagaagctccagggccctgagactgcaagggagttgtacagcatcctgcagcataaaggccttgttgataagtttcctctgtttatggcagtgtataaggtttgctacgagggccaacccgtaggagaattcatccactgtcttcagaatcaccccgagcacatgtag

SEQ ID NO: 118763 - DNA, 981 bp, synthetic construct
  misc_feature 1..981: note = Description of Artificial Sequence: Synthetic coding sequence
  source 1..981: mol_type = other DNA
atgcagactccaaatttccgcatcactgtcgtacaggaggtagatactgtggagatctgtggagctttgaaggtgcggggagcccaacgacagctgtggggggaggaaaaggctccaaaggaggtgtggcttagcagcgccaggctgcaggtcctgcaggcccttactatcgagcagtggttcccttttcctaccatgtctcatgcttataggaggtcctgccgaagcaaagccagagccattcaagctgactattcctcctctgatagagggccaccttgtagttgcccaatcttggcaccgtgtggaacaccacaccccttggcacctgggggacagggggacaaggaaatgccgcggttaatgggagataaaacatcattgacaccgaggcagaccaatggtcaaaattacgggtcttggactgccgtagacggtctgtacaatggcatggtgcgatgggaggaccagttggagcgacgcgtcgtgttcagaaagtgccctcgggggggcagcatgggccaagggctgcgaaaaggagtacagcaagggggcaagcctcgtggagggagtagactccttaaagggcataccttgtacctgtccagcgccgtgggcgtcacggctgacgagatgtcaatgcgcggcctccatatggggcccattggtggtgggctcttcacgtacgacttacactcatttaagaacgtggtagctgtaggggcagggttttgtgacgggctgggatttggagataacaccaaagccgccgtgattagattaggtctcatggaaatgattgcattcgctaaactcttttgctcgggcccagtcagttcagcaaccttcctggagtcctgtggcgttgctgatctaatcacgacctgctatggcggacggaatcgaaaggtggctgaggcttttgctcggactgggaaggttggccccggaaggagagaaaacaggggagccgccttatag

SEQ ID NO: 118764 - DNA, 1056 bp, synthetic construct
  misc_feature 1..1056: note = Description of Artificial Sequence: Synthetic coding sequence
  source 1..1056: mol_type = other DNA
atggccgccgccccgctgaaggtctgcatagtcggttccggaaattggggatcagccgtcgccaaaatcatcgggaacaacgttaagaaattacaaaagtttgcatctacggtcaaaatgtgggttttcgaagaaacggtcaacggaaggaaactcaccgacatcattaacaacgatcacgagaacgtgaagtacttgcctgggcacaagctgcccgagaacgtcgtggcaatgtctaatctgtctgaggccgtgcaagatgctgacttgctggtcttcgtcatcccccaccaattcatccaccggatttgtgatgagataacaggtcgcgttccaaaaaaggctctcgggattacccttatcaagggtatagatgaaggtccagaggggctcaaattgatttccgatataatcagggaaaagatgggcattgatatttccgtcctcatgggagccaatatagccaacgaagtagccgcagagaaattttgcgagacaaccattggcagcaaggtaatggaaaatggtctgctcttcaaggagctcttacagactccgaacttccgaattaccgtcgtggacgacgctgatacagtagagctgtgcggagcgctgaagaacattgtggcagttggagcaggcttctgcgacggacttcgatgcggtgataatactaaggcagcagtaattcggctgggcctcatggaaatgatagcttttgcgcgaatcttctgcaaagggcaagtcagcacagctaccttcctggagtcctgtggcgtggccgacctcatcacgacttgttatggtggcagaaacaggagggttgcagaggcctttgcgcgcacagggaagactatcgaagagctggagaaggaaatgctgaatggccagaaactgcagggacctcagactagtgctgaggtgtaccgtatcctgaagcagaaaggattgttggacaagttcccactcttcacagctgtgtatcagatctgctatgagagtaggccagtacaagagatgctcagctgtctgcagtcacacccggaacacacttag

SEQ ID NO: 118765 - DNA, 1860 bp, synthetic construct
  misc_feature 1..1860: note = Description of Artificial Sequence: Synthetic coding sequence
  source 1..1860: mol_type = other DNA
atggagtcaagctcttcctctaactcttacttctctgtcggtcccactagccctagcgcggtcgtcctgctctacagcctatcaaaagaatcgttacaatctgtagacgttttgagggaggaagtgagtgaaatccttgacgagatgagccataaactccgcctgggggccatacgcttttgtgccttcacgctaagcaaggtgttcaaacaaattttctctaaagtgtgcgtcaatgaggagggaatccagaaactccaacgcgccatccaggagcacccagtcgtgctgttgcccagccatcggtcttacattgattttctgatgctcagtttcttgctgtacaactacgaccttccagtcccagttatcgcggccggcatggactttctgggaatgaaaatggtgggcgagctgctgcgaatgagcggcgcattcttcatgaggcgaacatttggcggaaataaactgtactgggccgtcttctctgagtatgtgaagactatgctccggaacggctatgcgccagttgagttcttcttggaggggactcgttcccggtccgctaagactctaactcctaagtttggactgttaaatattgtaatggaacccttttttaaacgggaagtctttgacacttaccttgtacctatttccattagctatgacaagatacttgaggagacactgtacgtatacgagctactgggggtgcctaaacccaaagagagcaccaccgggctgctcaaggcacggaaaattctgagcgagaacttcggctctattcatgtgtactttggtgatcccgtgagcctaaggagcctggccgcaggccggatgtctagatcttcttacaatctggtgcccagatatattccccaaaagcagagtgaagatatgcacgcgtttgtcacagaagtggcctacaagatggagcttctacaaattgaaaacatggtgctgtccccttggactttaatagtggcagtattgttacagaatcgacccagtatggattttgatgccctcgtcgaaaagacgctgtggctcaagggactcactcaggccttcgggggcttcctgatctggcccgacaacaagcccgcggaagaggtggttcccgcctctattcttctgcacagtaacattgcctcactggtcaaggatcaggtgatcctaaaggtcgactctggggactctgaggtcgtagacggtttgatgctgcagcacattactctgctaatgtgttccgcttataggaaccagctgctcaacatctttgtcagaccatcactggtcgctgtggcgctccagatgaccccaggtttcaggaaagaggatgtgtactcctgcttccgatttctgcgggacgtctttgccgatgagttcattttcctgcccggcaacaccctgaaagatttcgaggagggatgttacctgctctgcaagtctgaagctatacaggttacaacaaaagacatcttggttacagagaaaggaaatacagtgttggagttcctcgttgggctgtttaagccatttgttgaatcttaccagataatatgcaaatatctgctttctgaggaggaggaccacttctctgaagaacagtatttggccgccgtgagaaagttcactagtcaattactggaccaaggcacgtctcagtgttatgacgttctgtcctccgacgtgcagaaaaacgctctagcagcatgtgtacggctcggagtcgtggaaaaaaaaaaaatcaacaataattgcatctttaatgtgaatgagccagctaccacgaaactggaggaaatgttgggctgtaaaacccccataggcaaacctgccacagctaaactgtag

SEQ ID NO: 118766 - DNA, 2043 bp, synthetic construct
  misc_feature 1..2043: note = Description of Artificial Sequence: Synthetic coding sequence
  source 1..2043: mol_type = other DNA
atggagagttcttcctcatctaactcctacttctcagttggcccgaccagcccgtctgccgtggtgctgttgtatagcaaggaactgaaaaaatgggacgaatttgaagacattctggaggagcggagacatgtgtccgacttaaagttcgctatgaaatgttacacccctttagtatacaaaggaattaccccttgtaagccaatcgacattaagtgcagcgtgcttaactctgaggagatccattatgtgatcaaacagctgagcaaagaaagccttcagagtgtggatgtgttaagagaggaggtttctgaaatactggatgaaatgagccataaactgcgccttggagcaatccgcttctgcgcgttcacgttaagcaaggtgtttaaacagatctttagtaaagtctgcgtcaacgaggagggaatccagaagttacagcgcgccattcaggagcatcccgtggtgcttctgccttctcatcgctcctacatagacttcttgatgctcagctttctgctgtacaattatgacctgcctgtgccagtgatagccgcggggatggatttcctcggcatgaagatggttggtgagctcctacgtatgagtggagcattctttatgaggcggaccttcggaggcaacaagctctactgggccgtgttctccgagtatgtgaagacaatgttgaggaacgggtatgcacccgttgagttctttttggaaggcacacggtccagaagcgccaaaacactcacccctaagttcggccttttgaacatcgtcatggagccgttctttaaacgcgaggtctttgatacgtacctggtgcccatctcaatcagctacgataagattttggaggagaccctctatgtctatgaattgctcggtgtgccgaagccaaaagagagtaccactggactgctgaaggccagaaagattttgtcggaaaatttcgggagcatacatgtctactttggggacccggtgtctctgcggagcctcgctgcaggtcgtatgtctagaagctcttacaacctggtgcccagatacatcccccagaaacagtccgaggatatgcatgccttcgttacagaagtggcgtacaagatggagctcctgcagattgagaatatggtcctttctccctggaccctgatcgttgcagtgctactgcagaaccggcccagcatggattttgacgccctggtggagaagactctgtggctcaaaggcctcacgcaggcgtttggtgggttcctgatttggcccgataacaagcctgctgaggaagttgtgcctgcatccattcttctccattcaaacatcgccagtctggtcaaagatcaggtgattctaaaggtcgatagtggcgactcagaagtcgtggacgggctgatgctacagcacattactctcctcatgtgcagtgcttaccggaaccaactgctgaatattttcgtgcggcccagcttggtggccgtggccttacagatgacacccggttttcggaaagaggatgtttatagctgttttcgcttcctgcgcgacgtgttcgcagacgagtttatattcttaccaggtaacacacttaaggattttgaagaaggctgctacctcttgtgcaaatccgaggctatacaggttactaccaaggatatcttggttacagagaagggcaacacagtcctcgaattccttgtgggcctctttaagccatttgtcgagtcctaccaaatcatttgtaaatatttgctgtccgaggaggaagaccacttttccgaggagcagtacctcgccgccgtcaggaaattcacttcgcaactgcttgatcagggaacgtcacagtgctatgatgtgctctcctcagacgtccagaagaatgcacttgcagcttgcgtgcggttaggcgtggtggagaagaagaaaattaacaacaattgtatattcaacgtgaacgagccagctacaacaaagctggaggaaatgctgggctgcaagactcccattggaaagcctgctacagcgaagttgtag

SEQ ID NO: 118767 - DNA, 1764 bp, synthetic construct
  misc_feature 1..1764: note = Description of Artificial Sequence: Synthetic coding sequence
  source 1..1764: mol_type = other DNA
atggagtcctcctccagctcgaacagctacttctctgtcgggccaacttctcccagcgcagtggtgctgctctacagcaaagaactgaagaaatgggacgagttcgaggacattctggaggagcggcgacacgtctctgacctcaaatttgccatgaagtgttatacaccactcgtgtataaaggtatcacaccctgcaagcccatcgacataaagtgctctgtcttgaattccgaggaaatccattatgtgataaagcagctgtctaaggaaagcctgcagagcgtggatgtccttcgcgaggaggtgagcgaaatcctggatgaaatgtcacataaattgcggttgggagcaattcgcttctgtgcatttacactctccaaagtgttcaagcagatcttttcaaaactacagcgcgcaattcaggaacaccctgtagtcttacttccatctcatagaagctatattgacttcctgatgctctccttcttgctgtataactacgatctgcccgtaccggtaattgcagctggcatggactttcttggcatgaagatggtaggagagcttctgcgtatgagtggagcgtttttcatgcgaagaacttttggcggcaacaagttgtattgggctgtcttctctgagtacgttaaaaccatgctgagaaacggctatgcgcccgttgagtttttcctggagggaactagatctagatctgctaaaacgttgaccccaaagttcggcttgctcaacatagtgatggaaccattcttcaaaagagaagtcttcgatacgtacctcgtccccattagcatcagctatgataagattctggaagagaccctctatgtctatgaactgcttggtgtgccaaagccaaaagagtcaaccaccggtctgctgaaagccaggaagatcttgtcagaaaatttcgggtccatacacgtgtatttcggcgaccccgtgtctctgcgctccttagcagctggcagaatgtcaagatcatcctacaacctcgttccaaggtatataccccaaaaacagagcgaggacatgcatgcttttgtgactgaggttgcgtacaaaatggaactcctgcagattgagaacatggtcctgtccccctggaccctgatcgtggctgttctgcttcagaacaggccgtcaatggacttcgacgcattggtcgagaaaaccctgtggttgaagggactcacacaggccttcgggggtttcctcatctggccagataacaaacccgctgaggaagtagttcctgcttccatcttgctgcacagcaacatcgctagccttgttaaagaccaggtgatcctcaaagtcgacagtggcgactccgaagtcgttgacggcctgatgttacagcatatcaccctcttgatgtgtagcgcttatcgcaatcaacttctcaatatctttgtgcggccaagtctggtcgctgtggctttgcagatgacacccggcttcaggaaagaggacgtgtacagttgctttaggtttctgcgagacgtgtttgctgacgagtttatctttttacccggaaacactctgaaagattttgaggaagggtgctatttgctttgcaaatccgaggccatacaggtgaccaccaaagatatattggtgacagaaaaggggaatacagtacttgaattcctcgtgggccttttcaaaccctttgtggagtcttaccagatcatttgcaaatacctattatccgaagaagaagatcatttctccgagtag

SEQ ID NO: 118768 - DNA, 669 bp, synthetic construct
  misc_feature 1..669: note = Description of Artificial Sequence: Synthetic coding sequence
  source 1..669: mol_type = other DNA
atggaaagttcctcctccagcaattcctattttagcgtggggcctacctctccgtctgccgtggtgctcctgtactccctgagtaaagaatcgttgcagtcagtcgatgtacttcgtgaagaggtcagcgaaatcctggacgaaatgtcccacaaactgcgtttaggagcaattagattctgtgcttttacccttagcaaagtgttcaagcagatcttctctaaggtctgcgtaaacgaagagggaatccagaaactccagcgcgctattcaggagcacccagttgtactactgccgtctcaccgcagttacatagatttcctaatgctgagcttcctgctctacaattacgatctaccagtgccagtcatagcagctgggatggatttcctgggtatgaaaatggtaggtgagcttctgcgtatgagtggcgcctttttcatgagaagaacatttgggggaaataaactgtactgggcagttttttccgagtacgtaaaaactatgctgcgcaatggatacgcccccgtggaattcttcttggaaggcactcgctccaggtctgccaagactctcacacctaagtttgggctgttaaacatagttatggagccattctttaagcgagaggttttcgacacgtacctagtacctatttccataagctag

SEQ ID NO: 118769 - DNA, 870 bp, synthetic construct
  misc_feature 1..870: note = Description of Artificial Sequence: Synthetic coding sequence
  source 1..870: mol_type = other DNA
atgtcaaggaattctcgtaagaccattggtaaagtcagagtggactacattataatcaaaccattacctggctactcatgcgacatgaagagctccttttccaaatactggaaacccagaattcctttagacgtagggcatcggggtgccggcaactcgaccaccaccgctcagttggccaaggtccaggagaacactatcgcttctcttcggaatgccgcctcacacggcgcggccttcgtggagtttgatgtacatttgagtaaggatttcgtccccgtggtctaccatgacttgacctgttgtctaacgatgaaaaaaaacctgtggtttcgccggaagattccgttccaaaagataagccacttcctcctgttgaggtgggtccggcagaagcaaaacaagtatccaatcttattcctcacccagggaaagtctgagatatatcccgagctaatggatctccgcagtagaacaactccaatcgccatgagtttcgctcagttcgaaaacctgctgggcataaatgttcacactgaagatctgttgcgaaatcccagctacatacaggaagccaaggccaaaggattggttattttctgctggggtgatgacacaaacgaccccgagaacagacgaaaactgaaggagctgggcgtgaatggacttatctatgatcggatttacgattggatgcccgaacagccgaacatattccaggtggagcagctggaaaggctaaagcaggaactcccagaactgaagtcttgcctatgcccaacagtttcccgattcgtaccttcctctctgtgcggagagagtgatatccacgtagacgccaatggaatcgataacgtggagaatgcctag

SEQ ID NO: 118770 - DNA, 2019 bp, synthetic construct
  misc_feature 1..2019: note = Description of Artificial Sequence: Synthetic coding sequence
  source 1..2019: mol_type = other DNA
atgaccccttcacaggtggcgttcgagattagaggcactctgctgcctggggaggtgttcgcaatctgcggtagctgtgatgccctgggaaactggaatccacaaaatgctgtggcgctgctccccgagaatgatacaggtgagtccatgctgtggaaagccaccatcgttttgtctcggggcgtcagcgtacagtaccgctatttcaaagggtatttccttgagccgaaaactatcgggggaccctgccaggtcattgtgcataaatgggaaacacatttacagcccaggagtataactccactggagtcggaaatcatcatcgacgacggccagtttggcatccacaatggagtggagacccttgactccgggtggctgacatgccagactgaaattcgcctcaggttgcactatagtgagaagcctcctgtctctatcaccaagaaaaaactgaaaaagtctcgttttagagtgaagctgacattagagggtctggaagaggatgatgatgatagagtttcccccaccgtgctccataagatgagcaatagtctggaaatctcactgatttccgataacgagttcaagtgtcggcactcccagccagaatgcggctatgggctgcagcctgaccgttggaccgagtactcaatccagacgatggaaccagataacctcgaacttattttcgatttcttcgaagaggacttatctgaacatgttgttcagggtgatgccttgcctggccacgttggcaccgcttgccttctctccagtactattgcggagtctgggaagagtgctggaatccttaccttaccaattatgtcccgcaatagccgaaaaactattggcaaggtgcgcgtagactacattattatcaagcccctgccgggatatagttgtgatatgaaaagttctttctccaaatactggaagccacgcatacccctggatgtcgggcatcgaggtgcaggcaattcaaccacaacggcacagctggctaaagtgcaggaaaacacgatcgccagcctaagaaacgctgctagccatggcgccgctttcgtggaatttgatgtgcacctgtcaaaggattttgtgccggtcgtctaccatgatctaacctgctgcctaaccatgaagaagaaattcgatgccgatccggttgagctgttcgagattcctgtcaaagagctcacattcgaccaactacagctgctgaagctgactcacgtgacagcccttaagtccaaagacaggaaagaatctgtggttcaagaagaaaacagcttttccgagaatcagccatttccaagcctgaagatggtgttagagtctctgccagaggacgtagggtttaacatcgagattaagtggatttgccagcaacgggacggcatgtgggatgggaacctttccacatatttcgacatgaatctgtttctggacattattctgaaaaccgtgctggaaaattctggaaagcgtcgaattgtattttctagttttgatgcggacatatgcacaatggtaagacagaaacagaataagtatcccatcctgtttcttacacagggtaagtctgagatctaccctgaattgatggatctccgatcccggacaactcccatcgcgatgagctttgcccagttcgagaatctgctgggtatcaacgtccataccgaggaccttttgaggaacccctcctatatacaggaagctaaggcaaaaggattggtgattttttgttggggtgatgataccaacgatcctgagaatcggcggaagctgaaagagctgggggttaacggactcatctacgacagaatatacgattggatgccggaacagccaaatatatttcaagtggagcagctggaacgtctgaaacaggaacttcctgagctcaagagctgcctgtgtccaacagtgagcagatttgtgcctagtagcctttgtggcgaaagcgacatccacgtagatgctaatggcatagataatgtcgagaacgcgtag

SEQ ID NO: 118771 - DNA, 795 bp, synthetic construct
  misc_feature 1..795: note = Description of Artificial Sequence: Synthetic coding sequence
  source 1..795: mol_type = other DNA
tagtgcgatatgaaatcatcatttagcaaatattggaaacctaggattcccttagacgtagggcacaggggcgctggcaacagtacaactactgcccaactggccaaagttcaggagaatactatcgccagtctgcggaacgccgcctcccatggcgcagctttcgttgagtttgacgtccacctttccaaggatttcgtccccgttgtgtaccacgacttaacttgttgtctcacaatgaagaaaaacctctggtttcgacggaaaataccatttcagaagattagccactttcttctgctgcgatgggtgcgccagaagcagaataaataccccatccttttccttacccaaggcaagtctgagatctacccggagctgatggatttacgtagccggacgacccctatagctatgtccttcgctcagttcgagaacctgttgggcatcaacgtacacaccgaagaccttctgcggaacccttcgtacatccaggaggcaaaggcgaaaggtttagttattttctgctggggggatgacacgaacgaccccgaaaatcgtaggaagcttaaagaactgggcgtgaacggtttgatttatgatcgaatatacgactggatgcccgagcaacctaacatctttcaggttgagcagctggaaagactgaagcaggagctcccagagttgaagtcatgtctatgtcccacagtctcccgcttcgtgccctcttctctgtgcggggaatccgacatccatgtggatgcgaatggtattgataacgtagagaacgcctag

SEQ ID NO: 118772 - DNA, 996 bp, synthetic construct
  misc_feature 1..996: note = Description of Artificial Sequence: Synthetic coding sequence
  source 1..996: mol_type = other DNA
atgtggctttgggaggatcaggggggcttactgggtcctttcagctttttgttgcttgtcctgctgctggtgacacggagtccagtgaatgcctgcctcctgacaggctccttgttcgtgctcctgagagtattctctttcgagccagtcccatcctgcagggccctgcaggtactaaaacccagagatcggatcagcgccatcgcccacaggggcggatctcatgatgctcccgagaatacgctggccgccatccggcaagctgctaaaaatggagcaacgggtgttgaactcgacatagaatttacgtcagacggaatacccgtgctaatgcatgacaataccgtggacaggaccaccgatggtaccgggcgtctttgcgacctgacctttgagcagatcagaaaacttaacccagcagccaatcaccgactgagaaatgattttcccgacgaaaagatccccacactgcgggaggctgtcgccgagtgtctcaaccacaaccttacaattttcttcgatgtgaaagggcatgcgcacaaggccacagaagctctcaaaaaaatgtatatggaatttccacagctatacaataacagtgtggtgtgctccttcctgccagaggtgatttataagatgcgacagaccgaccgggacgtgataacagccctcactcacaggccctggagtctgtcacatactggcgatgggaaaccccgctacgacacattctggaagcatttcatctttgttatgatggatatcctcctggactggagcatgcataacattctctggtacctgtgcggtatcagcgcatttcttatgcaaaaggactttgtctcccccgcctatctcaagaaatggagcgctaaggggatccaggtagtcgggtggaccgtgaatacatttgacgaaaaatcatattacgagtcccacctcggatctagttacatcaccgacagtatggttgaggattgcgaacctcacttttag

SEQ ID NO: 118773 - DNA, 1818 bp, synthetic construct
  misc_feature 1..1818: note = Description of Artificial Sequence: Synthetic coding sequence
  source 1..1818: mol_type = other DNA
atggttagacaccagccattgcagtattacgaacctcaactctgtctgagctgccttactggtatctacggctgccggtggaaacgctatcagcgctcacatgatgataccacaccctgggaaaggttgtggttcctgcttctgacttttacctttggactaacactaacttggctgtatttctggtgggaagttcacaacgactacgacgaattcaattggtacctatacaatagaatgggatattggtccgactggccggtgcccatccttgtgaccacagctgccgctttcgcctacatagcaggcctgcttgtgctggccctgtgccacatcgcagtgggccagcagatgaatctccattggctccataaaatcggtttagtagttatcttagcctccacggtcgtggcaatgagcgctgttgctcaattatgggaagacgaatgggaggttttgcttatcagcttgcagggtacagcccctttcctccacgttggagccgtcgctgccgttaccatgctttcctggattgtcgccggccagttcgccagagccgaaagaactagctcccaggttacaatactgtgcaccttttttacagtagtctttgcactgtatctagctccgttaacgataagcagcccgtgcatcatggaaaaaaaagacctgggccctaaacctgctctcattggacacagaggggcgccgatgttagcacccgaacacactctaatgtcctttcggaaggctctggaacagaagctctacggcctgcaggcggatattacgatatccttggatggcgtcccatttctcatgcatgatacgactctcagaaggacaaccaacgttgaggaggaatttccagagctggcccgccgccctgcaagcatgctaaactggaccaccctgcagcggttgaatgccggacaatggttcctgaagactgacccattttggaccgccagtagtttgagcccctctgaccacagagaggctcaaaaccaatctatctgttctctcgcggaactgcttgagctcgccaagggtaatgccaccctgttgttgaacctgcgcgatcctccacgggagcacccatatcggtcgtctttcatcaatgttaccctcgaggccgtcctgcattctgggttcccgcaacaccaggtgatgtggctaccgtcacgccagagacccctggtccgtaaggtggcgcctggcttccagcaaacttccggatccaaagaagcagtggcatcacttcggagaggacacattcagcgtctgaatctccgctacacacaggtgtcccgccaggagcttagagattatgctagctggaaccttagcgtcaatctgtatacagttaatgctccatggctcttcagtttgttgtggtgcgcgggggtgccttccgtcacctccgataactcacatgctttgtcacaagtgccgtcgccactctggataatgccccctgatgaatattgtctgatgtgggtaaccgcagacctcgtgtcgttcacactcatcgtgggcatcttcgtgctgcagaaatggcggctcggcggaattcgatcatacaatccagagcagattatgctgtcggccgccgtcaggaggacttccagggacgtctctatcatgaaggagaagctgattttcagcgaaatttccgatggggtggaggtgtccgatgtcctgagcgtgtgttcagacaactcttatgacacttatgctaactctactgccacgccggtaggacccaggggagggggttctcacacaaaaacgctgatcgagaggtctggacggtag

SEQ ID NO: 118774 - DNA, 1461 bp, synthetic construct
  misc_feature 1..1461: note = Description of Artificial Sequence: Synthetic coding sequence
  source 1..1461: mol_type = other DNA
atggtgcggcaccagccattacagtattacgagcctcagctgtgtctttcatgtttgaccggaatctatggatgccgctggaaaaggtatcagagaagccatgacgatacaacacccgggaccgctccttttctgcacgttggcgcagttgcagctgtaacgatgctgagctggatcgttgcaggacagttcgctcgggcggaacgtacttctagccaggtgaccattctctgcactttcttcacggtggtcttcgcattatatctggctcctttaactatctcttcaccctgcataatggaaaagaaagaccttggcccaaaaccagccctgattggtcatcgtggtgcccccatgcttgcgcccgagcataccctcatgtccttccgcaaggctctggaacagaaattatacgggctgcaagccgacatcacgatttccctcgacggagtgcctttcctgatgcacgatactacattaagaagaactaccaacgtggaggaggagtttcccgaactggccaggaggcctgcaagcatgttaaactggaccacgttgcagcgtctaaacgccgggcagtggttcctgaaaacggacccattctggactgcaagcagtctgtcaccgtctgaccacagagaggcccagaatcagtccatctgtagcctggcggaactactggagctcgcaaaaggtaacgctacactcctgctaaatctgagggatcctcctagagagcacccttaccggagttcctttataaatgtcaccctggaagcagtcttgcattctgggtttcctcaacatcaggtgatgtggctcccctctcgacagaggcccctcgtgaggaaggtcgcccccggctttcagcagacctcgggctcaaaggaagccgtggcttccttgaggcgaggccacattcagcgactcaatttgagatatacacaggtgtccaggcaagaactgagggactacgcttcttggaacctttctgtgaacctgtatacggtgaacgctccatggttgtttagcctgctttggtgtgctggagtgccctccgtcacaagcgacaattcgcatgccttatcgcaggtcccctcgcccctctggatcatgccccctgatgagtattgtttaatgtgggtgacggcggatctggtctcgttcactctcattgttggcatcttcgtcctacagaaatggcgcctgggaggaatacgaagttataatccagagcagataatgttgtccgccgcagtcaggcgaactagtagagatgtcagtatcatgaaggaaaagctcatcttcagtgagatctcagatggcgtggaggtgtccgacgttttgtcggtttgctccgataactcctacgatacttatgccaattctacagccacgccagtgggccctagaggcggaggctcgcacactaagactctgatagagaggagtgggaggtag

SEQ ID NO: 118775 - DNA, 408 bp, synthetic construct
  misc_feature 1..408: note = Description of Artificial Sequence: Synthetic coding sequence
  source 1..408: mol_type = other DNA
atggtgcgtcaccaacccctccagtactatgaaccgcagctgtgcctgtcgtgcctgacgggcatctacggctgccggtggaaacgctaccagcggtcgcatgatgacaccactccctgggagaggctctggttcctgctattaacatttacctttgggttaactttgacttggctgtacttttggtgggaggtgcacaacgactacgatgagtttaactggtatctctataaccgaatgggttactggagcgactggcccgttcccatcctcgtgaccaccgccgccgccttcgcttacattgccggccttctggtgttggctttatgccacatcgccgtaggacagcaaatgaatctccattggctgcacaaagcctcatcaggcctaccacttagccccttgtag

SEQ ID NO: 118776 - DNA, 1404 bp, synthetic construct
  misc_feature 1..1404: note = Description of Artificial Sequence: Synthetic coding sequence
  source 1..1404: mol_type = other DNA
atgagcgcagtagctcagctttgggaagatgagtgggaagtgctacttatttctctgcagggaacagctccttttctgcacgtgggcgccgtcgcagcagtcaccatgctctcatggattgtggccggccaatttgctagggcagagcggacaagtagccaggtcaccatactctgtacattctttaccgtggttttcgcgctttacctggctcctttaaccatttcctcaccctgcatcatggagaaaaaggaccttggccccaagcccgccttaattgggcaccgcggtgcacccatgctggcaccagaacacactcttatgagcttccggaaggccctggaacaaaaattgtacggcttgcaggcagacataaccattagcctggacggagtaccatttctgatgcatgatacaacccttcgtagaactaccaacgtcgaggaggagttccctgagctggcccgtcggccggcaagtatgctgaactggacaacactacaacggctcaatgccggtcagtggttcctcaaaactgatcccttctggactgctagcagcctgtccccttctgaccaccgcgaagcacagaaccagtctatctgttcgctagcagaactcctggagctggccaagggcaatgctactctgctgcttaacctgagagatcccccccgcgaacatccgtatcggtcctcgtttatcaatgtgaccctggaggcagtcttacacagcggtttcccacagcaccaggttatgtggttgccttccaggcaaagaccgctcgtgcgtaaggtcgcacctggattccagcagacatccgggagcaaagaagccgtcgcctctttacgccggggccacatccagagacttaatctcagatacacccaggtctctaggcaggagttgagggactacgcctcgtggaacctcagcgtgaatctctacaccgtcaacgcgccatggctgttctctctactgtggtgtgcaggcgttcccagtgtcactagtgataattcccatgcactgtcccaggttccgtctcccctttggatcatgccccccgatgagtactgtctgatgtgggtcacagctgatctcgtgtcatttactctgatagttgggatattcgttctgcagaagtggcggctgggtggcatacgcagctacaatcctgagcagatcatgctatctgcggccgtccgtcgtacctcacgcgacgtgagcatcatgaaagagaaactcattttctccgagatctctgatggggttgaggtgtctgacgtcctaagcgtttgtagcgacaactcctatgatacgtacgcaaactccaccgctactcctgtgggccccagagggggcggcagccatacgaagaccctaattgagagatctggaagatag

SEQ ID NO: 118777 - DNA, 1818 bp, synthetic construct
  misc_feature 1..1818: note = Description of Artificial Sequence: Synthetic coding sequence
  source 1..1818: mol_type = other DNA
atggtgcgccaccaaccactgcagtattacgagccgcagctctgtctgagctgtctcaccggaatctacgggtgcaggtggaaacgatatcagcgctcccacgatgatactacaccctgggagcggctgtggtttctattactgacctttactttcggactgacccttacttggctgtacttctggtgggaggtgcataacgactatgacgaatttaactggtacttatataaccgtatggggtattggtcagattggcccgtgcccatattggtgactacagccgctgcctttgcctacattgctgggctcttggtgctggcactgtgccatatcgcagtgggtcaacagatgaatctccattggctccacaaaatcggcttagttgtcatcctcgcatcgacagtggttgctatgtctgcagtagcacagttatgggaagatgaatgggaagtgttacttatctctctccagggcacagcccccttcctgcacgtcggggccgtagcagcagtcactatgctgagttggatagtggcgggccagtttgctcgtgctgagcgcacttcaagccaggtcaccatcctgtgcaccttcttcaccgtggtgttcgcactgtatctcgctcccctgacaatttctagcccctgtatcatggaaaagaaagacttgggacctaaaccagccctgatcggccatagaggcgctcctatgctggcaccagagcacactctgatgtctttccggaaagcacttgaacaaaagctgtatggcttgcaagccgatattacgataagcctggatggggttcctttcttgatgcacgacacaacattaagacgcacaaccaacgtggaagaggaattccctgaactggccaggcggcccgcatctatgttgaattggacaactcttcagaggctgaatgccgggcagtggtttttgaagactgatcccttttggacggcctcatccctcagccctagcgatcacagagaggcacaaaaccagagtatatgttctctggccgagctcctcgagctggctaaggggaacgcgacccttcttctgaacctgagagatcccccaagagagcacccttaccggtcctccttcataaatgtgactctggaggcggtgttgcactctggctttccacagcatcaggtgatgtggctaccttcccgtcaacgtcccctagtaagaaaggtggcaccaggctttcaacaaacaagcggatccaaagaggccgtggctagtctgcggcgaggtcatatacagcggcttaacctaagatatacccaggtgagcaggcaggaactgcgcgattacgcatcgtggaatctctccgtaaacctctataccgttaatgcaccttggctgtttagcctgctttggtgtgccggggtaccttctgttacatccgataacagtcacgccctcagtcaggtgccgtcgcccctgtggatcatgcctcccgatgagtattgtctgatgtgggtcacagcagatcttgtatcctttactctgattgtcggtatatttgtgctgcaaaaatggcggctgggaggcattcgatcttacaacccagagcagattatgctctccgcggccgtgagacgtacatctagggacgtctccatcatgaaggagaagctgatattttcagagatttctgatggcgtggaagttagtgatgtgttatctgtgtgctcagacaactcttacgatacatatgcaaatagtactgctacccctgtagggcccagaggtggcgggagccacaccaaaacccttatcgagcgtagcggtaggtag

SEQ ID NO: 118778 - DNA, 222 bp, synthetic construct
  misc_feature 1..222: note = Description of Artificial Sequence: Synthetic coding sequence
  source 1..222: mol_type = other DNA
atggttcgtcatcaacctctgcagtactatgagccgcagctgtgtctgtcttgcttgactgggatctacggctgccgttggaagcggtatcagaggagtcatgacgacacaaccccatgggagcggctctggtttctgcttcttacatttacatttggactgaccctgacctggctgtatttttggtgggaggtgcataatgactatgacgagtttaactag

SEQ ID NO: 118779 - DNA, 1461 bp, synthetic construct
  misc_feature 1..1461: note = Description of Artificial Sequence: Synthetic coding sequence
  source 1..1461: mol_type = other DNA
atggtgaggcaccagcccttacagtactacgaaccacaactgtgcctgtcctgtctcacagggatttacggatgtcggtggaagagatatcaaagaagccacgacgatactactccaggtacagcaccctttctccatgtgggcgctgtggccgctgtcacgatgctgagctggatcgtcgcgggacagttcgccagggctgaaaggacaagcagccaggtgacaattctctgtaccttttttaccgtagttttcgctctctatctggcaccattaactatcagttctccctgtattatggaaaagaaggatctcggccccaagcccgccttgattggacacagaggagcccccatgctcgccccagagcatactttaatgtctttccggaaagcactggagcaaaagttgtacggactgcaggcggacattaccattagtctggacggagtacctttccttatgcatgacaccacactccggcggactacaaatgttgaggaggaattcccagagctggctagaagaccagcctccatgctcaattggaccaccctgcaacggctgaacgccggccaatggttcctaaagaccgaccccttttggacagccagcagcttgtcccccagcgaccacagggaagctcaaaaccagagcatatgcagcttagcggagctgcttgaactggcgaagggaaatgccacccttcttcttaacctgcgtgacccaccccgggagcacccatacaggtcctcattcatcaatgtaactctcgaagcggtgctgcacagtgggttccctcagcaccaggtgatgtggctgccctctagacagcgccccttagttaggaaggtggctccaggattccagcagacatcaggctccaaagaggccgttgcctccctgaggcgggggcatatccagcgactgaacctgagatatacacaggtatctagacaagagcttcgggattacgcatcatggaacctgagtgtaaacctctacaccgtcaacgcgccctggctttttagtctgctctggtgtgcgggagtaccctctgtgacgagcgacaactctcatgctctttctcaggtcccctcaccattgtggattatgccgcctgacgaatactgtttgatgtgggtcaccgccgacctggtgagctttactctaatagtcgggatatttgtccttcagaagtggaggttgggcggaattagaagctacaaccctgagcaaattatgctcagtgctgccgtccggcgcacttctagagatgtatcaattatgaaggaaaagttgatcttctccgagatttccgatggagtggaagtgagtgatgtgctcagcgtatgcagcgataacagctatgatacatatgctaacagcaccgccacacccgtggggcctagagggggtggaagtcacacgaaaactctcatcgagcgctcaggccggtag

SEQ ID NO: 118780 - DNA, 1083 bp, synthetic construct
  misc_feature 1..1083: note = Description of Artificial Sequence: Synthetic coding sequence
  source 1..1083: mol_type = other DNA
atgagctttcggaaggcgcttgaacaaaagctgtacggactacaggccgacattactatcagtctcgacggagtgcctttcttgatgcacgatacaaccctgagacgaaccaccaatgttgaggaagaatttcctgagttggcccggcgccccgcttccatgctaaattggaccactctacagcggctgaatgccggacagtggtttctgaagaccgatcccttttggactgcctcatccctatcgcccagcgatcaccgtgaagctcaaaaccagtccatctgcagccttgccgaactactggagctcgccaagggaaatgcaactctgctgctcaacctcagagatccccccagggagcatccatatcgcagctctttcattaacgtcactctcgaggctgtgctgcatagcggattccctcaacatcaggtgatgtggctgccttctcggcagcgccctctggtcagaaaggtcgcccccggatttcagcagacaagtggctcaaaggaggccgttgcgtctttacggagagggcatatccagcgcctcaacctgaggtacacccaggtcagcagacaagagcttcgcgattatgcttcctggaacctaagcgtaaatttgtacactgtcaatgcaccttggctcttttctctgctgtggtgtgcaggtgtgccctccgtgacttccgacaatagccacgccctgagccaggtaccctctcccttgtggatcatgccaccagatgagtactgtttgatgtgggtgacagctgacctggtgagctttacacttattgtggggatctttgtgctgcagaagtggcgcctcggtggaatccggagctataatccagagcagatcatgctctcagcagcagtgaggcggacttcacgcgacgtcagcattatgaaggagaaactcatttttagcgagattagcgatggtgtcgaggtgtcagatgtgctcagcgtgtgctctgacaattcctacgatacttacgccaacagcactgccacacccgtggggccgcgaggcggcgggagccacacgaaaactttaatcgagcgaagtggacggtag

SEQ ID NO: 118781 - DNA, 1272 bp, synthetic construct
  misc_feature 1..1272: note = Description of Artificial Sequence: Synthetic coding sequence
  source 1..1272: mol_type = other DNA
atgctacgcgtccgctgtctccgaggcggcagtagaggcgccgaagctgtccactacatcggttccaggctggggaggactctcacaggatgggttcagagaaccttccagagtacccaggcagctaccgctagcagtaggaatagttgcgcagcggatgataaggcaaccgagcctctccccaaggactgcccagtgagctcatacaatgaatgggatcctctggaggaagtcatcgtcgggcgcgctgagaatgcttgtgttcccccatttacaattgaggtgaaagccaacacgtacgagaagtactggcccttttatcagaagcagggaggccattatttccctaaggatcatctgaagaaggccgtggccgaaatagaagaaatgtgtaatatccttaagacagaaggcgttactgttcggaggcccgacccaattgattggagtctcaagtacaaaacacccgacttcgagtccaccggtctgtacagcgccatgccccgggatatcctgatcgttgtcggtaacgaaattattgaggcccctatggcgtggcgctcccgcttttttgaataccgggcttacaggtccatcattaaagattattttcatcgcggggcgaagtggactaccgctccaaagcctaccatggccgacgagctgtataaccaggactaccctattcacagcgtggaagatagacacaagctggccgctcaggggaaattcgtgaccaccgagttcgaaccatgcttcgatgccgctgacttcatcagagccggaagagacatttttgcgcaacgctctcaggttactaactatctcggaatcgaatggatgcgtagacacctagcccctgactatcgggtccacattataagcttcaaagatcccaaccccatgcacatcgatgcgacatttaatataattgggcctgggattgtactgtcaaaccctgaccgcccctgccaccaaatcgatctgtttaaaaaggccggctggaccatcataaccccaccaacaccgatcatccctgacgatcaccctctttggatgagcagcaagtggttgtcaatgaacgtgctgatgctggatgaaaagcgggtcatggtcgacgcaaatgaagttccaattcagaagatgttcgaaaagctgggcatcacaactatcaaggtgaacattcggaacgcaaactcgcttggaggcggtttccactgctggacctgcgatgtgagaaggcggggaaccctgcagagttatctcgactag

SEQ ID NO: 118782 - DNA, 1176 bp, synthetic construct
  misc_feature 1..1176: note = Description of Artificial Sequence: Synthetic coding sequence
  source 1..1176: mol_type = other DNA
atgctccgtgtcaggtgcctgagaggcggcagccgcggggccgaggccgtacactacattggcagcaggctcggccgcacgttaactggctgggtgcagcggacatttcagagcactcaggccgccacagcctcaagcagaaactcgtgtgccgccgacgataaggccacagaacctctgcccaaggattgcccagtaagcagttacaatgaatgggatccactggaagaggtcatcgtgggtcgagcggaaaacgcttgcgtgcccccatttaccattgaggttaaagccaatacctacgagaaatactggcctttttaccagaagcagggcggacactactttccgaaagatcacctgaaaaaggcagtcgctgagattgaggagatgtgtaatatcctgaaaactgaaggcgtgaccgtgagaagacctgacccaatcgactggtctctgaaatataaaacaccggacttcgaatcaacaggactgtattccgctatgcctcgggacattctgattgtcgttggtaatgaaatcatagaggcccctatggcctggcgaagtagatttttcgagtatagagcatatcgctctattattaaggattatttccatcgcggtgctaaatggactacagccccgaagccgaccatggctgatgagctctataatcaggattacccaatccattcagtggaggatcgacacaaactcgcagcgcaaggtaagtttgtaacaacagagttcgagccttgttttgatgcagccgatttcattcgcgcaggcagagatatctttgcacagagaagtcaggtgacaaactacctgggcatcgaatggatgagacggcacctggctcctgattaccgtgtacatatcatatccttcaaagacccaaatccaatgcatattgacgctacgttcaacattattggaccaggcatagtcctctccaatcccgaccgtccgtgtcatcaaatcgatctttttaaaaaagcgggctggacgatcatcaccccgcccacacccattattccagatgatcaccccctgtggatgtcatcgaagtggctgagtatgaatgtgcttatgctcgatgaaaaacgtgttatggtggacgctaacgaagtgcctatccagaaaatgttcgagaaactggggatgtataataagtag

SEQ ID NO: 118783 - DNA, 1260 bp, synthetic construct
  misc_feature 1..1260: note = Description of Artificial Sequence: Synthetic coding sequence
  source 1..1260: mol_type = other DNA
atgtggcctgggaacgcgtggcgagcggccctcttttgggtgcctaggggaaggcgagctcaaagcgcattagctcagctccgaggaattctggaaggtgagctggaaggcattcggggcgcaggtacctggaagagcgagagagtgatcacctccaggcagggccctcacatcagggtggatggggtatccgggggaatactgaacttctgcgctaacaactacttgggcttgtcctcacaccctgaggtgatccaggcgggtcttcaggccctcgaggagttcggtgccggcttaagttctgtgagattcatttgcggcacacagtctattcacaaaaatctagaggctaagatagctcgctttcatcagagagaggatgcaatcctgtatccttcttgttacgatgctaacgcgggtctgttcgaggcactgctgacgccagaggacgcagtgctgtctgatgaattgaaccatgcgtctattatcgatgggattcgtctgtgcaaagcacacaaataccgatacaggcatctggatatggctgatctcgaggctaaattacaggaagctcagaaacacaggctcaggctggtcgcaactgacggcgctttttcaatggatggcgatatcgcccccctccaggagatatgttgcctggcctcacgctatggagccttagtgttcatggacgagtgtcatgcaacaggtttcctaggcccgacgggcagaggcaccgacgagctgttgggggtgatggaccaggtgaccatcatcaactctaccctcggcaaggcgctcgggggcgcgtctggcgggtacaccacggggcccggacccctggtctcgttgctgcgacaaagggcccgaccctatctgttttctaacagtctgccgcccgccgtcgtgggctgtgctagcaaagccttggatttgctgatgggatctaacactatcgtccagagcatggccgccaagactcagcgatttcggtctaaaatggaagccgcagggttcacaatttccggtgccagccatccaatctgcccagtgatgcttggagacgcaagactggcttcaagaatggctgatgatatgttgaaaaggggaatctttgttatcgggttcagctatccagtggtcccaaaaggcaaggcccggatccgcgtacagatttcagcagtccatagcgaggaggatatcgatcgctgtgtcgaagcttttgttgaagtcggtcggctccacggagccctcccctag

SEQ ID NO: 118784 - DNA, 1338 bp, synthetic construct
  misc_feature 1..1338: note = Description of Artificial Sequence: Synthetic coding sequence
  source 1..1338: mol_type = other DNA
atgtggcctggaaatgcctggagggccgccctcttctgggtaccacggggccgccgggctcagagcgcgcttgcacaactcagggggattctggagggcgaattggaggggatccggggggcaggaacttggaaaagtgagcgcgtcattaccagccggcaggggcctcacatccgtgtcgacggcgtgtcggggggacccgggacggtcatttttccaggcttgccgcttcctcacctctcatgctgcattcatctgttgtcttttacttccgggattcttaacttctgtgccaataactacctgggactcagtagtcatcctgaggtgattcaggctggtctgcaggccctcgaggagtttggggctgggctttcgtctgttaggttcatctgtggaactcagagcatacataaaaatcttgaagctaagatcgctagattccaccagagggaagacgcgattctgtacccctcgtgttatgacgctaacgcgggcctgttcgaggcgttgctgacccccgaggacgccgtgctgtcagacgagcttaatcacgcgtctattattgacgggatccgactctgtaaggcccataaatacagatacagacatctggacatggcagacctggaggccaagctgcaagaagctcagaaacaccgactgaggctggtggcaacagatggagccttctctatggatggagacattgcaccgttgcaggagatctgctgtttagccagcaggtacggggcactggtgttcatggacgagtgtcatgctactgggttcctggggccaacgggacgtggaacagatgagttactgggcgttatggaccaagtgactatcataaatagcacactcggtaaggcactgggaggggcttccgggggttatacgacaggaccaggacccctggtgtccctgctgagacaacgcgccagaccctacctgttctcaaactctctccctcccgcagtggtgggctgtgcatccaaggcgctggacttactgatgggctctaatacgatcgtacagagcatggcagccaagacccagaggttccgaagcaaaatggaggcggccggtttcaccatctcaggggcctcccaccccatatgtcccgtgatgcttggcgatgcccggctcgcctccagaatggctgatgacatgctgaaacggggcatcttcgtgatcggcttctcatatcccgtggtcccgaagggcaaggcaaggattagagtgcagattagtgccgtacacagtgaagaggacattgaccggtgcgtggaagcttttgtcgaggtgggacggctgcacggggcattaccgtag

SEQ ID NO: 118785 - DNA, 744 bp, synthetic construct
  misc_feature 1..744: note = Description of Artificial Sequence: Synthetic coding sequence
  source 1..744: mol_type = other DNA
atgtggcctggcaacgcatggagggctgctctgttttgggttccccgtggacgcagggctcagtcagcacttgcacagttgagaggtattcttgaaggcgagctggaaggtatccgtggtgcaggaacctggaaatctgagagagtgatcacctcacggcaaggcccccacattcgcgttgacggagtgtctggtgggcctggtactgtcatcttcccaggcctgcccctgccccatttgtcttgctgcattcatctgttgagtttcacttcaggaattctaaacttctgtgctaacaactacctgggcctgtccagtcatcccgaggttatacaagccggactgcaagctctggaagaattcggtgccgggctgagttccgtccgcttcatctgtggtacccagtccatacataagaacctcgaggctaaaatcgccagattccatcagcgagaggatgcaattttatatccctcatgctatgatgccaatgcagggctgttcgaagccttgctgacgcctgaggatgcagtactgagcgatgaattaaatcacgcttctatcatagacggtattagattatgcaaggcccacaaatatagatatcgtcatctggacatggctgacctggaggcgaaactgcaggaagcacagaagcaccgcctcagactagtggcaacagacggcgccttccacggctggcggcaccgaactcccgccggcgacctgctcccacggctctag

SEQ ID NO: 118786 - DNA, 522 bp, synthetic construct
  misc_feature 1..522: note = Description of Artificial Sequence: Synthetic coding sequence
  source 1..522: mol_type = other DNA
atggctctgcgagtggtgaggtctgtgcgggctctgctgtgcaccctgagggctgtcccaagtcccgccgctccttgccctccaagaccctggcagcttggtgtcggagccgttaggacccttcgcactggccccgccctgctctcagtacgcaagtttactgagaagcatgagtgggttaccacagagaacggaattggcaccgtgggaatcagcaatttcgcacaggaagcattgggcgatgtagtgtactgtagcctgcctgaagtaggcaccaagttaaacaagcaggacgagtttggggctctggagagcgtgaaggccgcctctgaactgtattcacctctgtccggcgaagttaccgagatcaatgaagcccttgcagagaacccggggctcgtgaataaatcatgttacgaggatggttggctgattaaaatgacgttgagcaacccatctgaactcgatgagctgatgagcgaagaggcatacgagaagtacataaagtcaattgaagagtag

SEQ ID NO: 118787 - DNA, 3063 bp, synthetic construct
  misc_feature 1..3063: note = Description of Artificial Sequence: Synthetic coding sequence
  source 1..3063: mol_type = other DNA
atgcagtcatgtgcccgcgcctgggggctaaggttgggccggggcgtcggaggtggccggcgccttgcaggtgggtctggaccttgttgggccccccgtagcagggattcctcctctggcggcggcgactccgctgcagcgggagcatctagactgctggagaggctgttaccccggcatgacgattttgcccggcggcacatcggtccgggagataaggaccagagagagatgctgcagacgctcgggcttgccagcatagatgagctaattgagaagaccgtcccagccaacatccggctgaagcgaccactaaagatggaggatccagtatgtgaaaatgaaattctcgccactttgcatgcgatctcaagtaagaaccagatttggcggagctatatcgggatgggatactacaattgttcggtaccgcaaaccatccttagaaacttattggaaaactccgggtggataactcagtacaccccataccagccagaagtgtctcagggccgccttgagagtctgctgaactatcagactatggtgtgcgatattactggcctggatatggccaacgcatcactgctggacgagggaaccgccgctgccgaggccctgcagctttgctatagacacaataaacgccgaaaatttctcgtggaccctaggtgtcacccacagaccatagcggtcgtacagacccgggctaagtatacgggcgtgcttaccgagctcaagctgccctgcgagatggattttagcgggaaagacgtctctggcgtgctgtttcagtatcctgacaccgaaggtaaagtggaggattttacagaactggtggaaagggctcaccagagtgggagtttggcctgctgcgcgaccgatttactggccctctgtatcctgcgcccccctggcgagtttggcgtggatattgctctggggagctcacagcgattcggggtgcccctgggctatggaggtcctcacgccgctttctttgcagtgcgagagagcctggtcagaatgatgccagggaggatggtgggagtgacaagggatgccacagggaaggaggtgtacaggctcgctctgcagacaagggagcagcacatcaggagagacaaggccacttctaatatctgtactgcccaggctctcctcgcaaatatggccgctatgtttgctatctatcacggctcccacggtctggagcacattgcgcgacgagtccataatgcgacacttattctgtcggaggggctgaagcgagcaggccaccagttgcagcatgatctgttcttcgataccctgaagatccagtgtgggtgctcagtgaaagaggttctgggacgggccgcacagcggcaaatcaattttcggttgttcgaagatggcaccctgggtattagtcttgatgagaccgtgaacgagaaagatcttgacgacttgctgtggatttttggctgcgagtcttcagccgaactcgtcgcagagtctatgggggaagagtgtcgaggcatcccagggtccgtgttcaagagaacctccccgtttctgacccaccaggtcttcaattcgtatcattccgaaactaatattgtgaggtacatgaaaaaactggagaacaaagatattagcctggtacattcaatgatacctttaggctcgtgtactatgaaactgaactctagtagcgagttagcgccaattacgtggaaagagttcgcgaatatacatccttttgttcctctggaccaagctcagggctaccagcagctctttagggagttagagaaagatttgtgcgagttgactggctacgaccaggtgtgcttccagccgaactctggagcccagggggaatatgccgggctggccactattcgcgcgtacctgaaccagaaaggagaaggtcataggactgtgtgtttgatccccaagtcggcacacggaactaatcccgcatcggcccatatggccgggatgaagattcagccggtggaagtcgacaagtacggaaacatcgacgccgtgcatctcaaagctatggttgataaacataaggagaacctcgcggcaatcatgatcacgtacccatccaccaacggagtcttcgaggaaaacatatcagatgtttgtgatcttattcatcagcacggaggccaggtgtatctggacggagcaaatatgaatgcccaggtggggatctgtcgcccaggggattttggatccgacgtgtcccacctcaatttgcataaaactttttgcattcctcacggggggggcggccctggcatgggccccataggcgtaaagaagcatctagcaccctttcttcctaaccatcccgtgatcagtctcaaacgtaatgaggacgcatgccccgtaggaaccgtgagcgctgccccctggggatctagtagcatcctgcccataagctgggcatacattaagatgatggggggtaagggtcttaagcaagcaactgaaactgcaatccttaatgctaactacatggctaagcgtctagagacccactatcgtatattatttcgcggcgcacggggctacgtgggacacgagttcatcctcgatactcgcccatttaaaaaaagcgccaatatagaggccgtggatgtcgccaagagactccaggattacgggttccatgcgccaacgatgtcgtggcctgtggctggtaccctgatggttgagccgacagagagcgaagataaggcggagttagatcgattctgtgatgctatgattagtattagacaggaaatagccgatattgaagaggggcgaatcgatcctagggtcaatcccctgaagatgagcccccactcattgacctgtgtgacatcctctcattgggataggccatattctcgtgaggtggccgccttcccacttccatttgtgaagcccgagaataaattttggccaaccatcgctagaatagatgacatctacggagatcagcacttagtctgcacctgtcctcccatggaggtgtacgaaagcccatttagcgaacagaaacgcgctagttcatag

SEQ ID NO: 118788 - DNA, 888 bp, synthetic construct
  misc_feature 1..888: note = Description of Artificial Sequence: Synthetic coding sequence
  source 1..888: mol_type = other DNA
atggtcgatagcgtctatagaaccaggtctctgggcgtagctgctgaaggccttcccgatcagtatgccgacggcgaagccgctcgcgtgtggcaattatatatcggagatacccgcagcaggacggctgagtacaaagcatggctcctgggcctcctgcggcaacacgggtgtcagagggtgctggacgtggcctgcggtaccggagtcgattcaattatgcttgttgaggagggttttagcgtgacatccgtagacgcctcagacaagatgttaaagtatgccttgaaggagcggtggaacagaaggcacgaaccagcattcgataaatgggtgatcgaggaggccaattggatgactctggataaggatgtgccgcagtccgcagagggtggattcgatgccgtgatttgcctgggcaatagctttgcgcatttgcccgactgcaaaggggatcagtctgagcaccgcctcgcgctcaagaatattgcatcaatggtgagagcaggtggcctcctcgtgattgatcaccgcaactacgatcatatcctgtcaaccggctgtgccccacccggcaaaaatatctactacaagtctgatctcactaaggacgttacaacctcagtcctcatcgtgaacaacaaggcgcacatggtcaccctggactataccgtccaggtacccggtgcagggcaagatggctcgccggggcttagtaagtttaggcttagttactacccacactgccttgcaagttttactgaactcctgcaggctgcctttgggggcaagtgccaacacagtgtactaggggattttaagccatacaaacccgggcaaacctatattccatgctactttattcacgtactgaagcgcacagattag

SEQ ID NO: 118789 - DNA, 1350 bp, synthetic construct
  misc_feature 1..1350: note = Description of Artificial Sequence: Synthetic coding sequence
  source 1..1350: mol_type = other DNA
atgtatagcttcaacacgctcaggctctatctgtgggaaactatcgttttcttcagtctcgctgcgtctaaagaggccgaagccgcccggagtgcccccaaaccaatgtcgcctagtgactttctggacaagctgatgggacgcaccagcgggtatgacgctaggattcggcccaactttaagggccctcccgtcaacgtctcctgcaatattttcatcaactcattcggtagcatagcagaaacgacaatggactatagagtgaacatttttctcaggcagcaatggaacgatcctaggctcgcatataatgagtaccccgacgactccctagatttagacccttccatgttggactcaatctggaaacctgatctcttctttgccaatgaaaaaggcgcccatttccacgagataactacagacaataagctattacgcatatccaggaacggaaatgtgctgtattctatcagaatcacgctgactctggcctgcccaatggatttaaagaactttccaatggatgtccagacctgcatcatgcagctggagtcgttcggatacacgatgaacgaccttatattcgagtggcaggaacaaggtgctgttcaggttgcagatgggcttacacttccacagttcatcctgaaagaagagaaggacctgcggtattgtaccaagcactacaacacaggtaagtttacttgtattgaggcccggttccacttggagcgtcagatgggctattaccttatacagatgtacataccctctctgctgatagtgatcctgtcatggatctccttctggatcaatatggatgccgctcctgcacgggtaggtctcggcattacaaccgttctgacaatgactacccagagctccggttctcgggcaagcctgccaaaagtgtcctatgtcaaggctatagacatctggatggcagtgtgcttgctgttcgtcttttctgcactgcttgaatacgctgccgttaacttcgtatcacgccagcacaaagaattgctgaggttccgaaggaagaggcggcatcataaggaggacgaagccggggaaggccggtttaatttctcagcctacgggatgggcccggcctgcctgcaggctaaggatgggattagtgtgaagggagccaacaatagcaacacaacaaatcctccccctgcaccctctaaatcccccgaagagatgcgcaagctcttcattcagagagcgaagaagattgacaaaatcagtcgaattgggttcccaatggcttttttgatctttaatatgttttactggattatttataagatagtccgccgagaggacgtgcacaatcagtag

SEQ ID NO: 118790 - DNA, 1374 bp, synthetic construct
  misc_feature 1..1374: note = Description of Artificial Sequence: Synthetic coding sequence
  source 1..1374: mol_type = other DNA
atgtacagttttaacactctgaggttgtacttgtgggagacgatcgtatttttttccctggccgcctccaaagaagctgaagcagcccgctctgcaccaaaacctatgtcgccctcagactttctggataagctgatgggcaggacgagcggttacgatgcgagaattcgccctaattttaaggggcctcccgttaatgtctcatgcaacattttcataaatagtttcggttccattgcagaaactaccatggactaccgcgttaacatctttttgcgccagcaatggaacgatcctagattggcctacaatgagtacccagacgacagcctggacctggacccttctatgctggattccatttggaagcctgaccttttctttgcaaacgagaaaggtgctcactttcacgaaatcacaaccgataacaagctcctgagaattagccggaatggcaacgtgctgtattcaatccggatcacactaaccctggcttgtccaatggatctgaagaattttcccatggacgtacaaacatgcattatgcaacttgaatcgtttggctacactatgaacgatttaatatttgaatggcaggagcagggcgcagtgcaagtcgcagatggcctgacactgccccagttcatacttaaggaggaaaaagatctgcgatactgtaccaaacattacaataccgggaagtttacatgcattgaggcgaggtttcatcttgagaggcagatgggctattacttaattcagatgtatatcccatccttacttattgtcattctctcttggatctcattctggatcaatatggacgccgctcctgcccgagtcggcctcggaatcacaactgtcttaacgatgactacccagtcctccgggagcagggcctctttgccaaaagtgagctacgtgaaagccatcgacatatggatggctgtttgtctgctgtttgtctttagtgcattgctggagtacgctgccgtcaatttcgtgtcaagacagcacaaggagctgttgcgatttaggaggaagcggaggcatcataagagccctatgctaaacctgttccaggaggatgaggcgggagagggccgctttaacttctctgcctacggcatgggtcccgcatgtctgcaggccaaggacggaatttccgtgaagggagccaacaactcgaatacaaccaaccctcccccagcccctagcaaaagccctgaggagatgcgcaagctgtttatccaacgggccaagaagatagacaagataagccggatcggcttccccatggcattcctcatattcaatatgttttactggatcatatacaagatcgtgcggcgggaggatgtgcataatcaatag

SEQ ID NO: 118791 - DNA, 1101 bp, synthetic construct
  misc_feature 1..1101: note = Description of Artificial Sequence: Synthetic coding sequence
  source 1..1101: mol_type = other DNA
atggattacagagtcaacattttcctccgccagcagtggaatgaccccaggctcgcatacaacgagtatcctgacgatagcctggatctagacccaagcatgttagacagtatttggaaacctgatctgttcttcgccaatgagaaaggagcacactttcacgaaattaccacagacaataaactcctgaggatctctagaaacggaaatgtcttgtactccatccgaattactttgacgctggcttgtccaatggatcttaaaaatttccccatggacgtgcagacatgtataatgcagcttgagagctttggctacactatgaacgacttgatctttgagtggcaggagcaaggtgcagtccaagtggctgacggattgacactcccacagttcatcctgaaggaagagaaagatctgcggtattgtacaaagcattacaacaccggtaaattcacgtgcatcgaagcacggttccatctggagagacaaatggggtattacctgattcagatgtatatcccctcccttctgattgtgattttgtcttggatctctttttggatcaacatggacgcggcacccgctagggttggactgggcatcacaacagtgttaacaatgacgacccagtccagcggaagccgagcttctctgcctaaggtatcttatgtaaaggccatcgacatctggatggcggtatgcctgctgtttgtcttctccgcccttcttgaatacgctgctgtgaatttcgtctcccggcagcacaaggaactgcttaggttccgccggaagaggcgtcatcacaaagaagacgaagctggcgaaggacgcttcaattttagtgcttacggcatggggccagcctgcctgcaagcaaaagatggaatttcagtcaaaggcgctaataactctaacacaacaaaccctcctcccgctccatcgaagtcaccggaggagatgcgtaagttatttattcagagggccaagaaaattgacaaaatatcacggatcggatttccaatggcctttctgatctttaatatgttctactggatcatttataaaatcgttcgcagggaggacgtccataaccagtag

SEQ ID NO: 118792 - DNA, 309 bp, synthetic construct
  misc_feature 1..309: note = Description of Artificial Sequence: Synthetic coding sequence
  source 1..309: mol_type = other DNA
atgtccgcccgcgtgcggagtaggtcccgtggccggggcgacggccaggaggcccccgatgtagtggcctttgtggcgccaggagagtcccagcaggaggagcctccgacagataaccaggatatagagcccgggcaggagcgcgagggcacaccccccatagaggagaggaaggtcgaaggcgattgtcaggagatggatctcgagaagacccgttcagagagaggagatggaagcgatgtaaaagaaaaaacaccccccaacccaaaacacgcgaaaactaaagaggccggcgatggacagccatag

SEQ ID NO: 118793 - DNA, 1359 bp, synthetic construct
  misc_feature 1..1359: note = Description of Artificial Sequence: Synthetic coding sequence
  source 1..1359: mol_type = other DNA
atgaatcgacagctggttaatattctgacagctctatttgcttttttcttagagacaaatcacttcagaactgcgttctgcaaagaccacgactcgcggtccggaaaacagccttcacagactctctcgccctctgattttctcgataagcttatgggacgtacgtccgggtatgatgcccgcataaggcctaactttaaggggcccccagtgaacgtgacatgcaacatctttatcaacagctttgggagcattgcggagacaacaatggattatagagtgaacatctttctgcggcagcagtggaatgattctaggcttgcatactctgagtaccccgacgacagtttagacctggatcccagcatgctcgatagtatttggaaacccgacctattcttcgccaacgaaaagggcgctaatttccacgatgtaacaacggataataagttgctaagaatttctaagaacggtaaagtgctgtactctattagattaactctaacccttagttgcccgatggacctcaaaaatttccctatggatgtccaaacttgcactatgcaacttgagagcttcggatacacgatgaatgaccttattttcgaatggctgtccgacgggcccgtacaggtggctgagggactaacccttccccaattcatcttgaaagaagaaaaggagctgggctactgtacaaaacattacaacaccggcaaattcacttgtatcgaagtgaagtttcacctggagcggcagatgggttattatctcatccagatgtatatcccatcgttacttattgtcatcctgagctgggttagtttttggatcaacatggacgctgcacctgctcgggtagcattggggatcacgaccgtccttactatgaccacacagagtagcggtagccgggccagcctccctaaagtttcttacgtcaaagccattgatatatggatggccgtttgcctcctgttcgtcttcgcagcgttactggaatatgctgcggtgaatttcgtctctaggcagcataaagaatttttacgcctgcgacggcggcagaaacgacagaataaagaggaagatgtaacgagagagtccaggttcaatttcagcggatatggcatgggtcattgtctgcaggtgaaggatggcactgctgttaaagccacaccagcaaaccctctgccgcagcccccaaaggatggggatgcaatcaaaaagaaatttgtggatagggcaaagagaatcgacaccatttcccgggcagcattcccacttgccttcctcatatttaacatcttttattggatcacgtataagatcattagacacgaggacgtgcacaaaaagtag

SEQ ID NO: 118794 - DNA, 648 bp, synthetic construct
  misc_feature 1..648: note = Description of Artificial Sequence: Synthetic coding sequence
  source 1..648: mol_type = other DNA
atgaatttgcacatgcgtatgacggccttttgtaaagaccatgactcaagaagcggaaaacagccatctcagacgctctctccctcagacttcctcgataaactgatgggcaggaccagcggatacgacgctagaattcgccctaacttcaaggggccccctgtgaatgtaacttgtaacatattcatcaattcctttggatcagtgacagaaaccacaatggattaccgagttaatatctttttaaggcagcagtggaacgatagcaggctggcctactctgaatacccggacgattccctggatttggacccctcgatgttagactccatctggaagcctgatctcttcttcgctaatgagaagggggctaacttccacgatgtcactacagacaacaagctgctgaggatctcaaagaacggaaaagtattatatagcattaggctgactttgactctttcgtgccccatggatctgaagaactttccgatggatgttcaaacatgtacaatgcagcttgagagcttcggctatacaatgaatgacctgattttcgagtggttatccgacggacctgtgcaggtggccgaaggtctgacactcccacagttcatcctcaaggaggagaaagagttaggatactag

SEQ ID NO: 118795 - DNA, 1092 bp, synthetic construct
  misc_feature 1..1092: note = Description of Artificial Sequence: Synthetic coding sequence
  source 1..1092: mol_type = other DNA
atggactatcgcgtgaacatctttctcagacagcagtggaacgattctcgcctggcttacagtgaatatcctgacgatagcctggatcttgatccctccatgttagactctatctggaaaccggacctttttttcgcaaatgaaaagggagctaacttccacgatgtcacgaccgataataaactgctacgcatctcaaagaacggtaaggtcctctattcaatccggttaacactgacactaagttgtcctatggacctaaaaaacttcccaatggatgtgcagacctgtaccatgcagctggaatcgtttggatacacaatgaacgacctgatattcgagtggctgtcggatggacccgttcaagtcgcggagggcctcacactaccccagttcattcttaaggaggaaaaggaattagggtattgcactaaacattataacaccggcaagtttacatgcattgaggttaaattccatctagagcggcagatgggttattatctgattcagatgtatattcccagcctcctcatcgtcatccttagctgggttagcttctggattaatatggatgcggccccggctagagtggcactcggcatcaccaccgttcttaccatgaccacccagagcagtgggtcaagggcgtctctgcccaaggtctcttacgtaaaggcgatcgacatttggatggcagtttgtctcttgtttgtgtttgctgctctgttggagtatgcagctgtgaattttgtgtcaagacaacacaaagaatttttaaggctgcgccggcggcagaaacgccagaacaaggaagaggacgttaccagagaaagccggtttaatttcagcgggtatgggatgggccactgcttacaggtcaaggatggcaccgccgtgaaggctacccctgccaatcccttgcctcaacccccaaaggatggtgacgctatcaagaagaagttcgttgatagggctaagcggatcgacacaattagtagggcagccttcccccttgcctttctgatatttaatattttttattggatcacttacaaaatcattcggcatgaggacgtgcacaaaaagtag

SEQ ID NO: 118796 - DNA, 1395 bp, synthetic construct
  misc_feature 1..1395: note = Description of Artificial Sequence: Synthetic coding sequence
  source 1..1395: mol_type = other DNA
atggcccatgtgcggcattttcggaccttggtgagtggcttctacttctgggaggctgccctgctgctcagcctggtggctacaaaagaaaccgacagcgcccggtcccgctccgcaccaatgtccccctctgatttcctcgataaactcatgggacggacctccggttacgacgcgcgtattcgccccaattttaagggccccccggtgaacgtcacttgcaatatcttcatcaattcctttggtagcatcgccgaaactactatggattatcgggtgaatatcttccttcgacagaaatggaatgaccccagacttgcatactccgagtatcctgacgattccctggacctcgatcccagtatgctggacagcatttggaagccagatctgttcttcgccaatgagaaaggcgccaactttcacgaagttacgactgataataaactgctccgaatattcaagaacggtaacgtactctattctatccggctcacactcactttgtcctgccctatggacctgaaaaattttcccatggacgttcaaacatgcatcatgcagctggaaagcttcggatacaccatgaacgacctgattttcgagtggcaagatgaagctcccgttcaggtggcggaagggctgaccctgccccagttcctgcttaaggaagagaaagaccttaggtactgtaccaaacactacaatacaggaaaattcacatgcatcgaggtccggtttcatctcgagagacagatggggtactaccttatccagatgtacatcccgtctctcctaatcgtgattctgagctgggtgtcattctggatcaacatggatgccgcccccgcaagagtggcgctgggcattactaccgtgctcactatgacaacccagtcatctgggagcagagcaagtttgcccaaggtcagctatgtgaaggccattgatatttggatggctgtgtgcctcctgttcgtgtttagtgctttgctcgaatatgccgcagtgaactttgtgagcagacaacataaggaattacttcgatttcggagaaagcggaaaaacaaaacagaggccttcgcactcgagaaattttacagatttagcgacatggatgatgaggtacgggagagccgcttctccttcaccgcctacggcatgggtccctgcttacaggctaaggatgggatgacccctaagggtccgaatcacccggtgcaggtgatgcccaagtcaccagacgagatgagaaaggtgtttatcgatagagccaagaagatcgacacaattagcagggcttgttttccactggcatttttgatcttcaatatcttttactgggttatctacaaaattctcaggcatgaggacatacatcagcaacaggattag

SEQ ID NO: 118797 - DNA, 1350 bp, synthetic construct
  misc_feature 1..1350: note = Description of Artificial Sequence: Synthetic coding sequence
  source 1..1350: mol_type = other DNA
atggctcacgtgcgccatttcaggacccttgtgtccgggttctacttttgggaagccgcgttgttactgagcctggtcgcaactaaggagacagattccgcccgttcacggtcagccccaatgtccccatctgattttctcgataagttaatgggccgtacatcgggttatgatgctcgtattcggccaaacttcaagggacctcccgttaacgtcacatgcaatatttttatcaactctttcggcagcatagctgagaccacaatggattatcgagtcaatatcttcctgagacaaaaatggaatgacccccgcttggcgtatagcgaatatccggacgatagccttgatctagatccgtccatgttagactcaatttggaagcccgatttgttcttcgcaaacgagaagggcgcaaatttccatgaggtcaccaccgacaataagctgctcagaatctttaagaatggcaatgttctgtatagtattcgattgacattgactttaagttgtcctatggatttaaagaacttccctatggacgtgcagacatgtataatgcaactcgaatccttcggctatacaatgaatgacctgatttttgagtggcaagacgaagcgccagtgcaggtcgccgagggcctgacgctgccacagtttctactgaaggaggaaaaggacctccgctattgcacaaagcattacaacaccggtaagttcacatgtatcgaagttagatttcacctggaacgccaaatgggctactatctaattcagatgtatatcccttcactcctgattgttattctgtcatgggtgtcgttttggattaatatggatgccgctccagcccgcgtagctctcggcatcacgacagtattgactatgacaacacagagtagcggatcccgagcttccctgcctaaggtgtcctatgtaaaagccatagatatctggatggcagtgtgcctattgttcgtgttcagcgcacttctggaatatgctgcagtgaacttcgtgtcacgacaacacaaagaattattacgcttcagacgcaagaggaagaataaggatgacgaagtgagagagtctagattctccttcactgcctatggcatgggtccctgcctccaggcaaaggacggcatgacgcctaagggtcctaaccaccctgttcaagtcatgccaaagagtcccgatgagatgcgcaaagtgttcatcgatagagccaaaaaaatcgacactatctctagggcttgctttccattggcctttcttatctttaatattttttattgggtaatttataagatacttaggcatgaggatattcatcaacagcaggactag

SEQ ID NO: 118798 - DNA, 1494 bp, synthetic construct
  misc_feature 1..1494: note = Description of Artificial Sequence: Synthetic coding sequence
  source 1..1494: mol_type = other DNA
atgaagtttctgctcaccaccgccttcttgatcctgatatctttgtgggtggaggaggcttacagtaaggagaagtcatcaaagaagggtaaaggaaagaagaagcaatatctgtgccccagccagcagtcagccgaggaccttgcccgcgtccctgcgaattcgacaagtaatatcttaaatagactgttggtgtcttatgacccgcgcattcggccaaatttcaagggcattcctgtagacgtggttgtcaatatctttattaattctttcggaagcattcaggaaactacgatggactatcgggtgaacatattccttaggcaaaagtggaatgatccacgcttgaaattacccagcgacttccggggcagtgacgcccttacggtggacccaaccatgtacaagtgcctatggaaaccagatttattctttgccaacgagaagtcggctaacttccatgacgtcacccaagagaacatactgttattcatttttagggacggcgatgtgctcgtctctatgcggcttagcataacgctgagttgcccactggatctgactttatttccaatggatacacagagatgcaagatgcagctggagtcttttgggtatactaccgacgatctgcgttttatctggcaaagcggagacccagttcagctggagaagattgccctccctcaattcgatatcaaaaaggaagacatcgagtatggcaactgtaccaagtactacaaggggacaggatattatacctgcgtggaggtcatcttcaccctccgacgccaagtgggattttatatgatgggggtctacgccccaacattactaattgtagttctgagctggctgtcgttttggattaacccagacgccagtgcagccagagtcccgctgggcattttctccgtcctctctctggcctccgagtgtaccacacttgccgctgagcttcctaaggtgagctacgtcaaggccctggacgtgtggctcattgcatgtctactcttcggcttcgcctccttggtcgagtacgccgtggtgcaggttatgctgaacaaccccaaacgcgtagaggctgaaaaagcaagaatcgctaaagccgagcaggctgatgggaagggcggcaacgtggctaaaaagaacaccgtaaatggaacgggtaccccagtgcacatatccacactgcaggtgggggaaacacggtgtaagaaagtttgcaccagcaagagcgatctccgatcgaacgacttcagcatagtgggctcactcccccgggatttcgaactaagcaactatgattgttacgggaaacctattgaggtgaataacggactcggaaaatctcaagctaaaaacaacaagaagccccccccagcaaagcccgtgatcccgaccgccgcaaagcggattgacttgtacgctagggccctcttccccttttgtttcctgttctttaacgtgatctattggtcaatctatctctag

SEQ ID NO: 118799 - DNA, 1494 bp, synthetic construct
  misc_feature 1..1494: note = Description of Artificial Sequence: Synthetic coding sequence
  source 1..1494: mol_type = other DNA
atgaagtttctgctgaccacagcctttttaatccttatctcactatgggtggaagaagcatacagcaaagaaaagtcgtcaaaaaaaggaaaaggtaagaagaagcagtatttgtgcccatcccagcaatctgcagaggatttggctcgcgtccccgccaattcaaccagcaacatccttaacaggctgctggtgtcatacgatcctcggatacgtcctaatttcaagggcattcctgtagatgtggttgttaacattttcattaatagcttcggctccatccaggagaccacgatggattaccgggtgaacatcttcctgcgacagaaatggaatgacccccgcctgaaactccctagcgatttccgtggctcggacgcactgaccgtggacccgactatgtataaatgtctgtggaagccagatttgttttttgcaaatgagaaatcggccaactttcacgacgttacccaagagaatatactgctgtttattttccgtgacggggacgtgctcgtctctatgcggttgagcatcacactctcatgccccctggatctcaccctctttcccatggatacacagaggtgtaaaatgcaactcgagtcctttggatatactacagacgatctgaggtttatatggcagagtggggatcctgttcagctggagaaaatcgctttgccccaattcgacattaagaaggaggacatcgagtacgggaactgcacgaagtattataaaggaaccggttactatacctgcgtggaagtgatctttacccttaggaggcaggttgggttttatatgatgggagtgtatgccccaacattgctgatagtagttctgtcatggttgagtttttggatcaacccagacgcgagcgccgcaagagtacctctcgggatcttcagcgtgctaagtctggctagtgaatgcactacactcgccgctgaacttcctaaagtgtcctacgttaaagctctggatgtgtggctcattgcctgtctgctcttcggattcgccagcctggtggaatacgcggtcgtgcaggttatgctgaataaccctaaacgtgtcgaggcggagaaggcccgcatcgccaaggcagaacaggctgacggcaaaggggggaacgtcgccaagaaaaacacagtgaacggtacaggaactcctgtgcatatctctaccctgcaagtgggcgagaccagatgcaaaaaagtgtgcacctctaaaagcgatcttcgaagcaacgactttagcatcgtgggatccctgccacgggatttcgagcttagcaactatgattgctatggtaagcctattgaagtcaataacggcctcgggaagagtcaagccaagaataataagaagccgcccccagctaaaccagtaatcccaaccgcagccaagaggattgatctgtacgctagggctctgttccctttctgcttcctcttttttaatgtgatttactggagtatctacctgtag

SEQ ID NO: 118800 - DNA, 912 bp, synthetic construct
  misc_feature 1..912: note = Description of Artificial Sequence: Synthetic coding sequence
  source 1..912: mol_type = other DNA
atgaaattcctcttgacaaccgctttcctgattttaatctccctgtgggtggaggaagcctactctaaagaaaaatccagtaagaagggtaaggggaagaaaaagcagtacctgtgtccttctcagcagagtgctgaagatcttgcgcgggtaccagcaaactctacctccaacattcttaatcggctacttgtctcgtacgatccccgaatccgacccaattttaagggcatccctgtcgatgtcgtagtgaatatcttcattaactcattcggctctatccaggagactactatggattaccgagttaacattttcctacgacagaaatggaatgatccgagacttaaactgcctagtgactttcgtggttcagatgccctgaccgtggaccccaccatgtacaaatgcctctggaagcccgacctgttcttcgctaatgagaaatcagcgaatttccacgatgtcacccaagagaatatactcctttttatattccgggacggcgacgtgttggtgtctatgcggctctccattactctcagttgtcctctcgatctcacattgtttccaatggacacacaacggtgcaagatgcagctcgaatcttttggctacaccaccgacgatctgcgattcatctggcagtctggggaccctgtgcagctggaaaagattgcgcttcctcagtttgacataaagaaagaagatatcgagtatggaaattgcacgaagtactataagggcaccgggtactatacatgcgtggaggtgatcttcacacttcgccggcaggtcggcttttatatgatgggtgtgtatgcacccaccctgctgatagtggtgctgtcctggttgtccttctggattaatccagatgcctccgctgcgcgtgtgcctctgggctggtag

SEQ ID NO: 118801 - DNA, 492 bp, synthetic construct
  misc_feature 1..492: note = Description of Artificial Sequence: Synthetic coding sequence
  source 1..492: mol_type = other DNA
atgatgctaccactccaaggggcacagatgctgcaaatgttggagaaaagtctgaggaaatccctgcccgcaagccttaaagtttatggtacggtttttcacatcaatcatggcaatccttttaaccttaaagccgtggtggataaatggcccgacttcaataccgttgttgtgtgcccgcaagaacaggatatgaccgacgatctggaccattacactaacacatatcagatatattccaaagatccgcaaaattgccaggaatttctcgggtcaccagagttaatcaactggaaacagcatctgcaaattcagagcagccagccatcactcaacgaagctatccagaatctcgcagctataaagtccttcaaggttaagcagacacagcggattctatacatggccgcagaaacagccaaagagcttacgccattcttactgaagagtaagattctgtcccctaacggagggaagcccaaggctatgtag

SEQ ID NO: 118802 - DNA, 891 bp, synthetic construct
  misc_feature 1..891: note = Description of Artificial Sequence: Synthetic coding sequence
  source 1..891: mol_type = other DNA
atgatgttaccattgcagggtgcccagatgctgcagatgctcgagaaatccctgcggaaatccttaccggcctccctgaaagtatacggtacagtttttcacattaatcatggcaatccctttaacctgaaggctgtggttgacaaatggcccgacttcaatacggtggtggtgtgtccccaggaacaggacatgaccgatgatctggaccactacacaaacacttaccaaatttatagcaaggatcctcagaactgccaggagttcctgggatcccctgagctcattaattggaagcaacatttgcagatacagtcgtcccagccctcactgaatgaagctattcagaatctagcagcgattaagtcctttaaagtcaaacagacacaacggatcctgtatatggccgccgagacggctaaggaattaactcccttcctcttgaaatcaaaaattcttagccccaacggaggcaaaccaaaggccattaaccaggagatgttcaaattgtcatccatggacgtgactcacgcacacctggtgaataagttctggcatttcggcggcaatgagaggagtcagcggtttatcgagcggtgcattcagacttttccaacatgctgcctgttgggaccggagggaactcctgtctgttgggatctgatggatcagacaggcgaaatgcgcatggccggcactctaccagagtaccgtctgcatggcctcgtaacttatgtgatctattcgcacgctcagaaactgggcaaactgggctttcccgtctattctcatgtggactacagtaacgaggctatgcagaagatgagctacactctccagcatgtccccatacctcggtcctggaatcagtggaactgcgtgcccctgtag

SEQ ID NO: 118803 - DNA, 891 bp, synthetic construct
  misc_feature 1..891: note = Description of Artificial Sequence: Synthetic coding sequence
  source 1..891: mol_type = other DNA
atgatgttaccgctgcagggcgcccagatgcttcagatgctggagaaaagcctgaggaaatccctgcctgcatcactgaaagtatatggcaccgtgttccacatcaaccatggtaacccttttaatttgaaggctgttgtggataagtggcctgactttaataccgtcgtcgtttgtccccaggagcaggatatgacagacgacttggaccactatacaaacacttaccagatttactccaaggaccctcagaattgtcaggaattcttaggttctccagaactgataaactggaagcagcatctgcagatccagtccagccaacccagcctgaacgaggctatccagaatcttgctgctatcaagagttttaaggtgaaacagacccagcggatcttgtacatggccgcagagacggcgaaagagctgactccgtttctcctcaaatctaagattctgagcccgaatggcggaaagcctaaagctatcaaccaggagatgtttaagctttcgtcaatggatgtaacgcacgcccacctcgttaataaattttggcacttcgggggaaatgaacgcagccaacgcttcatcgagcggtgcattcagacatttccgacctgttgcctcctgggcccggagggaacccccgtttgctgggatctcatggaccaaaccggagaaatgcggatggcaggcactctccctgagtatcggcttcatggcttagtaacttacgtgatttacagccatgcccagaaattaggaaagctcgggtttcccgtttattcccatgtggactactctaacgaggccatgcagaagatgagctatacactccagcatgttcctatccccagaagctggaatcagtggaattgcgtgcctctgtag

SEQ ID NO: 118804 - DNA, 2022 bp, synthetic construct
  misc_feature 1..2022: note = Description of Artificial Sequence: Synthetic coding sequence
  source 1..2022: mol_type = other DNA
atgcccctaaatcgcactttaagcatgagcagtctacccggactcgaagactgggaagatgagtttgacctcgagaatgctgtcttgtttgaggtggcttgggaggtcgcgaataaggtcggcggaatctataccgtgctgcagaccaaggctaaggtgacgggagatgagtggggagataactacttccttgttggaccttacactgagcagggtgtgagaacgcaagtggagctgctggaggccccaactcccgcactcaagcgcacattggacagcatgaatagcaaaggttgtaaatttctggctcagagtgaagagaaaccccacgtggtggcacactttcacgagtggctggccggagtaggactatgtttatgcagggctcgccggctgccggtggctaccattttcacaacacacgccacactcctgggacgctatttgtgcgctggcgccgtggacttttacaacaatctggagaacttcaacgtagacaaagaagccggcgagcggcagatataccacaggtactgcatggaaagagctgctgctcactgcgctcatgtttttacaacagtgagtcagatcacagccatcgaggcccagcacctgttaaagcgtaaacccgatatcgtaacaccgaatggactcaatgttaaaaaattctctgctatgcatgagtttcagaacttgcacgcgcagtcgaaggcaaggatacaagaattcgtgcggggacatttctatggccatctggactttaatctcgacaagaccctgtacttcttcattgccggaaggtacgaatttagtaacaagggcgcggatgtgtttctggaagcactagcacggttaaactatctgctgcgggtgaacggcagcgaacagactgtcgttgcctttttcattatgccagccagaactaacaactttaacgtggaaaccctgaagggccaagctgtgcgaaagcaactatgggataccgcgaacacggtcaaagaaaaattcggccgcaagctctatgaaagtcttctcgttggcagcctgcctgatatgaataaaatgctggataaagaagattttaccatgatgaaacgagccatctttgccacccagcgccagagctttccccccgtgtgtactcataatatgctggacgattctagcgacccgattttgactaccattagaagaatagggctgtttaactccagcgcagaccgcgtgaaggtaatcttccaccccgagttcctgtcgtctacatcgcctcttctgcccgtggactacgaagaattcgtaaggggctgtcatttaggggtgtttccgtcctactatgagccttggggttacacccctgccgaatgcaccgtaatgggcattccttccattagcacgaaccttagtgggttcggctgcttcatggaggagcacatcgctgatccttctgcttacggaatttatattctggaccgccgttttagatcactggacgactcttgctcccaactaactagctttctgtacagtttctgtcagcagtcacggaggcagaggattatacaacgcaataggactgagcgactgtcggatctgcttgactggaagtaccttgggaggtactacatgtctgccagacatatggcattaagtaaagcatttccagaacattttacttatgagcccaatgaggcagatgccgcacaaggctaccgatatccaaggccggcttccgtgccaccttctccgtctctttctaggcattcaagcccacatcagtccgaagacgaggaggatcctcggaacggccctctagaagaggacggagagagatatgatgaagacgaggaggccgcgaaagaccgacgcaatatcagggccccagagtggcccagacgcgccagctgcacaagcagtacaagtggctctaagaggaatagcgtggataccgcgacgtcctccagcctttccactcctagtgagcccctctctcccaccagctccctgggggaagagcgaaactag

SEQ ID NO: 118805 - DNA, 2214 bp, synthetic construct
  misc_feature 1..2214: note = Description of Artificial Sequence: Synthetic coding sequence
  source 1..2214: mol_type = other DNA
atgcctttaaatagaacactgtctatgtcttccctgcctgggctcgaagactgggaagacgagtttgacctagaaaacgctgtgttattcgaggtggcttgggaagtagctaacaaagttggcggaatatacacagtgttgcaaactaaggccaaggtgacaggagatgagtggggagataactacttccttgtcggcccttatacggaacagggtgtgcgcactcaggtcgagctactcgaggctccgaccccagctctcaaaaggaccctggacagcatgaattccaaagggtgtaaggtgtattttggaagatggctgattgaggggggacccttggtcgttctcctagatgttggcgcatccgcctgggctttagagcggtggaagggcgagctgtgggacacttgtaatattggggtgccttggtatgatcgcgaagccaacgatgccgttttattcggcttccttacaacatggttcctgggtgaattcctggctcagagcgaagagaaaccccatgtggttgctcacttccatgagtggctagcgggcgttggtttgtgtctctgccgcgccaggcggctgccggtagcaaccatcttcaccacgcatgcaaccctgttaggacgttacctgtgtgccggggcagtcgacttctataacaacttagagaattttaatgttgataaagaggcaggcgaacggcagatatatcataggtattgtatggagcgcgccgcggcccactgtgcccacgtgtttaccactgtaagccagataacggccatagaggcccagcacttactgaaacgtaaaccggacatcgtaacaccaaatgggcttaacgtgaagaaattttcagctatgcatgaatttcagaacctgcatgcacaaagtaaggcacgaatccaggagtttgtgaggggccacttttacggacacctggattttaaccttgacaaaaccctgtatttcttcatcgccggacggtatgagttcagcaacaagggtgctgatgttttcctggaagccctcgctcgcctgaattatctcctgcgagtgaatggaagcgagcagacagtggtggcttttttcattatgcccgcgcgcacaaataacttcaatgtggagaccctcaaaggacaagcggtgagaaaacaactatgggatacagcaaatactgtgaaggagaaattcggtcggaagctgtatgagtctctgctggtaggaagcctgccagacatgaacaagatgttggacaaggaagactttaccatgatgaagagagccatcttcgcaacccagcgtcaaagctttccgcctgtttgcacccataatatgctcgacgattcatcagacccaattttgacaactatcagaagaattggcttgttcaatagttctgccgaccgcgtcaaagtcatattccacccagaattcttgagctctacctcaccgttgttgcctgtagactacgaggagttcgtccgtggctgccacctaggtgtgtttccatcttactatgagccgtggggctacactccggccgagtgcacggttatgggaatacccagtatttcaacaaatttgtccggtttcggctgtttcatggaggagcacatcgccgatccaagcgcgtatgggatatacatcctggacaggcggttccgctccctcgatgatagttgttcgcaacttacctctttcctctactctttttgtcagcagagtagacgccaacgcatcatccagcggaaccggaccgaaagattgtctgatctgctagactggaagtatctcggcagatactacatgagcgcgcggcacatggccctgtctaaagccttccccgaacactttacatatgaaccaaacgaggccgacgcggctcagggctacagatatcctcggcctgcgtctgtgccccccagcccctcactgtcccggcattcttccccgcatcagtctgaagacgaggaggatcctagaaacgggcctctggaggaggatggcgaaagatacgatgaggatgaggaggcagctaaagaccggagaaacattcgagccccagaatggcctagacgagcatcctgcacttcaagtaccagcgggtcaaagcggaacagcgtggatacggccacctccagttctctttccaccccttctgagccgctgagcccaacaagctctcttggagaggagcgaaattag

SEQ ID NO: 118806 - DNA, 708 bp, synthetic construct
  misc_feature 1..708: note = Description of Artificial Sequence: Synthetic coding sequence
  source 1..708: mol_type = other DNA
atgaactccacttggagaacccagtgttcctccaagtggccaggcagatggctgactcgagtgtactttggtagatggctgatcgagggaggccccctcgtggtccttctggacgtcggtgcaagcgcttgggctctcgagcgctggaagggagaactgtgggacacgtgtaacattggagtcccttggtatgacagagaagctaacgacgccgtcttgtttgggtttctgactacttggttcctgggcgaatttctagctcagtctgaggagaagccccacgtggtcgctcattttcacgagtggctagccggagtggggttgtgtctgtgtagggctcgacgtctgcccgtggcgactatatttactacccatgctacccttctggggagatatctgtgcgcaggcgctgtcgacttctacaataacttggagaacttcaacgtcgataaggaggccggggagagacagatctatcacaggtactgcatggagagggctgctgcccactgcgctcacgtattcaccacagtgtcccagatcacagctatagaagctcagcatctcctgaaaaggaaaccggggatctggaccagtacttggactaggccgtatacttcactgagtcccgccgccatgagttcgccaactagggtgctgacctcctcctggaggcactggctgggaagcactatctgctctgagtag

SEQ ID NO: 118807 - DNA, 1974 bp, synthetic construct
  misc_feature 1..1974: note = Description of Artificial Sequence: Synthetic coding sequence
  source 1..1974: mol_type = other DNA
atgaattccacctggcggacacaatgcagctccaaatggccgggcaggtggttaacacgcgtttacttcggtcgttggctgatcgaagggggccccttggtggtattactggacgttggtgcgagcgcatgggcactggagcggtggaaaggtgagctgtgggatacttgcaacatcggggtcccatggtatgaccgtgaagccaatgacgccgtgctgttcggattcttgactacctggttcctgggcgagttccttgcacagagcgaggaaaagcctcacgtcgtggcccacttccatgagtggctcgctggagttgggttgtgcctttgtagggcccgccgactacctgtggcaacaatcttcactacgcatgccaccctactaggacgatatctctgtgccggagctgtggatttttataataatttagaaaattttaatgtggataaagaggcaggagagcgacaaatataccaccgatactgcatggaacgcgctgccgcccattgtgcccatgtttttactactgtgtcccagattactgctattgaagcccaacacctgctgaagcgcaaacccgacattgttactccaaacgggctaaatgtgaaaaaattctctgctatgcacgagttccagaacctacatgcacagagcaaggccagaattcaggaattcgtccggggccatttctatggtcacctcgacttcaacctcgacaagacactgtatttcttcatagcaggaaggtatgaattctccaataaaggcgccgatgtattccttgaagctcttgcccgccttaattacttactgcgggtgaatgggagcgaacagactgtggtggctttcttcatcatgccagctaggaccaacaacttcaatgtcgaaaccctgaagggtcaggccgtgagaaagcaactttgggacacagcaaacacagtgaaggagaaatttggcaggaagttgtatgaatcgctgctggtgggttctttgccagacatgaataaaatgctcgacaaggaggattttactatgatgaaacgggccatcttcgctactcagaggcaatcctttccacctgtgtgcacccataatatgctagacgactcttcagaccccattctaacaactatcaggaggataggactgtttaattcctctgcagatagagtgaaggtcatctttcaccccgagtttctttcttcaacatccccgctgctacccgtagattatgaggagtttgtgcgcggctgccacctgggagtcttcccctcctattatgaaccttgggggtacaccccagctgagtgcactgtcatgggaataccaagcatcagcaccaacctgagtggtttcggatgtttcatggaggagcatattgccgatccaagcgcttacgggatttacatcttagatcgtcgatttcggagcctggacgactcctgcagccagcttacttcgttcttatacagcttctgccagcagtctcggagacagcgaattattcaacggaaccgcacagagcgcctctctgatctgctggattggaagtaccttggacgatactatatgagtgcacgacacatggcactcagtaaggcttttcccgagcacttcacctatgagcctaacgaggctgacgccgctcagggataccgttaccccaggcctgccagtgtacctccttccccatctctttctagacactcctcaccacatcagagcgaagatgaagaggaccctaggaatggacccctggaggaagatggtgagcgttacgacgaagacgaggaggccgctaaagatcgccgcaatatcagagcccctgagtggcccagaagagcctcttgcacatccagcacaagtggatctaaacggaactctgttgacactgcaacctccagttctttgagtaccccctcggagccgctgagtcctacatcctcccttggagaggagcgaaactag

SEQ ID NO: 118808 - DNA, 1113 bp, synthetic construct
  misc_feature 1..1113: note = Description of Artificial Sequence: Synthetic coding sequence
  source 1..1113: mol_type = other DNA
atgccagcccgcacaaacaacttcaatgtagagactttaaaggggcaggcggtgcgcaaacagctttgggacaccgctaataccgtgaaggagaaatttggcagaaagttgtacgaaagcctgctcgtcggatcgctgccggatatgaataagatgctggacaaagaggatttcacaatgatgaagagggccatctttgcgacccaaagacaaagcttcccaccagtctgtacgcataatatgttggacgattcatccgatccgattctgaccaccattcggcggattggtctcttcaattctagcgccgacagggtgaaagtgattttccaccctgagttcctttcctcgacttccccgttacttccggttgattatgaagagttcgtccgagggtgtcacctgggagtatttccttcctactatgaaccatggggctacacgcccgccgagtgtactgtcatgggcattccaagcatctctaccaatttgtccggattcggctgttttatggaagagcacattgccgacccaagtgcatatgggatttacattctggataggaggtttaggtccctggatgacagctgttcgcagctgacttcctttctgtactctttttgtcagcagtctcgccgccagagaatcatccagcgcaacagaactgaaaggctctccgacctgctagactggaaatacctgggaaggtattacatgagcgccaggcacatggcactgagtaaagcatttccagagcattttacatatgaacctaatgaagcagacgcggcccaggggtacagatatcccagaccagccagtgtgccccccagcccaagcctgtcccggcactcatctccacaccagtcagaggacgaagaagacccccgcaacggcccacttgaagaggacggtgagcgctacgatgaagatgaagaggcagcaaaggaccggagaaatataagagctccagagtggccaaggagggccagctgtaccagctctacaagcggttcgaagaggaatagcgttgatacagctaccagttcctcattgtccactccttctgaaccactgtcaccaacatccagtctgggggaggagcggaactag

SEQ ID NO: 118809 - DNA, 1002 bp, synthetic construct
  misc_feature 1..1002: note = Description of Artificial Sequence: Synthetic coding sequence
  source 1..1002: mol_type = other DNA
atgactgatcaggcctttgttaccctgacaacaaatgatgcatacgcaaaaggagctctcgtacttggctcctctctgaagcagcatcggacaaccagacggcttgttgtgctggccacgcctcaggtgagtgacagcatgcgtaaggtgttggaaaccgtgttcgatgaggtgattatggtcgacgtcctagactccggtgatagtgcccaccttacacttatgaaacgacccgagctgggagtgactttgaccaaactgcactgttggagcctaacacagtattctaagtgtgtgttcatggatgcagacactttagttcttgcaaatattgacgatctgtttgaccgggaggagctgtctgcggcccccgatcccggttggcctgactgcttcaactcaggagtctttgtctaccaaccttctgtcgagacatataatcagcttctgcacctcgcctctgagcagggatcttttgacggtggagatcaggggatactcaacacttttttttccagctgggccaccacggatatccggaagcacttgccctttatatacaacctatcttccatctcaatttactcctacctccccgcctttaaggtctttggcgcaagtgctaaggtggtgcatttcctgggccgggtaaaaccttggaactatacctacgacccaaaaacgaaatccgtgaaaagtgaagctcatgatccaaacatgactcatccggagttcttaattctttggtggaacatcttcaccaccaatgtgctgccactccttcagcaatttgggctggttaaggatacgtgcagctatgtgaatgttgaagacgtctcaggagccatcagccatctgagtcttggagagatcccggccatggcgcagcctttcgtgtctagtgaggagaggaaagagcggtgggaacagggacaggccgattacatgggagcagattcctttgataatataaagcggaaactagacacctaccttcagtag

SEQ ID NO: 118810 - DNA, 1053 bp, synthetic construct
  misc_feature 1..1053: note = Description of Artificial Sequence: Synthetic coding sequence
  source 1..1053: mol_type = other DNA
atgaccgaccaggccttcgtgacgttgaccaccaacgatgcatatgctaaaggggctctggtcctcggcagctccctgaagcagcacaggaccacacgtaggctggtcgtgctggcgacccctcaagtaagcgattcgatgagaaaggtgttagaaacggtatttgacgaggtcatcatggtggatgtgttggactccggtgactccgcacacttgacccttatgaagcggcccgaattgggagtcacacttacaaaattgcactgctggtcactgacccaatacagcaagtgcgtattcatggatgcggatactctggtcttagcaaatatcgacgacctgttcgaccgcgaggagctgagtgcagcccccgatccaggctggcccgactgcttcaattcaggcgtattcgtttaccagccctcagtggagacctacaaccagttgctccatctagcaagtgaacaagggtcttttgacgggggcgaccaaggtatcctgaataccttcttctctagttgggcgacaaccgatatacgaaagcacctgccattcatttataatttaagttctatttctatttactcctacctcccagcttttaaggtgtttggcgcttcagcaaaagtagtgcacttcttaggcagggtgaagccttggaattacacctatgacccaaaaactaaatcggtgaaaagcgaggctcacgaccccaacatgacacaccctgaattccttatcctctggtggaatatttttaccaccaatgtgctgcccctcctacagcagtttggactcgtgaaggacacttgcagttatgtcaatgtgttatccgatctggtgtacaccctggcctttagctgtggcttttgccgaaaagaagacgtctcgggcgccatttcccatctgtcacttggagaaattcctgccatggctcaaccttttgtgtctagcgaggaacgcaaggaaagatgggagcaggggcaggcagactatatgggggccgactcattcgataacataaaaagaaagctggatacatacctgcagtag

SEQ ID NO: 118811 - DNA, 840 bp, synthetic construct
  misc_feature 1..840: note = Description of Artificial Sequence: Synthetic coding sequence
  source 1..840: mol_type = other DNA
atgaccgatcaggcctttgtcaccctcactaccaatgacgcttatgccaagggcgccctcgtgctgggtagcagcttgaaacaacaccgcaccacgagaagactggtggtgctggcaactccacaggtttctgatagcatgagaaaagtacttgaaaccgtgtttgacgaggtcattatggttgatgtattggactccggggatagtgcgcacttgaccctgatgaagaggccggaactgggagtgacactcaccaagttacattgctggagcctgactcagtattctaagtgcgtattcatggatgctgacacgctggtgctggccaacatcgacgacttgtttgaccgggaagaactctccgcagcacccgacccgggctggcctgattgttttaacagtggggtcttcgtttaccaaccgagtgtcgaaacttataatcagctcttgcacctcgccagcgaacaggggagtttcgacggcggcgaccagggcatacttaatactttcttcagcagctgggccacaactgacatcagaaagcaccttccttttatttataacctgtcctcaattagcatttatagttacttgccagcttttaaagtgaagatgtcacaagagccatatcacatctgcccccttgggagaagccagctgtggcatagtcgtctctatcccaggaaaaatgggcggaacgacggcaatagggccaggctcatcatttgggaacagattcctctcacgacatctcgtggcaacctgaccctgaccagtagtaggaacaccgcgttcttttgcgaacacatccattttaccagtttggtcagcgacacatag

SEQ ID NO: 118812 - DNA, 1398 bp, synthetic construct
  misc_feature 1..1398: note = Description of Artificial Sequence: Synthetic coding sequence
  source 1..1398: mol_type = other DNA
atgagcgagacagagtttcatcacggagcccaggccgggctagaactgctgaggagcagtaactcccccacctccgcctcccagtctgcagggatgaccgtgacggaccaggcatttgtcaccctggctacaaatgacatatactgccaaggtgccttggtgctgggtcaatccttgagaagacatcggctgacccgcaagctcgtcgttctaatcacacctcaggtgtctagcctgctacgggtgatccttagtaaagttttcgatgaggttatcgaggttaatttaatcgactcagctgattatatacacctcgcctttctaaagcgtccagagcttggactgaccctgacaaagctccattgctggacactgactcattactcgaaatgtgtgtttctggatgcggatacacttgtcctttcaaacgtggacgaattgttcgacaggggagagttcagcgcagcacctgatccaggttggcccgactgttttaattcaggagtcttcgtttttcaaccaagcctccacactcacaaacttctcctacagcatgcaatggagcatgggagtttcgacggagctgaccaagggttactgaatagtttcttccggaactggtcgacaacagatattcacaagcacttgccattcatttacaacctgtcttccaacactatgtacacttatagcccagcatttaagcagttcgggtcttcagccaaagtagttcattttctcgggagcatgaagccctggaactataagtataatccgcagtcaggaagcgtgctcgaacaggggtctgctagctcgagccagcatcaggcagcgttccttcacctttggtggactgtgtaccaaaataatgtgttgcccctttacaaatcagtgcaagctggggaggcccgcgcctcccctggtcacaccttgtgccattccgatgtgggcggaccctgcgcagatagcgccagcggcgttggggaaccatgtgagaattctacccctagcgctggcgtgccctgcgcaaactcaccactgggaagcaatcaacctgcacagggattgccagaacctacacaaatcgttgacgaaactctctctttgcccgagggaagaaggtccgaggacatgattgcatgcccagagacggagactccagccgttattacgtgtgatccgttgtctcaaccttccccgcagccagctgacttcaccgagacagagactatcttagtcgatcttgcggtctctgtctcccagatctccatcgaggaaaaagtgaaggagctgagtccagaggaagaaaggagaaaatgggaggagggtagaattgattatatgggtaaagacgcgtttgctcgaatccaggaaaaattggatcggtttcttcagtag

SEQ ID NO: 118813 - DNA, 1506 bp, synthetic construct
  misc_feature 1..1506: note = Description of Artificial Sequence: Synthetic coding sequence
  source 1..1506: mol_type = other DNA
atgtctgaaactgaatttcatcacggcgctcaggcaggcctggaattgctcagatccagcaactcaccaacctctgcaagccagtccgccggaatgacggtcacagaccaggcgttcgtgacccttgccacaaatgacatctattgtcaaggcgcactggtccttggtcagagccttaggagacacaggctaacaagaaaactggtagtgttgattacacctcaggtctcttcactgctgcgagtgattttgagcaaagtcttcgacgaggtcatcgaagtgaatctgatcgatagtgcggattatattcacctcgcattccttaaaagacccgaattgggtctgacattgaccaagctgcattgttggacccttacgcattactcaaagtgtgtatttctcgacgctgacaccctggtcctgtccaatgtcgacgagctattcgacagaggcgagtttagcgcggctccagaccctggttggcccgattgcttcaacagcggagtcttcgtgttccagcccagtctccacacacacaaactcttgctccagcacgctatggaacatggctcttttgacggcgccgaccaggggttgttaaattctttctttaggaactggagcaccaccgatattcataagcatttaccatttatttacaacctctcttctaacaccatgtacacatacagccctgctttcaagcagttcggttcttccgctaaggtggttcacttcttggggagcatgaaaccttggaattataagtataatccccagtccggctcagtgctagagcagggttcagccagctcaagtcagcatcaggctgccttcctgcatctgtggtggaccgtgtatcagaataacgtgttgccattgtataaatctgtccaggccggtgaggcgcgggcctcaccgggacataccctatgtcacagcgacgttggaggcccatgcgccgatagcgcaagtggcgtgggagagccatgcgaaaattcaactcctagtgccggcgtgccatgtgccaatagtcccctgggatcaaaccagccagcgcaggggttgcctgagccaacgcagattgtcgacgagacgctgtccttgcctgagggtaggcgctccgaagatatgatcgcctgtcctgaaactgaaacgccagcagtcattacctgcgatcccctgagtcaaccatctccacagccggcagattttactgagacggaaaccatcttgcaaccagctaataaggtggagtccgtgtcttctgaagaaactttcgagcctagccaggaactcccagctgaggccctgagggacccctcactgcaagacgctctggaagtggatctcgcagtgtccgtgagccagataagtatcgaggagaaggtgaaagagctgagcccagaagaggaacgacgcaaatgggaagagggaaggatcgactacatgggcaaggatgctttcgcccgtatacaggaaaaattggaccgcttcctgcagtag

SEQ ID NO: 118814 - DNA, 1413 bp, synthetic construct
  misc_feature 1..1413: note = Description of Artificial Sequence: Synthetic coding sequence
  source 1..1413: mol_type = other DNA
atgtcagttaccgatcaggctttcgttaccctggccaccaacgacatctactgtcaaggcgccctggttctgggtcagtcactgcgccgacatcgactaacgaggaagctggtcgttttaatcactccacaggtaagtagcctgctccgcgtaattctctccaaggtgttcgacgaggtgatcgaagttaatctgatcgactcagctgactacatccatttggcttttcttaagcgacctgagctcggccttacccttaccaagctgcattgttggaccttaacgcactatagcaagtgcgtctttctggatgcagatacactggtcctgtccaacgttgatgagctgtttgatcgaggagaatttagcgctgcccccgatccaggatggcccgactgcttcaactccggagttttcgtgttccaacccagcctgcacacgcataaattactgttgcagcacgctatggaacatggatcatttgacggcgcagatcagggcttgctgaattcattctttaggaattggtcaactacggatattcataagcacctaccgttcatctacaacctgagcagcaataccatgtatacttattctccagcctttaagcagtttggttcatccgccaaagttgtccatttcctaggaagcatgaagccttggaactacaagtataacccacagtccggcagtgttctggagcagggctctgccagctccagtcagcaccaggcagcctttctgcatttgtggtggacggtgtaccaaaacaatgtgctgcctctctacaagtctgttcaggccggggaagcacgggccagcccgggtcacacactgtgtcacagtgatgtcggtgggccttgtgccgactccgctagcggcgtgggcgagccctgtgagaactccaccccctcagctggagtgccctgcgctaatagtcctttaggatcaaatcagcccgcgcaaggcctgcctgagccaacacagatcgttgatgaaaccttatccctgccggagggcagacgttctgaggacatgatcgcctgtcccgaaactgagactcctgccgttatcacctgcgacccgttgtcgcagccttcgccacaaccagcggatttcaccgaaacagagacaattctccagccagctaataaggtcgaatccgttagctctgaggagacttttgaaccttctcaggagttgccagcagaggccttgcgagatccttccttacaggacgccctggaggtggacctcgccgtctcagtgtctcaaatctctattgaggaaaaagtaaaagaactcagccctgaggaagagcggagaaagtgggaagagggtagaattgactatatggggaaagatgctttcgcccgaattcaggagaaactggaccgctttctgcagtag

SEQ ID NO: 118815 - DNA, 417 bp, synthetic construct
  misc_feature 1..417: note = Description of Artificial Sequence: Synthetic coding sequence
  source 1..417: mol_type = other DNA
atgagtgtgactgaccaggcctttgtcaccttggctacgaacgacatatattgtcagggcgcccttgttcttgggcagtctttaaggcggcaccgacttacgcgcaaattagttgtactaattacccctcaggtctctagcctcctccgcgtcatattatccaaggtgttcgacgaggtgatcgaggtgaatcttatagactccgccgactacatacacctggccttcttaaaacgccccgaattggggctgacgctcacaaagctgcactgctggaccttaacccactattctaagtgcgtgttcttggacgctgataccctcgtgctctccaatgtcgacgaactgtttgaccgcggcgagttctccgcagcacccgaccctggatggccagattgtttcaactctggagtgtag

SEQ ID NO: 118816 - DNA, 1293 bp, synthetic construct
  misc_feature 1..1293: note = Description of Artificial Sequence: Synthetic coding sequence
  source 1..1293: mol_type = other DNA
atgagcgaaaccgagtttcatcatggcgcgcaggctggacttgagctgctgagatcatccaacagcccaacaagtgccagccaaagcgccggcatgacagtcaccgaccaagccttcgtgactttagccacaaacgatatctactgtcagggtgcccttgtgctgggccaatctcttcggcgccaccgtttgacacgaaagctcgtcgtgctgattacgcctcaggtgtccagcctccttcgcgtgattctcagtaaggtctttgatgaggtgatcgaggtaaacttaattgactctgcagactacatccacctggcgttcctgaaaagacctgagctgggtcttaccttgactaaactgcactgttggacattgactcactactcaaagtgtgtgtttttggacgcggacactctggtgctgagcaatgttgatgaactttttgaccgcggggagttttccgcagcacctgaccctggctggccagattgtttcaactccggcgtgtttgtgtttcagccttcactgcacacgcacaaactgcttctacagcatgccatggagcatggttcctttgacggcgctgaccagggtctgctaaacagcttctttagaaactggtccactaccgatatccacaagcacctgccattcatatataatctgtcgagcaacacaatgtacacctactcccccgcatttaagcagtttggatccagcgcaaaggttgttcactttcttggatcaatgaagccctggaactacaaatataacccacagtctgggtctgtactggaacagggcagcgcaagctccagccagcaccaggctgctttcctgcacctgtggtggaccgtgtatcagaataacgtgctccccctctacaagtcagtccaagcaggcgaagctcgggctagccccggacacacactgtgtcatagtgatgtcggtggcccgtgcgcagatagtgcctctggagtgggggagccatgtgagaatagtacaccttctgccggagtgccctgcgccaactctcccctcggatccaaccagcccgcacaagggctccccgaaccgacacagatcgtcgatgagactctaagcttacccgaagggcggcgttccgaagatgttgatctggccgtatctgtgtcccagatctcaatagaagagaaggtgaaggagctgagtcccgaggaggaacgtcgcaagtgggaagaaggcagaattgattatatgggcaaggacgcctttgcccggatccaggagaaacttgacaggtttctgcaatag

SEQ ID NO: 118817 - DNA, 354 bp, synthetic construct
  misc_feature 1..354: note = Description of Artificial Sequence: Synthetic coding sequence
  source 1..354: mol_type = other DNA
atgtacgggaagataattttcgtgctgctactgtctgatactcacaagcgagacacctatgccgcgaccccacgggcacatgaggtgtctgagatatcagtccggacggtctatccacctgaggaggaaaccggggagcgggtgcagctcgcacaccatttctccgaacctgagattaccctgattatctttggtgtgatggctggggttattggcaccatactgctgatctcctacggtattcggcgcctcattaagaagtcaccctctgatgttaagccgttgccatctcctgacaccgacgttcccttgagttccgtagagatcgaaaatccagaaacctccgatcagtag

SEQ ID NO: 118818 - DNA, 453 bp, synthetic construct
  misc_feature 1..453: note = Description of Artificial Sequence: Synthetic coding sequence
  source 1..453: mol_type = other DNA
atgtacggtaagataatctttgtgttgctccttagtgaaatcgttagcatctcagctctgtccacaaccgaagtggctatgcacacctccacatcttcttccgtcaccaaatcctacatttcttcacagactaacgacactcataagcgggatacatatgcggccacccccagggcccacgaagtgtccgaaatttccgtccggacagtttacccaccagaagaggaaacaggagagagagtgcagctggcccaccacttttcggaacctgagatcacactgattatctttggggtcatggctggcgtgatcgggaccattctgctgatctcatacggtatccgtcgcctgataaaaaaaagcccttctgacgtgaaacctcttccatcccccgataccgacgtccctttgtcttcagtcgagatcgagaaccccgagacaagtgaccagtag

SEQ ID NO: 118819 - DNA, 189 bp, synthetic construct
  misc_feature 1..189: note = Description of Artificial Sequence: Synthetic coding sequence
  source 1..189: mol_type = other DNA
atgtatgggaaaatcatcttcgtgctgctcctcagtgagatcgtatccatatccgctctttctaccacagaggtggccatgcacacgagcacctcttcctcggtaaccaaaagttacatttcttcccagacaaacggcgaaagggtgcagctggctcaccattttagcgagcctgatttccataactag

SEQ ID NO: 118820 - DNA, 357 bp, synthetic construct
  misc_feature 1..357: note = Description of Artificial Sequence: Synthetic coding sequence
  source 1..357: mol_type = other DNA
atgtatggtaagatcatctttgtcttattgctgtctgagatagtgagtatatccgccctgtcaaccacggaggttgccatgcacacaagcacctctagcagcgtgacaaaaagttacatttcatcacagacaaatggcgagcgggtgcagctcgcccaccatttttctgagccagagattactcttattatttttggggtcatggcaggagtcatcggtactattctgctgatcagctacggcattcggcggctgattaaaaagagcccctcagatgtcaaacccctgccttctccagacactgatgtccctttgtcctcagttgagattgagaaccccgagacatctgaccagtag

SEQ ID NO: 118821 - DNA, 414 bp, synthetic construct
  misc_feature 1..414: note = Description of Artificial Sequence: Synthetic coding sequence
  source 1..414: mol_type = other DNA
atgtacggtaaaattatcttcgtgctgttacttagcgaaattgtcagcatctcagctctttctaccacagaggtagcaatgcacacaagcacaagctccagtgtgactaagagttatatctcatctcagaccaacgacacccacaagagggatacatacgccgccacaccccgggcccatgaggtgtcagaaatttccgttcggaccgtctacccacctgaagaggagaccgagattacactcataattttcggtgttatggcaggcgtgattggtacaattctcctgatcagttacgggattaggaggctgataaagaaaagtccaagcgacgtaaaaccacttccaagtcctgatactgatgtacctttgtccagcgtcgaaatcgagaaccccgaaaccagtgaccaatag

SEQ ID NO: 118822 - DNA, 258 bp, synthetic construct
  misc_feature 1..258: note = Description of Artificial Sequence: Synthetic coding sequence
  source 1..258: mol_type = other DNA
atgtatggcaagattatatttgttttactgctcagcggggagagagtgcagcttgcccaccatttttctgagccggaaataacgcttataatctttggtgtgatggccggggtgatcggcaccatcttgctgatatcctatggcatcaggaggttaataaaaaagagcccttctgacgtgaagccacttccgagcccagatacagacgtccccctgtccagtgtggagatcgagaatccagagacgagcgaccagtag

SEQ ID NO: 118823 - DNA, 375 bp, synthetic construct
  misc_feature 1..375: note = Description of Artificial Sequence: Synthetic coding sequence
  source 1..375: mol_type = other DNA
atgcacacttctaccagctcctctgtcactaagtcttatatctcttcacagactaatgatacccataagcgggatacatacgccgcaacccccagagcacacgaggtgtccgagattagtgtgcgaaccgtttaccctccggaggaggagactggagagcgggtgcaattggctcatcacttcagtgagcctgaaatcactctgatcatttttggcgtcatggccggggttatcgggacaatcctgctcattagttacggcattcgtagattgataaaaaagtctccctctgacgtcaagcctctgcccagtccggatacggatgtacctctctcgtcagtcgaaatagagaatcccgaaacatcagaccagtag

SEQ ID NO: 118824 - DNA, 276 bp, synthetic construct
  misc_feature 1..276: note = Description of Artificial Sequence: Synthetic coding sequence
  source 1..276: mol_type = other DNA
atgtatgggaaaataatttttgtgttactgctgtccgagatagtgtccatcagcgctttaagtactactgaggttgcaatgcacacatcaacctccagttcagtgacaaagtcttacatatcctcacagaccaatggagaaactggccaactcgtccatcgctttacagtacccgcccctgtggtcatcatccttataatcctgtgcgtcatggctggtatcataggcacaattcttcttatatcatactcgatccggcggctcattaaagcttag

SEQ ID NO: 118825 - DNA, 276 bp, synthetic construct
  misc_feature 1..276: note = Description of Artificial Sequence: Synthetic coding sequence
  source 1..276: mol_type = other DNA
atgtacgggaagattattttcgtgctcctgctgtctgagatcgtgtccattagtgcgctgagcacgacggaagtggctatgcacactagcacatcaagcagtgtcacgaaatcatacatatcgtctcagacgaacggagagactggacaactcgtacacagattcacagtgcccgcgcctgttgtcatcattctgataatcctgtgcgtcatggccggaatcatcggcactattcttctgatctcctacagcatccgtagactgataaaggcatag

SEQ ID NO: 118826 - DNA, 177 bp, synthetic construct
  misc_feature 1..177: note = Description of Artificial Sequence: Synthetic coding sequence
  source 1..177: mol_type = other DNA
atgtacggtaagattatcttcgtgctgctgttgtccggcgaaaccggtcaactggtccatcggttcaccgtccccgctcctgtcgttataatcctgatcatactctgcgtcatggcaggaattattgggacgatactgctgatttcgtatagcatccgtaggctgattaaggcctag

SEQ ID NO: 118827 - DNA, 387 bp, synthetic construct
  misc_feature 1..387: note = Description of Artificial Sequence: Synthetic coding sequence
  source 1..387: mol_type = other DNA
atgtggtcgacaagaagcccaaacagcacagcatggcctttgtcactggagcctgatcctggcatggcttccgcatctactaccatgcatacaacgacaatcgccgagcctgaccctggtatgtcagggtggcctgatggacggatggagacgagcacccccacgataatggatatagtggtgattgctggggtgattgctgctgtcgcgatagtccttgtgtcactgctattcgttatgctcaggtacatgtatcgtcataaaggcacatatcacaccaatgaggcaaaagggactgaattcgccgagtcagcagacgccgctcttcaaggtgaccccgctctgcaggacgctggagactcctctcggaaggagtactttatatag

SEQ ID NO: 118828 - DNA, 324 bp, synthetic construct
  misc_feature 1..324: note = Description of Artificial Sequence: Synthetic coding sequence
  source 1..324: mol_type = other DNA
atggcctccgcaagtacaacaatgcacactaccactattgcggaacctgatcctggaatgtcaggatggcctgatgggaggatggagacgtcaaccccaacaatcatggatatagtggtgatcgcgggagtgatcgcggccgtcgccatagtcctggtgtctctgctctttgtgatgctgagatacatgtacaggcacaaaggcacctaccacaccaatgaggcaaagggaaccgagttcgccgagagtgcagatgccgccctgcagggagacccagcattgcaagacgcaggagactcgtcgcgcaaagaatacttcatctag

SEQ ID NO: 118829 - DNA, 330 bp, synthetic construct
  misc_feature 1..330: note = Description of Artificial Sequence: Synthetic coding sequence
  source 1..330: mol_type = other DNA
atgtggtcaacaaggtcccccaactccaccgcgtggcccctgtccttggaacctgaccccggaatgtctgggtggcccgatgggagaatggagacctcaactcctacgattatggacattgtggtaatcgcaggagtgatcgctgccgtcgccatagttctcgtgagccttttgtttgtaatgttacgatatatgtacagacataaaggaacttaccacacaaatgaggcgaagggaaccgagtttgcggagtctgcagacgccgccttacagggcgaccccgccctgcaggatgcgggcgatagtagccggaaggagtattttatctag

SEQ ID NO: 118830 - DNA, 237 bp, synthetic construct
  misc_feature 1..237: note = Description of Artificial Sequence: Synthetic coding sequence
  source 1..237: mol_type = other DNA
atgtacgggaaaatcattttcgtgctcctgttgtccggcatagtgtctatcagcgcctcttctacaacgggtgtggctatgcatacgagcaccagtagttcagtcaccaagtcttatatcagcagtcagaccaacggcattacgctgatcaactggtgggcgatggctagagtgatctttgaggtgatgcttgttgtggtgggcatgatcatcttaatctcatactgtattaggtag

SEQ ID NO: 118831 - DNA, 168 bp, synthetic construct
  misc_feature 1..168: note = Description of Artificial Sequence: Synthetic coding sequence
  source 1..168: mol_type = other DNA
atgtacgggaagataatattcgtgctgctgttgagcgggattgtgagtatctccgctagtagcacgaccggcgtggcgatgcatacaagcacttccagttccgtcaccaaaagctacatttcttcccagaccaacggggagcgcggccagttggttcatcgcttctag

SEQ ID NO: 118832 - DNA, 237 bp, synthetic construct
  misc_feature 1..237: note = Description of Artificial Sequence: Synthetic coding sequence
  source 1..237: mol_type = other DNA
atgtatgggaaaattatatttgtgctgttgttgagtgggattgtgagtatctctgcctcttcaacaaccggcgtggccatgcacacatccacttcttctagtgtaaccaagagctacatctcatctcagacaaatggcataacacttatcaactggtgggctatggcaagagtcatcttcgaggtaatgctagttgttgtgggtatgatcatcctcatctcctattgtatcaggtag

SEQ ID NO: 118833 - DNA, 180 bp, synthetic construct
  misc_feature 1..180: note = Description of Artificial Sequence: Synthetic coding sequence
  source 1..180: mol_type = other DNA
atgtacgggaagatcatattcgtgctcctccttagtggtatcgtaagcatttcagcctcatcaaccactggtgtggccatgcacacgagtacgagctccagtgtcactaagtcttatatttcaagtcagacgaacggctgcgtgatcggtaacataatttgtagcgacaaaagtaagtag

SEQ ID NO: 118834 - DNA, 1605 bp, synthetic construct
  misc_feature 1..1605: note = Description of Artificial Sequence: Synthetic coding sequence
  source 1..1605: mol_type = other DNA
atgcctcacttgatggagaggatggtcgggtcaggccttctgtggctggcgctggtttcatgcattctgacacaggcatcagccgtccagcggggatacggcaatccaatcgaagcgagtagttacggcctggatctggattgtggcgctccaggtacgccagaggcgcacgtatgcttcgatccatgccagaactatacactgttggacgaacctttccggtcaacggagaattctgcagggagccagggctgcgacaagaatatgagcggctggtataggttcgtgggcgaaggtggcgttcggatgtcagagacctgtgtgcaggtccatcgctgccaaacagacgcaccaatgtggctcaacggcacccatccggctttaggcgatggaatcaccaaccacacagcgtgcgcacattggtccggcaactgctgtttctggaagacagaagtcctcgtgaaggcttgcccaggcggataccacgtgtacagactcgagggcaccccttggtgcaatctgcggtactgtactgacccaagtactgtcgaggacaaatgtgagaaggcatgtcgtccagaagaagaatgcctcgcactcaactctacttggggctgtttctgtcgtcaagacttgaatagcagtgacgtgcactctctccaaccgcagcttgattgtgggccgcgagaaattaaagtcaaagtcgacaagtgcttgctgggcgggctgggtctgggggaggaggtgatcgcatacctgcgagatcctaactgttccagcatcctgcaaaccgaagaaagaaactgggtgtctgtgacaagtccggttcaagcaagcgcatgtagaaatattctggaaagaaatcagacacacgctatttacaaaaatacactttccctggtgaatgacttcataatcagagatacaatacttaatattaattttcaatgtgcatacccacttgatatgaaagtatcactgcaagcggctctgcaaccgattgtgtcttccttgaacgttagcgtcgacggcaatggcgaatttatcgtacggatggccctgttccaggaccaaaattacaccaacccgtacgagggggacgcagtcgagctcagcgtcgagtcagtcctgtacgtgggagcgatcttggagcagggcgacaccagccggttcaacttagtactccgcaactgttatgcaactccaactgaggataaagcagacctggtcaaatattttataatacgaaattcatgctccaatcagcgcgactctaccatacacgtggaagagaatggccagtccagtgagtccaggttctcggtgcaaatgtttatgttcgccggccactacgatctcgtgtttctgcactgcgagattcacctatgtgatagcctgaacgaacagtgtcagccatcctgtagccgtagccaggtgcggagtgaggttccagcaattgatctggcgagagttctagacttggggcccatcactcggcggggcgcccagagtccaggagtgatgaacggaaccccgtccactgctggatttctcgtggcctggccaatggttctcttaaccgtgctgctggcctggctgttttag

SEQ ID NO: 118835 - DNA, 1164 bp, synthetic construct
  misc_feature 1..1164: note = Description of Artificial Sequence: Synthetic coding sequence
  source 1..1164: mol_type = other DNA
atgccccacctgatggagagaatggtgggctccggtctgctgtggctcgctcttgtaagctgcatattaacacaggccagcgcagtccaacgcgatcccagcacggtcgaggacaagtgtgagaaggcttgccggcccgaggaggaatgtctggcgctcaacagtacgtggggatgtttctgccgccaggatttaaacagctctgacgtgcattccctacagccccagctcgactgcgggccccgcgaaataaaggtaaaagtggataaatgcttactcggcggactgggtttaggtgaggaggtcattgcctacctccgcgaccccaactgttcctctatacttcaaactgaggagaggaattgggtgtccgtcacgtcaccagtgcaagcctcagcgtgcaggaacattttagaacgtaatcagacccacgctatctacaaaaacacactgtccctggtcaacgacttcataatacgagacacgattctgaatatcaactttcagtgcgcttatccgttggacatgaaggtctccctccaagcagccctgcagcctattgtgtcaagcctcaatgtgagtgtcgatggaaacggagaatttatcgttcgcatggccttattccaggatcaaaattataccaatccttacgagggcgatgctgttgaattgtccgtcgaatctgtcctctatgttggtgccatattagagcaaggggataccagtagattcaacctggtgctgcggaactgttacgcaactcctaccgaggataaagctgatcttgtaaagtacttcattattagaaatagctgctcaaatcagagagactccacaatacatgtggaggaaaacgggcaatcctcagaatcacgcttttccgtccagatgtttatgtttgcaggccactatgacttggtctttctgcactgtgaaatccatctttgtgattcacttaacgagcagtgccagccttcatgctccagatcccaggtacggtcagaagtcccagctatcgacctggcccgagttctggatctggggcccataacccggaggggagcccaatccccgggcgtgatgaacggcacccctagtacagccggatttctagtggcttggccaatggtgctcctgacagtactactggcctggttgttttag

SEQ ID NO: 118836 - DNA, 1173 bp, synthetic construct
  misc_feature 1..1173: note = Description of Artificial Sequence: Synthetic coding sequence
  source 1..1173: mol_type = other DNA
atgccgcatctgatggaacgcatggttggctcggggctcctgtggctggccctcgtatcatgcatcctcacccaggcgagcgcagtccagagggtgcctagagaccctagtacagttgaggataaatgcgaaaaagcctgccggccagaagaggagtgtttggctcttaatagcacctgggggtgcttttgccgtcaagatctcaacagttcagacgttcatagtctgcagccacaactggactgcggtccccgggagattaaagtcaaagtggataaatgcttactaggcggcctcgggttaggcgaggaagtgatagcttatttgcgggaccctaattgctccagcattcttcaaacagaggagcgcaattgggtctcggtgactagtcctgtccaggcaagcgcttgtagaaacattctcgagaggaaccaaacacacgcaatttacaaaaatacattatccttagtcaatgatttcataataagagacaccattttgaacattaatttccaatgcgcttaccctttagacatgaaagtctctctgcaggccgctctgcaacctatcgtctccagcctcaatgtctccgtcgacgggaacggagaattcatcgtccggatggccctcttccaggatcagaactatacgaatccctacgagggagatgcggtcgagctgagcgttgagtctgtgctatatgtgggtgctattctcgagcagggcgatacctccagatttaacctggttctccgaaactgttacgcaactcccactgaggataaggcggatctagtgaagtacttcatcataagaaactcatgctccaaccagagagattccaccatccacgtggaggagaatggtcaatcatcagagtctcgcttctccgtccagatgttcatgtttgccggacactatgatttagtctttctgcattgtgagattcacctttgcgacagtttgaacgagcagtgccagccttcctgctcccggtcacaggttcgaagcgaagtgcccgcaatcgacctggcacgcgtgcttgacttgggccccattacccggcgcggagctcagtctcctggcgttatgaatggcaccccttccacggctgggtttctcgtagcttggccaatggtcctgctgacagttctgttggcatggctcttctag

SEQ ID NO: 118837 - DNA, 1614 bp, synthetic construct
  misc_feature 1..1614: note = Description of Artificial Sequence: Synthetic coding sequence
  source 1..1614: mol_type = other DNA
atgccccatctaatggagagaatggttgggtcagggctgctgtggttggctctggtctcttgcatcctgacccaggctagcgccgtacagcgaggatacggcaaccccatagaggcctctagttatggacttgatttggactgcggcgcccccggcacgcctgaagcccacgtctgttttgatccctgccaaaactatacccttttggacgagccattccgctctacggaaaatagcgctggttctcagggttgtgacaagaatatgagtggctggtacagattcgtaggagagggcggagtacggatgtctgagacctgtgtccaggtgcacagatgccaaacagacgcaccgatgtggttgaatggcactcatccggcactaggagatggaattaccaatcacacagcatgtgctcattggtctggcaactgttgtttctggaaaacagaggtgcttgtgaaggcctgccctggggggtatcacgtgtaccgcctggaaggtactccatggtgcaacctgagatactgtacagttcctcgggatccatccacggtggaagacaaatgcgaaaaggcatgccggcctgaagaagagtgcctggcactgaacagcacttgggggtgtttctgcaggcaggatctcaattcgtccgacgtccattcactgcaaccacagctggactgcggcccccgtgagatcaaagtgaaggtggacaagtgtttgttggggggactcgggctgggggaagaagtcatagcgtacctcagagacccaaactgtagctccattcttcagactgaagaaagaaactgggtgagtgtaaccagccctgtccaagcttccgcttgtcgtaatatcctggagcgtaaccaaacccatgcaatctacaagaacacactcagcctagtgaatgatttcattatcagggatacaattctcaacatcaatttccagtgtgcctatcccctcgatatgaaggtgagcctgcaggccgctctgcagccaatagtctcttcacttaatgtgagcgtcgatggtaatggagagttcatcgttagaatggccttgtttcaagatcagaattacaccaacccctacgagggcgacgcagttgaacttagcgtagagagcgtgctgtacgtaggggcgatcttggaacagggggataccagcagattcaacttggtgctcagaaactgttacgccacacccactgaggacaaggcggacttggtaaaatacttcataattcggaacagctgttcgaaccaaagagactcaactatccacgttgaggaaaatggacaaagcagcgagtcccgcttctctgttcaaatgttcatgtttgcaggccattatgaccttgtgtttctacactgcgagatccatctctgcgacagtctcaacgagcaatgtcaaccaagctgttctcgctctcaggtccgttcagaagtacctgcaatagacctggctcgagttctcgatctgggacccattacccggcggggagcacaaagcccaggggttatgaatgggacaccctccaccgccgggtttttggtggcttggcccatggtgctcctcaccgtgttactcgcctggctcttttag

SEQ ID NO: 118838 - DNA, 1548 bp, synthetic construct
  misc_feature 1..1548: note = Description of Artificial Sequence: Synthetic coding sequence
  source 1..1548: mol_type = other DNA
atgaagataaagtgcgagaagagccggacacagtcatcagcacagcatgttcagcactctgcccactcgacaattgtatgccgcaaacatagccacaatgccgaaacagctggccgtgtggatattgtcagaggcggccccttttttcatcatccactgcggaagtggctgatctctccacccttgaacaaaccctccgtgtggcctcggactccaatcatacccgtccaccagctgaggagagatacctgggtcggcaattgcaacaagaagactgcccatagcaggctccattcccacggatggccagaggaagagcggtttgtgttttcctccgagctgcacggtaaaagcgcatattcaaaggtgacatgtatgccccatctcatggagcggatggtaggttcaggcctcctgtggcttgcgctcgtctcttgcatccttactcaggccagcgctgtgcagagagaccatctggacccctccaccgtcgaagataagtgtgagaaagcttgcaggccagaagaggagtgccttgctctgaacagtacatggggttgtttttgccgtcaagacctgaactcctctgacgtacattcactacagccccagctcgattgcggtcctagagaaattaaagttaaggtggacaagtgtctgcttggcggcctgggtctcggagaagaggtgatcgcctacctgcgggatcccaattgctccagcattttacaaaccgaggagaggaattgggtgtcagtgacatctcccgtgcaggcctccgcatgccgaaacattttggagcgaaatcaaacccacgctatctataagaacactctcagtctagttaacgacttcatcatccgagacacaatcttaaacatcaatttccagtgtgcctaccccctggacatgaaggtgagtctccaggctgcccttcagccaatcgtgtccagcttgaatgtcagtgtagatggaaacggtgagtttattgtgcgcatggccctctttcaggatcaaaattatacgaacccatacgaaggcgatgcagttgagctgtctgtcgagtccgtgctttatgtcggagcaattctggagcagggcgacaccagcaggtttaacctggtactgagaaattgctatgccacccccactgaagataaggccgacctggtgaagtacttcatcattaggaatagctgtagcaatcaacgggattctaccattcatgtggaggagaacggccagtcctctgaaagtagattttccgtacaaatgttcatgttcgccggacattacgatctcgtttttctccactgtgagattcacttatgtgacagcctcaatgagcagtgccaaccatcatgctcgcgttcgcaggttcgtagtgaagtgcctgcaattgacctggcccgcgtacttgatctcggccccattacaagaagaggtgcgcagtcccccggcgtgatgaacgggaccccttcaaccgctggattcctggtcgcttggcctatggtactcctgacagtgctgctggcgtggctgttttag

SEQ ID NO: 118839 - DNA, 1959 bp, synthetic construct
  misc_feature 1..1959: note = Description of Artificial Sequence: Synthetic coding sequence
  source 1..1959: mol_type = other DNA
atgcccctgttgctcctgcttttgctgctaccttccccactccatccacaccctatttgcgaagtgagtaaagtcgcttcgcacctggaggtgaactgtgacaagcgtaacctcactgccttacctccagacctcccaaaagacactacaatcttgcacttgtccgaaaatctgctttacactttttccctggctactcttatgccctacacccgattgactcagctcaacctcgataggtgcgaactgaccaaacttcaggtggatggcaccttgccagttcttggcacgctggatctctctcacaatcagctgcaatccctgccattgctcgggcagaccctgccagcattgactgtcctggatgtgtcattcaaccgactaacttccctccccttaggtgctctgcgcggtctgggggagctgcaagaactgtatctgaaaggcaacgaactgaaaaccctgcctcctggcctgctgaccccaacccctaaactggagaaactgtcccttgctaacaataacctgacagagcttcctgccggactcctcaatggactggaaaacctagataccctgttattgcaggaaaattcactgtacactatccccaagggattttttggctctcatttgctgcccttcgcgttcttacacgggaacccttggctctgcaattgtgagatcctatattttcgccgatggctccaagataatgctgagaacgtatatgtgtggaaacagggggtggatgtgaaggccatgacctccaacgttgcctcagttcagtgtgataattctgacaagtttccggtgtacaagtatccaggaaagggctgccccacccttggcgacgagggcgacaccgacctctatgattattaccccgaggaagacaccgagggtgataaggttagagctacacgaaccgtggtgaagttccctaccaaagcgcataccacgccatggggcctcttctattcatggtcaaccgcgagccttgatagtcagatgccttctagcctccatcccacacaggagtctacaaaggagcagactacttttcctccgaggtggacccctaactttaccctgcatatggagagcatcacctttagcaagactccgaagtccactaccgaacccaccccttcccctaccaccagcgagcccgtgccagaacctgctcccaacatgacaactctggagcctacaccatcgcccaccacgcccgagcccacctcagagcccgcaccctctcctactaccccagaacctacttcagagcccgctccgtctccgacaacacccgagcccaccagtgagccggctccctcaccgacaactcccgagcccacacccatcccaacgattgctacctcacctaccatactggtctcagccacttctctgatcacccctaagtccacatttctcaccacgactaagccagtatcccttctcgaatcgaccaaaaagactatacctgagcttgaccagccgccgaaactgaggggtgtgctacagggtcatctcgaaagttccaggaatgatcccttcctacatcccgacttctgctgtctgctccccctgggcttttacgtgctcggattgttctggttgctatttgctagtgtcgtgttgatcctactcctgtcttgggtgggccatgtgaaaccccaggcattggatagcgggcagggggccgccttaaccacggcaacccaaacaacacacctggaactccagcgcggacgccaagtgaccgtgcctagggcgtggcttctgtttctcagaggaagtctaccaacatttcgctcctcactgtttctttgggtccggccgaatggtcgcgtaggtcctctggtagctggaagaaggccatctgcgttgagccaaggtaggggacaggacctcttgtccacagtgtcaatcagatattctgggcatagtctgtag

SEQ ID NO: 118840 - DNA, 1881 bp, synthetic construct
  misc_feature 1..1881: note = Description of Artificial Sequence: Synthetic coding sequence
  source 1..1881: mol_type = other DNA
atgcctttgctgctgttactgttacttctcccctccccactgcatccccacccaatttgtgaagtctccaaagtggctagtcacttggaagtgaactgcgacaagagaaatctgaccgccctgccccccgatttgccgaaagatacgaccattctccatctcagcgaaaacctcctttacacgttttcgttggccactttgatgccatacactcgcctcacccagttgaacctcgacagatgcgagctgacgaagctgcaggttgatgggaccctgcccgttctcggaactcttgaccttagtcataaccagttacagtctttacccctgctagggcaaaccctgccagctctaacagtgcttgatgtgagcttcaatcgccttacatcgctgcccctgggcgcgttaagaggcttgggggagctccaggagttgtacctgaaaggcaacgaactcaagacacttccccccggcttgctgacaccaaccccaaaactggaaaaactgagcctagcgaacaataatttgacggaattgccggccggtctcctgaacggcctggaaaatcttgacactctgttactccaagagaattcactgtataccattcctaaggggttttttggtagtcacttgcttccttttgcattcctccatggtaatccctggctgtgtaattgtgaaattctgtacttccgacgctggctccaagacaatgccgagaatgtatatgtctggaagcagggggtggatgttaaagcaatgacttctaacgtcgcgagcgtgcagtgcgataactctgacaaattccctgtgtacaagtacccggggaaggggtgccctaccctcggagacgaaggcgacacagacctgtacgattactatcctgaggaagataccgaaggagacaaagtccgggccactcggactgttgtgaaatttccaacaaaagcccacaccactccgtggggcttgttttattcctggtctaccgcctctctggactctcagatgccttcaagcctgcacccgactcaagaatctaccaaggagcaaaccaccttccctcccagatggacaccgaacttcaccctccacatggaatcgattaccttcagtaagacccccaagtcgacaacagagccaacgcccagtcctacgacttccgagcccgtgcccgagcccgcacccaacatgactactctagaacctacacccagtcctactaccccggagcctacctctgagcctgcacctagccctacaacaccagagccaacccccatccctaccatcgcaacatcccccaccattcttgtttcagctacatctctgattacgcccaaaagcactttcttaaccaccacgaagcctgtctccctgcttgagagtaccaagaagactataccggaactcgaccagccaccaaagctccggggtgtgctgcagggtcacttggagtccagcagaaacgatccctttctgcatccagacttttgctgtctgttgcctctggggttctacgtcctgggcttattttggctcttgttcgctagcgttgtactgatactccttctctcttgggttggtcacgtgaaacctcaggcgctcgacagcggacagggcgctgccctgacaacagcgactcagactactcatctggagctgcagagggggcggcaggtaaccgtgcctagggcatggctgctttttttaagggggtcgctgcctacctttcgcagttcactgtttctgtgggttcggcctaacgggcgcgttggtcctcttgtggcagggagacgtccaagcgcgctttcacagggtcgggggcaagatcttctcagcaccgtgagtatccggtattcaggccactcgctctag

SEQ ID NO: 118841 - DNA, 621 bp, synthetic construct
  misc_feature 1..621: note = Description of Artificial Sequence: Synthetic coding sequence
  source 1..621: mol_type = other DNA
atgggcagcggtccaagaggagccctcagtctgctcttattactgttggcacctcctagtcggccagcggccggctgccctgctccttgctcgtgcgcaggcaccttagtagactgtggccgcagaggactcacttgggccagccttcccaccgccttcccagtggatacgacagaattggtgctgacagggaacaacctgacggcgttgccccctgggctcttggacgccctgcccgcactccggacggctcacctgggggctaacccctggcggtgcgactgccgactagtgcctttgcgcgcttggctcgcgggccgccctgagcgggccccttatcgtgaccttcggtgtgtcgcgccgcccgcactgcgtggacgcctcctcccttacctcgcagaggacgagttacgggccgcgtgcgcccctggtccactctgctggggggcactggcagctcagttagccctgctgggattggggttgctgcatgccttattacttgtcctactgctgtgccgtctccggaggttgagggctcgcgcacgcgcccgtgccgccgcacgcttatcactcactgatcccctggttgccgaacgtgcggggaccgacgagtcttag

SEQ ID NO: 118842 - DNA, 1230 bp, synthetic construct
  misc_feature 1..1230: note = Description of Artificial Sequence: Synthetic coding sequence
  source 1..1230: mol_type = other DNA
atgataccgtccaggcacaccatgctccgattcctgccagtcaacgccgcttcctgcccaggggacaggcgtaccatgcttgttaatgtggctgctggggtgcgtgtgttacgagttcccctgagggccggcgggtctggctctctgtccggtttgcggccacccgctattgtttgttacctaccgcttcaaagagcctctgcttcaggcctgttccttgctagacctcaacattgcggccgctgcggacgaggccggggaggtgctgcactcagcttggggagtcccgcctacgcctcgaggtgtcgcgtatcacgggcagcagttttctccccctgggcccccgtttccctagagagcggtcgtgcccccggttgcagccttggtcgcccggggcttcggggggctctggtagtttggctgcaactgggggagacctgggtccggctgagaggcgatttccagcctgcttgtggtgttgttagagtcgaacggttggctggctaccgcgacgctgggcaccaagggcttgacggagccgggcccgccgtctgggttctaagagacgtcgctcaagtgcctgccgaccgaagcgcctactgcggcgcctccctggccggtccacgcggagcgctctccttgttgttgctcctgttagctccaccgagtcgtcccgccgctgggtgtcccgctccctgctcatgtgccggtacattggtggattgtggaaggaggggcctgacctgggcaagtctccctacagccttccccgtagacaccaccgagctagtcctaaccggcaacaatctgactgctttgccacctggtctgctggatgctctgcccgccctgaggacagcacacctgggcgctaatccgtggcggtgtgactgtagattggtgccattgcgggcgtggctggctggaaggccagagagggctccttatcgcgacctcagatgtgtggcccctcctgctctccgtggacggcttcttccatacctcgccgaggacgagctcagagcagcttgtgcacccgggccgctgtgttggggcgctctggccgcccagctggctttgttaggtctcgggctcttgcacgctctgttactggttctgctcctctgcaggctacgcaggttgagggctagggctagagcaagagctgccgccagactcagtttgacagacccactggtcgctgagagggctgggactgatgaatcttag

SEQ ID NO: 118843 - DNA, 534 bp, synthetic construct
  misc_feature 1..534: note = Description of Artificial Sequence: Synthetic coding sequence
  source 1..534: mol_type = other DNA
atgcccgcctggggcgcccttttccttctgtgggctaccgctgaggctacgaaggactgccccagcccctgcacgtgccgagcactggagactatggggctgtgggtggactgtagaggccacggtctaaccgctctccctgccctgcctgcgcgcacaagacatctgctcctggccaataatagcctgcagtcggtgcccccaggggcgttcgaccacctccctcagctgcagacacttgacgtcactcagaatccttggcactgcgattgtagcctgacctatctacggctgtggctggaggataggacacccgaagctttgttgcaggtgaggtgtgcctccccgtctctcgcagcacacgggcccctaggtaggctgactggttaccaactgggctcttgcggatggcaactccaggcctcatgggttaggcccggggtgttatgggatgtcgcccttgttgcagttgcggctttgggcctggccttgctcgcagggctcttatgcgctacgactgaagcactggattag

SEQ ID NO: 118844 - DNA, 987 bp, synthetic construct
  misc_feature 1..987: note = Description of Artificial Sequence: Synthetic coding sequence
  source 1..987: mol_type = other DNA
atgaagccagctatggagaccgctgctgaggaaaacactgagcagtcgcaggagaggaaagtcaactcaagagccgagatggagattgggcgctaccattggatgtacccaggctctaaaaaccaccagtaccacccagtgccaacgcttggcgacagagcttcccctctgagtagtccaggttgcttcgagtgttgtatcaaatgccttggaggcgtgccctatgcaagcttggtcgctactattctgtgcttctcaggcgtagcccttttctgtgggtgcgggcacgtcgcactggccggtactgtcgccattctcgagcagcatttcagtacaaacgccagcgatcacgctctcctgtctgaggtgattcaactcatgcagtacgtgatctatggtattgcctctttcttctttctatatggcattattttgttggccgaagggttctatacgacatcagccgtgaaggagcttcatggagagttcaagacaacggcttgcggacgctgcattagtggaatgtttgtgttcctgacatacgtgctgggagtggcctggttaggcgtgtttgggtttagcgctgtgcccgtgtttatgttctataatatatggtccacctgtgaggtgattaaaagcccccagaccaatggcacaacaggggttgagcagatctgcgtagacattcgccagtacggcatcatcccttggaatgcttttccaggtaaaatctgcggctccgccctcgaaaacatctgcaatactaatgaattctacatgagttaccacctgttcattgttgcctgcgctggagctggcgccacggtgattgccctcatccatttcctaatgatcctatcaagcaattgggcctacctgaaagacgcaagtaaaatgcaggcctatcaagatataaaggccaaagaggagcaggaactccaggatattcaaagcaggagtaaagagcagctgaacagctacacttag

SEQ ID NO: 118845 - DNA, 918 bp, synthetic construct
  misc_feature 1..918: note = Description of Artificial Sequence: Synthetic coding sequence
  source 1..918: mol_type = other DNA
atgaaacctgctatggagactgccgccgaggagaacaccgagcagtcccaggaaaggaaggtgaacagccgcgccgaaatggaaatagggagatatcattggatgtacccagggtctaagaatcaccagtatcaccccgtccccacactgggagaccgggcaagcccgctgagttctcccggatgctttgaatgttgtatcaagtgtctcggcggagtcccctacgcctctttggtcgcaacaattctgtgttttagcggcgtggctctattttgtggatgtggacatgtggcattggcggggacagtggccattttagagcagcacttttccaccaatgcttccgaccacgctctgctcagcgaggtgatccagctgatgcagtacgtcatttacggaattgcatcttttttctttttgtacgggattattctgctggcggagggattctataccactagcgcggtcaaggaattgcatggcgaatttaagacgacggcatgtggcaggtgtatcagcggaatgtttgtcttcctgacatacgttttgggggtggcctggctcggggtgtttggcttcagcgccgtccccgtattcatgttttacaacatttggagcacgtgcgaggttatcaaaagcccgcagactaacgggaccacgggtgtggagcagatctgtgtggacatccgccagtatggcatcatcccatggaatgccttcccaggtaagatttgcgggagcgcgcttgaaaacatttgcaacaccaacgagttttacatgtcctaccatctgttcattgtggcttgtgctggagccggagcaaccgtgattgctctcctcatatatatgatggccaccacatacaactacgcggtacttaagtttaagtctcgagaggactgctgtactaaattttag

SEQ ID NO: 118846 - DNA, 798 bp, synthetic construct
  misc_feature 1..798: note = Description of Artificial Sequence: Synthetic coding sequence
  source 1..798: mol_type = other DNA
atgaagcctgctatggagaccgccgcagaagagaacacagaacaatcccaggagagaaagggctgtttcgaatgttgcataaagtgtctgggcggtgtgccgtacgcatcgctcgtggcgaccattctgtgtttcagcggggtggctctgttttgcggttgcgggcatgtagccctggcagggaccgtggcgattctcgagcaacatttcagtaccaatgcgtccgatcacgccctactgagcgaggtgatacagctcatgcagtacgtgatctacggaattgcctcattcttttttctatacggaatcatcttactggctgaaggtttctacaccacctcagcagttaaagaactccacggcgagttcaaaaccacagcatgcggtagatgcatttccggcatgttcgtctttctcacatacgtcctcggcgtcgcttggttgggagtattcgggttcagtgccgtgcccgtgttcatgttctacaatatatggtcaacatgtgaggtgataaagtcacctcagacaaatggaactaccggagtcgagcagatctgcgtggatattaggcagtacggaattataccatggaatgcctttcctgggaagatttgtggctccgccttggagaacatatgtaacaccaatgagttctacatgagttatcatctctttattgttgcttgcgctggcgccggcgccaccgtgattgctctgctgatatacatgatggcaaccacctataactatgcggttttgaaatttaaatctcgagaggactgttgtacaaagttttag

SEQ ID NO: 118847 - DNA, 540 bp, synthetic construct
  misc_feature 1..540: note = Description of Artificial Sequence: Synthetic coding sequence
  source 1..540: mol_type = other DNA
atgcagtacgtgatttacggcattgcctcttttttcttcctatacggcattatcctgcttgctgagggcttttacacaaccagcgccgtgaaggagcttcacggcgagttcaagacaactgcctgtggccgctgtatatctggcatgtttgtgtttctgacctacgtgttgggcgtggcctggttgggtgtcttcggatttagtgctgttcctgtattcatgttttataacatttggagcacctgtgaggtaatcaaatcgccacagaccaatggcactacaggggtcgaacagatttgtgtggacatcagacaatacggtatcataccttggaacgccttcccaggcaaaatttgtggcagcgcccttgagaacatatgtaacaccaacgaattttacatgagttaccacctttttatagtagcctgcgccggtgccggagctacagtcattgccctgctcatatatatgatggccacgacgtacaactatgccgtcctaaaatttaagagtagggaagactgctgcaccaagttctag

SEQ ID NO: 118848 - DNA, 741 bp, synthetic construct
  misc_feature 1..741: note = Description of Artificial Sequence: Synthetic coding sequence
  source 1..741: mol_type = other DNA
atggggtgctttgagtgttgtattaagtgtcttggcggcgtcccgtacgcctctttagtggcgaccatactttgtttcagcggcgtggccttgttttgcgggtgcgggcacgtggcactggccggaacagttgccatattggagcaacacttctcgacgaacgcttcagatcacgcacttcttagcgaggttatccagcttatgcagtacgtgatctacggcatcgcttctttcttttttctttatggtatcatcctgcttgcggaaggtttctatacaacttctgccgtcaaagagctacatggcgaattcaagacgactgcttgcggccgctgtatctccggtatgtttgtcttcttgacttacgtgttgggggttgcgtggctaggcgtttttggtttcagcgcagtcccggtgttcatgttctacaacatctggtctacttgcgaagtgattaagtcccctcagactaatggcaccaccggcgtggaacagatctgtgttgatatcagacaatatgggatcatcccatggaacgccttcccgggtaaaatctgtgggagcgctctggagaatatatgcaacacaaacgagttctacatgtcataccatctgttcatcgtggcctgcgccggggctggggccaccgtgatcgcactgctgatctacatgatggctactacctacaattatgctgtcctgaaattcaaaagcagagaggattgctgcaccaaattctag

SEQ ID NO: 118849 - DNA, 324 bp, synthetic construct
  misc_feature 1..324: note = Description of Artificial Sequence: Synthetic coding sequence
  source 1..324: mol_type = other DNA
atgaagcctgctatggagactgccgcggaagaaaacaccgaacaatcgcaggaacgcaaaggatgttttgagtgttgtatcaagtgtcttggtggggtgccgtacgcctcactggtggcgactatcttgtgttttagcggcgtggctctgttttgtggatgcggccacgtcgctctggcaggtactgtggcaatcttggagcagcatttctccactaacgctagtgatcacgcactcctgtccgaagtcatccaactaatgcagtacgttatttacggaattgcttcatttttcttcctatatggtatcatactacttgcctag

SEQ ID NO: 118850 - DNA, 909 bp, synthetic construct
  misc_feature 1..909: note = Description of Artificial Sequence: Synthetic coding sequence
  source 1..909: mol_type = other DNA
atggaaattggacggtatcattggatgtatcccggctcaaagaaccatcaatatcacccggtgcctacgctgggagacagagcctcccccctctcctccccaggatgctttgaatgctgcatcaaatgtctggggggcgttccatatgcatccctggtggccaccattctttgtttcagcggggtcgcgctgttctgtgggtgtggacacgtggcactcgctggtacagtggcaatcctcgagcagcacttctcaacgaacgcttccgaccatgcattactgagcgaggttattcagctgatgcagtatgtcatctatggcatagcatcgttcttcttcctctatgggatcatactgctggccgagggattctatacaacctcagccgtgaaggagctgcatggggaatttaaaactacagcttgtggcaggtgcatctctggtatgtttgtgtttctgacttacgttttaggcgttgcttggctcggggtcttcggattctccgctgtgcccgtttttatgttttacaatatctggtcgacctgcgaggtcattaagtctccccagactaatggcaccactggagtggagcagatctgcgtggatattcggcaatatggcatcataccatggaacgcgtttccaggcaaaatctgtggttccgctttagagaacatttgcaacacaaatgagttttacatgagttaccaccttttcattgtggcatgtgcaggggcaggcgcaactgtgattgccctgattcatttcctgatgatcttaagcagcaactgggcctatctcaaggatgcctctaaaatgcaagcatatcaagacatcaaggccaaagaagaacaggagctgcaggacattcagagccggagcaaagaacagcttaacagttatacatag

SEQ ID NO: 118851 - DNA, 1863 bp, synthetic construct
  misc_feature 1..1863: note = Description of Artificial Sequence: Synthetic coding sequence
  source 1..1863: mol_type = other DNA
atgtccccttctcccaccgctctgttttgtctgggcctgtgcttgggccgcgtgcctgcccagtctggtcctctccccaaaccatccctgcaggctctcccctcttcactggtgcctctggaaaagcccgtgaccctgcgctgccagggaccacctggggtcgacctctataggctggagaagttgtctagcagtaggtatcaagaccaagccgttctgtttatccccgcaatgaaacgatctctcgccggtcgctaccgttgctcgtatcaaaacggctccctctggtctctgccaagcgaccagttggagcttgtggccacaggagtttttgccaagccctctctgtctgcccagccggggcctgccgtgagtagtgggggcgatgttactctccagtgccaaacaagatatggatttgaccagtttgcgctttataaggagggtgatccggccccatacaaaaatcccgaacggtggtatcgcgccagtttcccaattattacggtgacagcagctcatagtggaacgtatcggtgttatagcttcagttccagggacccgtacctctggagcgccccaagtgatcctctggagcttgtcgtgaccggcacctcagttacaccttctcggctacctacagaacccccctccccggtcgctgaattttcagaagcaacagcagaactgacggtgtcttttaccaacgaggttttcaccacggagacttccagaagtatcacagcttcccccaaagagtcagatagtccagcaggcgagtcctgcccacctgtgctgcaccagggccaaccagggccagatatgccccgggggtgtgatcccaataacccagggggagtttctgggcggggcctagcccagcctgaggaggcacctgcggctcagggccagggctgtgcagaggcagcaagcgcgccccccgctcccccagctgatcccgagattaagcggggatctggctggcgccctaccggctgctcacagcctagagtgatgttcatgacagccgagccacaggcccgatcctatccccgtgagggttcctggcacggacgcagactcaaagactggcgtgtgtggtccgtggaggcgggtggacaacggctccagctgtggaagagagggcatgccgctagctcatggtgcagcatccgagaaccttttggacaatgcctctcagtttgtctccctctttgtcttcgcgcaccatctatttgggacgggagaaatctgtggcgtcctcatccacctccttgcacactctggatgacttggtacccaggatggacaacatactggcccctgtcatccacatcactgatctgggcacccgatggttctctccgtttccctgcactccgggtggattccgttccctcgtctgtccaaaatccaccggtgcttccctttggccccttatgcagttgcctggtgttccctcggaatagccacccacatagcatcagccactgtggccttactaatttactgtcaagcctgcggaccggtctagctggcagccttggaatgagtttcatttttctttctgtgaagctggccaggtgccctctcccctttaccctggagaacaaaatcagcctatgcaacatggtgaaaccccatttgtatcagcagaataagaagacccaaaagttggcccgatgcggcggagcaagcttgtactcgcagcagttgcgcggactgagatgggaaaacggactaagcctaggggggcggggatgttccgaactacggtctcaccactgtaccctggcgcgagttaccaaacctgacttcgtttccaaaaatactgggatgaatatgagtattaccctgatttag

SEQ ID NO: 118852 - DNA, 966 bp, synthetic construct
  misc_feature 1..966: note = Description of Artificial Sequence: Synthetic coding sequence
  source 1..966: mol_type = other DNA
atgagcccctcaccaacagccctgttttgtctcggtctgtgtctcgggagagtaccagctcaaagcggacctctgcccaagccaagcttacaggctttgccctcctctctcgttcctctggagaagcccgttacgctcagatgtcaaggacctcccggggtcgacctgtacagactcgagaaactgtcctccagtagataccaggatcaggctgttctgttcatacctgccatgaaacgtagtcttgcaggccgttatcggtgttcataccagaacggtagcctctggtcgctgccctctgatcaactggaactcgtggccaccggagtatttgctaaaccgagccttagcgcccagcccggccctgccgtatcctctgggggagatgttaccctgcagtgtcagactagatatgggtttgaccagttcgctctatataaggagggagatccagccccgtataaaaaccctgaacgctggtaccgagcgtcctttcccatcataactgtgactgccgcccattcgggaacctatcggtgctattccttttcaagcagggacccatacctgtggagcgcccctagcgatccactggagctggtagtgacagagttctcagaggccacagcagagctgacagtatcctttacaaatgaggtgtttactactgaaaccagtcgcagtatcacagccagccctaaggagtctgattcccctgccggaccagccagacaatattatactaaaggaaacttagtccgaatctgcctcggagccgtaattctgattatcctggccggctttcttgccgaggactggcatagcaggcggaagagactacgccacaggggacgggccgtacagcgcccactgcctcccctgccacccctgcccctgactcggaaaagcaacggaggccaggatggaggaagacaagacgttcactctcgaggactgtgctcttag

SEQ ID NO: 118853 - DNA, 1020 bp, synthetic construct
  misc_feature 1..1020: note = Description of Artificial Sequence: Synthetic coding sequence
  source 1..1020: mol_type = other DNA
atgagtccctcccctactgccctgttttgcctaggactgtgtctggggcgcgtaccagcccagagcgggccactgcccaagccttcccttcaggctttgccatctagcttggtgccccttgagaagcccgtgacgcttcgatgccagggacctcccggagtggatctgtatcgcctggagaagcttagttcctcacgctaccaagaccaggccgttctgttcattcccgccatgaaaaggagcctagcaggccgctatcgatgtagttatcagaatgggagcctgtggagtttacccagcgatcaactggagttggtggccaccggagtgttcgccaagcccagtctttccgcacaacctggaccagccgtttctagcggaggtgacgtgaccctacagtgccagaccagatatgggttcgatcaattcgccctctataaggagggtgatcctgctccctataagaatcctgagcggtggtaccgtgcatctttcccaattatcaccgttactgccgcccattctggtacttacaggtgctacagtttcagctcccgagatccttatctgtggtccgcaccgtctgatcccctagaactggtagtcacaggtactagtgttactccctcccggctgcctacagagcctccgtccccagtggcggagttttctgaggccaccgcagagctgacagtgtcgtttactaacgaggtgtttacgactgagacttccaggtcaatcacagcgtcccctaaggaaagcgacagtccagccggccccgctcgacagtactataccaagggtaaccttgtccggatatgtctgggcgccgtgatcttgataatcttggcgggatttttggcggaagactggcacagtcggcggaagcggctgaggcatcggggacgcgccgttcagcgccctctccctccactgccccccctgcctttgaccaggaagagcaatggcggacaagatggcgggcgtcaggatgtccattcacgagggctgtgcagctag

SEQ ID NO: 118854 - DNA, 1866 bp, synthetic construct
  misc_feature 1..1866: note = Description of Artificial Sequence: Synthetic coding sequence
  source 1..1866: mol_type = other DNA
atgggcctgctaagcgatcccgttagacgacgagcgctcgccagattggtgttaagattaaacgcccctctctgtgtcctttcgtatgttgctgggatcgcttggttcttggccctggtgtttcctcctctgacacagcggacgtatatgtctgagaatgctatgggatccacaatggtggaagaacagtttgccggaggagaccgtgcaagggccttcgccagagattttgctgcccaccgaaaaaaatctggggcgttgcctgtggcttggttagagcgaaccatgagatctgtgggcctggaagtctacacccagagttttagccgaaagctaccatttcctgacgagacacacgagcggtacatggtttcgggaaccaatgtgtacggaatcctgagggccccacgagcggccagcaccgagtctctcgtgctgaccgttccttgcgggtccgatagcactaattctcaggctgtcggcctactgctggccctggctgcgcacttccgcgggcagatttactgggccaaggatatcgttttcctggtgactgagcatgacctgctcgggaccgaggcatggctcgaagcgtaccatgacgtaaatgttactgggatgcagtccagccctctccagggaagggccggagccatccaggccgcagtggccttggagctgtcttcggatgtggtgacctccttggacgtggctgtggaagggttaaatgggcaactgcccaaccttgacttgctgaacctttttcagaccttctgtcagaaaggcgggctgctatgcactcttcagggcaagctgcagcccgaagattggacatccctggatggcccactacagggtttgcagaccctcctcttgatggtcctgcgccaggcatctgggcgaccacacgggtcacacgggctgttcctgcgctatagggttgaagctctgaccttacgtggcataaactcctttcgccagtacaagtacgatctagttgccgttggaaaagcactagagggtatgtttcggaagctcaaccacctgctagagcgcctccaccagtcattttttctgtacctgctccctggactctcaagatttgtgtccataggcctgtacatgcccgcggtgggattcttactgctcgtgctggggctgaaagctctcgagctgtggatgcaactccatgaagccggaatgggcctcgaggaaccaggaggcgccccaggcccaagcgttccattgccaccatcccagggagtggggttagctagcctcgtcgcaccgctcctcatatctcaagcaatgggcctggccctttatgtcctgcctgttctggggcagcacgtcgctacgcagcattttcctgtggccgaggccgaagcggtcgttctgaccctgctagcgatctacgccgcgggacttgcgcttccccacaatactcaccgcgtggtttcaactcaagcaccagacagagggtggatggcactcaagctcgtggccctgatttatctggccctgcagctgggatgtatagccctaaccaacttcagtctcggttttctcctggccactactatggttccaaccgcagccctcgccaaaccacatggtcctcgcactttgtatgctgccctactggtgctgacgtcacccgccgccaccttactggggtcacttttcctctggcgcgagctgcaggaagcccctttgtctctggcagagggctggcagctgtttttagccgcgcttgcccagggtgtgttggagcaccacacatacggcgcactgttatttcctctgttgtcgctggggttatatccatgttggttgttgttttggaatgtgcttttttggaaatag

SEQ ID NO: 118855 - DNA, 1686 bp, synthetic construct
  misc_feature 1..1686: note = Description of Artificial Sequence: Synthetic coding sequence
  source 1..1686: mol_type = other DNA
atgggtctgttatccgaccccgtgaggagaagagctctggcccgactggtgttgcggctgaacgcccctctgtgggcattgcccgtggcttggttggagagaactatgagaagtgtgggtctggaggtgtatactcaatcatttagccgcaaactgcctttcccagacgaaacacacgagcgatacatggtttccggcaccaacgtgtatggaatcctccgtgcccccagggctgcctccacagagagcttagtgctgacggtcccatgcggtagtgatagcaccaattcccaggctgtaggcctcctgctggcattagccgctcactttaggggccagatttattgggcaaaggatattgtgttcctggttaccgaacatgaccttctcggaaccgaagcttggctcgaagcctatcatgacgtgaatgtgaccggcatgcagagcagcccattgcagggacgcgccggcgccatccaggccgccgtcgcactggaactaagcagtgacgttgtgaccagtctggacgtggccgtcgaggggctgaacgggcagctccccaaccttgatctcttgaatctgtttcagactttctgtcagaagggcggccttctgtgtaccctccagggcaaactgcagcccgaggattggacttcactagatgggcccctccagggactgcagaccctgctgctcatggttttgcgccaggcaagcgggcgtccccacgggagtcacggcttgttcctcagataccgggtggaagccctgacccttagaggcatcaacagttttcgccagtataagtacgacctggtcgcggtcggcaaggcactggaggggatgtttcggaagttaaatcatttgcttgagcgcctccaccagtcctttttcctgtacctcctgccagggctctcaaggttcgtgagcattggcctgtatatgcctgctgttggtttcctgttgttggtgctgggtctgaaggccctagaattatggatgcagcttcacgaagccgggatgggccttgaggagcccggcggcgcccccgggccctccgtcccgcttccaccatctcagggcgtggggcttgcctctcttgtcgcccccctgctgattagccaggctatggggctcgccctatacgtgctgcccgtgctagggcagcacgtagccacccaacatttccccgtcgctgaggcagaagcagtagtgcttacgcttctcgcaatatacgccgctggcctcgctttgccgcacaacacacacagagtggtcagcacccaggccccagatcgggggtggatggctctgaagctggtagccctcatatacctagcgctgcagcttgggtgtattgccctcactaatttctcactcggattcttactcgcgacaactatggtacccaccgctgccctcgcaaagcctcatggaccccgcacactgtacgctgccctgttagtgctgacatcccctgcagcaaccctgctggggagcttattcctttggcgcgaactacaggaggcacccctgagtcttgctgaaggatggcagctgttcctggcagccttggcacaaggggtgctcgagcatcacacctacggggcgctcctctttccgctgttgtccctcgggctttatccatgctggcttcttttttggaatgtccttttttggaagtag

SEQ ID NO: 118856 - DNA, 555 bp, synthetic construct
  misc_feature 1..555: note = Description of Artificial Sequence: Synthetic coding sequence
  source 1..555: mol_type = other DNA
atgaaggcgctgggggccgtgctcttggctctcctgctttgtggcagacctggcaggggtcaaactcagcaagaggaggaggaggaggacgaagatcacgggcccgatgattatgacgaggaggatgaggacgaggtggaagaggaggagactaacagattgccgggcggacgcagcagggtgctcctgcgctgctacacatgtaagagcttgccacgagacgagaggtgtaacctgactcagaactgctctcatggccaaacatgcaccacattgatcgcacatgggaacactgagtcgggactccttacaacacacagtacatggtgcactgatagctgtcagcccattaccaagacggtcgagggaacacaggttaccatgacatgctgtcagagcagcctttgtaacgtccccccttggcagtccagtcgggtccaagaccctacagggaagggcgccggcgggcctcggggctcgtcagagaccgtgggggctgcattgcttctgaatctcctggctggcttgggtgcaatgggggctagacgcccttag

SEQ ID NO: 118857 - DNA, 582 bp, synthetic construct
  misc_feature 1..582: note = Description of Artificial Sequence: Synthetic coding sequence
  source 1..582: mol_type = other DNA
atggggaaacagaatagtaagctgcggccagaggtgatgcaggacctgctggagtctaccgattttaccgaacacgaaatccaggagtggtacaaggggttcctcagggactgcccgtccggacacttgtcgatggaggaattcaagaagatttatggcaatttttttccatacggcgatgccagcaaattcgccgagcacgtgtttcgtacattcgatgccaacggtgatggtacaattgattttcgcgagttcatcatcgccctgagcgtaaccagtcgcgggaagttagagcaaaaattaaaatgggccttctccatgtatgacttagatggtaacgggtacatttccaaagcagagatgctcgaaatcgtgcaagctatttacaagatggtgtcctctgtgatgaaaatgcccgaggacgaatccactccagagaaacgaaccgaaaaaatcttcaggcagatggacaccaacagagatgggaaattgagtctggaggagtttattcggggcgccaaatctgacccatctatcgtgcgcttattgcagtgcgatccaagttcggcaggccaattctag

SEQ ID NO: 118858 - DNA, 756 bp, synthetic construct
  misc_feature 1..756: note = Description of Artificial Sequence: Synthetic coding sequence
  source 1..756: mol_type = other DNA
atgtccgcatatggtatgcccatgtataagtccggagacctggtttttgctaagttgaaggggtatgcccattggcccgcacgaattgagcacatgacccagcccaaccggtaccaagtgttctttttcgggactcatgaaaccgcctttcttagccccaagagactgttcccttataaggaatgtaaggaaaaattcggaaagcctaacaagagaagaggcttttcggcaggactatgggagatagaaaacaacccgacggtgcaagcttctgactgtccgctcgcaagcgagaagggctctggcgacggaccgtggccagagcctgaggccgccgagggcgacgaggataagcctactcacgcaggcggaggcggggatgaactcggaaagccggatgatgacaagccgacagaagaggagaaagggccactgaagcgctcagctggtgaccccccagaagatgctcccaagaggccgaaagaggcagctcctgaccaggaggaggaggctgaggcagagcgagcagccgaagccgaacgggccgcagccgctgccgccgcgaccgccgtggatgaggaaagcccattcttggtggccgtggaaaatgggtccgctccttcggagcccgggttagtgtgcgagccgccgcagcctgaggaagaggaacttcgagaggaggaggtggcagatgaggaagcttcccaagagtggcacgccgaggccccaggggggggcgaccgagactccctgtag

SEQ ID NO: 118859 - DNA, 531 bp, synthetic construct
  misc_feature 1..531: note = Description of Artificial Sequence: Synthetic coding sequence
  source 1..531: mol_type = other DNA
atgtcggcatttcgactgtggccaggacttcttattatgctgggctctctttgccatcgaggttctccttgtggattgtccacccacgtggaaatcggacaccgagccttagaatttctccagctgcacaatgggcgagtcaattaccgggagttactcctggaacatcaggacgcctaccaggctggaattgtgttcccggattgcttctatccatccatatgcaaaggggggaagtttcatgatgttagtgaatcaacacactggaccccattcctcaatgccagcgtgcattacataagagaaaattacccattgccgtgggagaaggacaccgagaaactggttgcatttcttttcggaatcacatcacacatggccgctgacgtaagctggcatagtctgggcctggaacaaggctttctgagaactatgggagctattgacttccacggatcatattctgaggcacatagcgccggcgatttcggaacagtatatcttcacctgcttaactttttggtggtgtag

SEQ ID NO: 118860 - DNA, 831 bp, synthetic construct
  misc_feature 1..831: note = Description of Artificial Sequence: Synthetic coding sequence
  source 1..831: mol_type = other DNA
atgaacagcaaacgaatgctcttgttggtgttgttcgcattctccttaatgctggtcgaaaggtacttccggaaccaccaagttgaggagctgcgcttgagcgactggtttcacccccgcaagcgaccagacgtaatcactaagacagactggctagcccccgtcttatgggagggcacttttgataggagagtccttgagaagcattacaggcgccggaacatcacagtgggactggcggtcttcgccaccggcaggttcgccgaagagtatctgcgtccattcctgcacagtgcaaataagcatttcatgactggttatcgtgtgatcttctacatcatggtggacgcctttttcaagctcccagatatcgagccatctccccttaggacctttaaagcattcaaggttggcactgaacgatggtggctcgacgggccactggtgcacgttaaatccctcggcgaacatatagcgtcccacatccaggatgaagtagatttcctcttcagtatggcagccaatcaggtattccagaatgagtttggcgtggaaacgttgggtcccctggtggcccaactacatgcctggtggtatttcaggaatacgaaaaattttccttacgaaaggagaccaaccagtgctgcttgcatccctttcgggcaaggagatttttactacggaaatctcatggttgggggtacaccacacaacattcttgattttataaaggaatatctgaacggggttattcacgacataaagaacggcctcaactccacgtacgagaaacacctgaacaagtacttctacctaaataagccaacgtag

SEQ ID NO: 118861 - DNA, 2166 bp, synthetic construct
  misc_feature 1..2166: note = Description of Artificial Sequence: Synthetic coding sequence
  source 1..2166: mol_type = other DNA
atgctaccccgcggccgccctagagctctcggcgccgccgcgctgctcctgctgctactgctcttgggttttctcctcttcggtggagatctgggctgtgagaggagggaaccaggcgggcgggccggcgccccaggctgctttccagggcccctcatgccgcgagtgcccccagatggccgcctcaggcgggccgcggcactggacggcgatcccggcgctggtccaggcgatcataacagaagtgactgtggacctcagcccccacccccacccaagtgtgaactgctccacgtcgccatcgtgtgtgcgggccacaacagctctagagacgttatcaccctggtcaagagcatgctgttctaccgcaagaaccccttacatctgcatctcgtgaccgatgcagtagcccgcaatatccttgaaaccttgttccatacttggatggtccctgccgtccgtgtaagcttttaccacgctgatcaactaaagccccaagtgagttggatcccaaacaagcactacagtgggctttacggactgatgaagttagtgctccctagtgccttgccggctgagctggcccgggtcatcgtcctggatacagacgtgaccttcgcaagcgatatttcagagctgtgggccttgttcgcccattttagcgacactcaggctatcggccttgtggaaaatcagtctgactggtacctcggaaacctgtggaaaaatcacagaccatggcctgcactgggtcgcggcttcaatactggcgtgatcttgctgcgattggaccgtctccgacaggccggctgggaacaaatgtggaggctgacggcccgccgtgaactgctgtcactgcccgcgacaagtctcgctgatcaggatatctttaatgctgttataaaggagcacccaggactggtgcagcgacttccatgtgtttggaatgtacagttgagtgaccacaccttggcagagcggtgttattccgaagcctcagacctaaaggtgattcactggaattctcctaaaaaacttagagtaaagaacaaacacgtcgaattcttcaggaacttttatctgaccttcctggagtatgatgggaatctcctacggcgggaactgtttgtctgcccctcccagccgccccccggggcggaacaactacagcaggccttggcacagctagacgaggaggatccgtgctttgaattccggcaacagcaactgaccgtccacagggtgcacgtgaccttcctgccccatgagccccctccccctcgcccccacgacgtgaccctagtggcacaattatccatggatcggctgcagatgctggaggctctgtgtcgccattggccaggccctatgtccctcgcactgtatcttacggacgccgaggcgcagcagttcctgcattttgtggaggctagccccgtactggcagccaggcaggatgtcgcttaccacgttgtgtacagggaagggcccctgtaccccgttaaccaactgcgcaatgtggccctggcccaggctctgaccccgtacgtgtttctgtctgacatagattttctgcctgcctacagcctctacgactacctgagggcctccatcgaacaactgggccttggatcacgccgcaaggctgctctggttgtccccgcttttgagactctgaggtacagattctcttttccacacagcaaagtcgagcttttggccttactcgacgctggcacgctgtacacatttcggtatcacgaatggccgagaggccatgcgcctactgactatgccaggtggagggaggcacaagccccgtacagggtacagtgggccgcaaattacgagccctatgtcgtcgtcccccgagactgcccacgctacgatccacggttcgtggggtttggttggaacaaggtggctcacatagtcgaactggacgcacaggagtacgaactgcttgtgcttccggaggcctttacaattcacctgcctcacgcacccagtctggatatatctcggtttagaagttctccgacttacagagattgcttacaggcactgaaggatgagtttcaccaggacttatcacgtcaccacggcgccgcagcccttaaatatttacctgccctacaacagccacagtctcctgccagaggatag

SEQ ID NO: 118862 - DNA, 870 bp, synthetic construct
  misc_feature 1..870: note = Description of Artificial Sequence: Synthetic coding sequence
  source 1..870: mol_type = other DNA
atgtggaggctgacagcccgacgcgaactcttgtccctgccggctacgagtcttgctgatcaggacatttttaatgctgtcatcaaagaacaccccggtctggtacagaggcttccatgtgtgtggaatgtacagctatctgatcatacgctagccgaacggtgttactcagaagcttccgacctgaaggtcatccactggaatagccctaaaaaattaagagtgaagaataaacacgtggagttttttcgaaatttctatttgacctttctagagtatgacggaaacctgcttcgcagggagctgttcgtctgcccctcccagcctcccccgggagcagaacagctgcagcaggctttggctcagctcgacgaggaggatccctgcttcgaatttcggcaacaacaactgacggttcaccgagttcatgtgactttccttccccacgaacccccacctcctcgcccccacgacgtgactcttgtcgcgcagctgagtatggacagactccagatgcttgaggccttgtgtaggcattggccgggacccatgtcgctcgccctgtacttaacagatgcggaggctcagcaattcctgcatttcgtcgaggcaagccccgtattggcagctaggcaagatgtggcttaccatgttgtgtacagggaaggcccactttacccggtcaaccagctgcggaacgtggcactcgcacaggccttaacgccatacgttttcctgagcgatattgattttcttcctgcatacagtctttacgattacttgcgcgaggcacgagctggatttaactcatcaagtacctgcgggtgcgctcatccatctcaccaggcccggtggcccatggtcgtctag

SEQ ID NO: 118863 - DNA, 2166 bp, synthetic construct
  misc_feature 1..2166: note = Description of Artificial Sequence: Synthetic coding sequence
  source 1..2166: mol_type = other DNA
atgttgccaagaggcagaccccgagccctgggtgctgccgcactcctcctgctgcttttgttactggggttcctgttatttggcggtgatttgggttgtgagcgccgcgagcctggcgggcgagcaggagccccagggtgcttcccagggcctctgatgcctagagtgccgccggacgggcggctacggcgagcagcggctctggatggggatcccggcgccggtcctggtgaccacaatcggagcgactgcgggccacagcccccgccccccccaaagtgcgagctgctgcacgtagccatcgtttgtgctggccataattcgtcccgagacgtgattaccctcgtgaaaagtatgctgttttacaggaaaaacccactgcatctccacttagtcaccgacgccgtggcccgcaacattttggagacactctttcacacctggatggtccccgccgtgcgcgtgtcgttttatcacgctgatcagttaaagcctcaggttagctggatcccaaacaaacactacagtggcctctacgggctgatgaagctggtgctgccgtccgcactccctgccgagctggccagagtgatcgtcttggatactgatgtgacgtttgcttcggacattagtgagctgtgggctctatttgcacatttctccgacacacaggcaatcgggttagttgagaatcagagtgactggtatctggggaatctctggaaaaatcatcgaccatggccagcactgggcagggggttcaataccggcgtgattctgctgcgccttgataggttaaggcaggctgggtgggagcaaatgtggagactaacagcccgtagggaactcttgtctcttcccgccacctcgttggctgaccaggacatctttaacgcagtaattaaggagcaccctgggctcgtccagagattaccatgcgtatggaacgtgcagctgtcagatcatactctggctgagcgctgctactccgaagcttccgatctgaaagtcatccactggaatagcccaaaaaagctgcgggtgaaaaacaagcacgttgagttcttccgcaatttttacttgacttttctcgaatacgacggaaatctattacggcgggagttgttcgtttgcccttctcaaccaccacccggggcagagcaattacagcaagccctcgcgcagctagacgaggaagacccatgtttcgaatttcgccaacagcagctgacagttcacagagtccatgttacgttcctacctcacgaaccgccccccccacgaccacacgacgtgacactcgtagcacagttatctatggacaggctacaaatgctggaggcactatgtcgtcattggccaggccctatgagcctagcattgtatctgacggacgccgaggcccagcaatttctgcatttcgtggaggcttcaccggttctggctgcacggcaggacgtggcgtaccacgtggtatacagggaagggcctctgtacccagtgaatcaactgcgcaacgtggccctggcccaggcactaactccctacgtgttcttgtctgacattgactttctgcccgcttacagtctttatgattacctccgcgcatctatcgaacagctggggctcggctctcggaggaaggctgccctcgtcgttcccgcatttgaaaccttgcggtacagatttagtttcccccatagcaaggtcgaactgctggcccttctggacgccggcacactctatacattcaggtatcacgagtggcctcgaggacatgctcccacggactatgcacggtggagggaggcccaggcaccatatagggtacagtgggccgccaattacgagccatatgtggtggttcccagagattgtccaaggtacgacccacggtttgtaggtttcggctggaacaaggtggcccacattgtggagctcgacgctcaggaatatgagctgctagttctcccggaagcctttacaatccacttgccccacgccccaagccttgatattagtcggtttagatcctctcccacctatcgggattgcttgcaagctttgaaagatgagtttcatcaagacctgagtcgccaccacggcgcggccgcactgaagtatctccccgcgctacaacagccacaatcccctgctcggggctag

SEQ ID NO: 118864 - DNA, 2166 bp, synthetic construct
  misc_feature 1..2166: note = Description of Artificial Sequence: Synthetic coding sequence
  source 1..2166: mol_type = other DNA
atgctgcctaggggccgtcctagagccctgggcgctgccgcgctactgctgttgcttttgctcctggggtttctgcttttcggaggagacctgggatgcgagagacgagagcctggagggagagcgggcgccccggggtgtttccctggaccactgatgccacgtgttcctccagatggtaggctgcggcgcgcagcagcactagacggggatcctggtgccggccccggagatcacaatcggtcggactgtggaccacagccgcctccaccccccaaatgtgagctgctgcatgtcgccattgtctgcgccggtcacaatagtagcagagatgtaataacactggttaagtcaatgctgttctacaggaaaaaccctttgcacctgcacctggtaaccgatgctgtcgctaggaatatcctcgagactctctttcatacatggatggtacctgccgtccgggtgtcattttatcacgcagatcaattaaaacctcaggtgtcttggataccaaataaacattatagcgggttatatggcctcatgaaactagtgttaccatcagccctgcccgcggaactcgctcgggtgatcgtgttagacactgatgtgacattcgcttcagacatatccgaactctgggcgctgttcgcgcacttcagcgacacacaagctatcggtctcgtcgagaatcaatctgactggtacctcggaaatctctggaagaatcaccggccttggccggctttgggtcgaggctttaatactggggtgattttgctgagattagatcgtttacggcaagccggatgggagcagatgtggcgcctgactgctagaagggagctgctgagcctcccagccacgagtctcgctgatcaggatattttcaacgccgtaatcaaggaacacccaggactcgtacaacggctaccctgtgtctggaatgtgcagttgtcggatcacaccctggctgagcggtgctacagtgaggctagcgacctgaaagttatccactggaactccccaaagaaactgcgagtgaagaataaacacgtcgaatttttccgcaacttttacctaacctttctggaatacgatggtaatctgcttagaagggagctttttgtctgcccgtcacagccacctcccggcgccgaacagctgcagcaagcactagcccagctggacgaggaggacccctgtttcgaatttcggcagcagcagctcactgttcaccgagtgcacgtgacatttctgccacatgaacctccacccccaagacctcacgatgtgactctggtggcccagctgagcatggatcgcctgcagatgctggaggccctgtgccgccactggcccggtcccatgtcgctggccctgtaccttactgatgcagaagcccagcagttcctgcacttcgtggaggcatcgcccgttttagccgcccggcaggatgttgcctatcatgttgtctatagggagggccccctgtacccagttaaccaattgcgaaacgtggccctcgctcaagctctgacaccttatgtattcctgtcagatatagatttcctcccagcctactctctgtatgactatcttagagcctcgatagagcaactgggcctaggctctcgacgtaaagccgccctggtggtgcccgccttcgagacacttcggtaccgattcagctttccccacagtaaggtggagctgctggcactcctggatgcagggacattatacaccttccgatatcacgagtggccacgaggacatgctcccacggactacgctcggtggcgcgaggcccaggctccctatcgagtccagtgggccgccaattatgaaccttacgtggtggtgccgagggattgcccacggtatgacccccgctttgtgggatttggttggaacaaagtcgctcacatcgtggagttggatgcccaggaatatgaattacttgtactcccagaagcctttacaatccacctgccccacgctccaagcttggatatttctagattcaggtctagccccacttatcgcgactgcctccaggcgctcaaggacgaatttcaccaggatctcagcagacatcacggcgccgccgccctgaagtacctgcctgccctccaacagccacaatctccagcgaggggttag

SEQ ID NO: 118865 - DNA, 2073 bp, synthetic construct
  misc_feature 1..2073: note = Description of Artificial Sequence: Synthetic coding sequence
  source 1..2073: mol_type = other DNA
atgctgccacgcgggcgtcccagggccctgggcgcggccgcccttctgctgctgctactacttctgggcttcctgctgttcgatggccgtttgcgtcgcgcagccgccttggatggagacccaggagctggccctggagaccacaacaggtcggattgcgggccacagcctccccctccccctaagtgcgagctgttacatgtcgccatcgtttgcgccgggcacaattcatccagggacgttatcacactcgtgaaatcaatgctgttttaccgcaagaatcctctccacttacatctggttacagacgcagtagccaggaatatcctggagactttgttccatacgtggatggtccctgctgtgcgggtctccttttaccacgcggaccagctgaaaccacaagtgtcttggatcccgaacaagcattactccggtttgtatggcctgatgaaattggtgttgccctctgctctgcctgctgagctggccagggtcatcgtcttggacactgatgtgacatttgcctcagacatcagtgaactgtgggccttatttgctcacttcagcgatactcaagctatcggtcttgtagaaaatcagtctgattggtatctcgggaacttatggaaaaatcataggccttggcccgccctcggacgcgggttcaacaccggcgtgatactgctgagacttgacaggcttagacaggctggatgggagcaaatgtggaggctaaccgcccgtcgggagctcctaagcctgcctgccactagtctggcagatcaggacatctttaatgcggtaatcaaagagcaccccggtctcgtgcagcggctgccttgtgtctggaatgtgcagctgtcagatcataccctggccgagcgctgttatagcgaggctagtgacctgaaagtgatacactggaactccccaaagaaattacgcgtgaagaataaacatgtggagtttttccgaaatttctatctgaccttcttagaatacgatgggaatctcttaaggagagagcttttcgtctgtcccagccagcctcccccaggtgctgagcagcttcaacaggcgttggctcagctggatgaggaggacccttgctttgaatttcgacagcagcagttgacagttcatcgcgtacatgttacattcctgccacatgagcctcccccccctcgaccgcatgatgtgaccctggtggcccagctgagcatggaccgcctccagatgctggaagcgctctgtaggcattggcctggccccatgtccctcgcactgtaccttacagacgctgaggctcaacagtttcttcatttcgtggaagcttcccctgtgcttgccgcaaggcaagatgtggcgtatcacgtggtatacagagagggtcctctctatccggttaaccagctgcgaaatgtggcacttgcacaagccctgacaccgtatgtgtttctatccgatatagactttttgcctgcctacagcctctatgattatttacgggcctctatcgagcagcttggactggggtcccgacggaaagcggccctggtggtgcccgccttcgagacgttgaggtaccggttctcatttccgcactcaaaagtggaactccttgctctactggacgctggcacgctgtatactttcagatatcatgagtggccgcgcggtcacgctccgacagattacgcaaggtggagggaggcacaggctccctaccgcgttcagtgggcagcgaactatgaaccatacgtggttgttccccgggattgcccacgctatgaccctcggtttgtaggctttggatggaacaaagtggctcacatcgtggagctggacgcgcaggaatatgaactgctcgtcctgccggaggccttcaccatccatctcccgcacgccccaagtttagatataagtagattccgctcctctccaacctaccgcgactgcttacaggccttaaaagatgagtttcaccaggacctgagcaggcatcacggagctgcagcactcaaatatctccctgctttgcagcaaccccagtccccagccagagggtag

SEQ ID NO: 118866 - DNA, 1122 bp, synthetic construct
  misc_feature 1..1122: note = Description of Artificial Sequence: Synthetic coding sequence
  source 1..1122: mol_type = other DNA
atgagcattttgattatagaggcgttctacggcggcagccataagcagctggttgatcttctgcaggaggaactcggagattgcgtcgtgtatacacttcctgccaaaaagtggcactggcgggcccggacaagtgctctctatttttcacagactattccaatctccgagcactacagaacacttttcgccagctcagtcttgaatttgaccgagctggccgccctcaggccagacctcgggaaacttaaaaaaatactgtacttccatgaaaaccagctaatttatcccgtgaaaaaatgccaagagcgcgactttcagtacggctacaatcagatcttatcttgcctagtggcagatgtagtggtattcaacagtgtgttcaatatggagtcatttctcaccagtatggggaagtttatgaagctgattcctgatcaccgaccaaaagacctggagtcgataattcgaccaaaatgccaggttatttatttccctatccgctttccagatgtaagcaggtttatgccaaaacacaagacgactcacctgaagaaaatgctcggcctaaaggggaacggaggagccgtgctttccatggccttgcccttccagcctgagcagagagacagcgaagatctgctcaaaaatttcaactctgaatgcgatactcactgcggtttagatacagcgcggcaggagtatctggggaatagtctgcggcaggaatcagatctcaaaaaaagcacctcatccgacaactcaagttcccaccacggagagaacaaacaaaatctcacggtggacccttgcgatatcttgggtggggtggataaccagcagcgccttctgcacatcgtgtggccacatcgctggctggaggctgtgtattgtggctgctatccactgtgccccaaagacttagtctatcctgagatcttccccgctgaatatttgtacagtacccctgaacagctctcgaagcgcctgcagaacttctgtaagcgccccgacattatcaggaagcacctgtataagggggagatagcgcctttctcctgggctgcgctccatggcaaattcaggtccctgttgacaaccgaaccaagggaagacctctag

SEQ ID NO: 118867 - DNA, 1377 bp, synthetic construct
  misc_feature 1..1377: note = Description of Artificial Sequence: Synthetic coding sequence
  source 1..1377: mol_type = other DNA
atgtcaattttgattatagaagctttctatggtgggtcccataagcagctcgtcgatctgctgcaagaagagctgggagattgtgtggtgtacacacttcccgccaagaagtggcactggagagctaggacctcagccctgtatttctcccagacaattccgatcagtgagcattaccggaccttattcgcaagtagcgtcctgaatctgacagaactcgctgcactgcggcccgacttgggaaagctaaagaaaatcctatacttccacgagaatcagctgatttatcccgtcaaaaagtgtcaggagcgggatttccagtatggctacaatcagatattgtcatgcctcgtggcggatgtggtagtgtttaattccgtgtttaatatggagagctttctgacgagtatgggtaagttcatgaaactgattcccgatcatcggccgaaggacctcgagtccataatcaggcccaaatgtcaggtaatctacttcccaatccggttccccgatgtcagtcggtttatgcctaagcacaagacaactcatttgaaaaaaatgctgggcctcaaggggaacggcggggctgtgttgtctatggctttgccatttcaacctgaacagagggattctgaggacctgctgaagaactttaactccgagtgcgatacccattgcggcctggatacggcccggcaggaatacctgggaaattccctgcggcaggagagtgatctcaagaaatcgaccagctccgacaacagctcatcacatcatggtgagaacaagcagaatctgaccgtggacccatgcgacatactcggaggagtggataatcagcagcgcctactgcatatcgtctggcctcatcgctgggagcacgataaggaccctgaaagtttctttaaagtgttgatgcacctgaaggacctaggtctcaactttcatgtcagtgttttaggagagacattcacagacgtgcccgatatcttttcagaggctaagaaagccttaggcagttccgtgctgcattgggggtacctgccctcaaaggacgactatttccaagtgttatgtatggcggacgttgtcatctccacagccaagcatgaattctttggcgttgcgatgttggaggctgtgtattgtggctgctacccactctgtccgaaagatctggtgtacccagagatatttcctgccgaatacctgtattctacaccagagcaactgtctaaacgtttgcaaaatttttgcaagcggccagacatcatccgcaagcacctttacaaaggggagatcgctccattttcctgggcggcccttcatggcaaatttcgatcactgttgaccaccgagccccgagaggatctgtag

SEQ ID NO: 118868 - DNA, 1122 bp, synthetic construct
  misc_feature 1..1122: note = Description of Artificial Sequence: Synthetic coding sequence
  source 1..1122: mol_type = other DNA
atgtcaatattgataatcgaagccttctatgggggctcccacaagcagctggtggatctactgcaggaagagctgggcgactgtgtggtgtacaccctgccggctaaaaagtggcactggcgcgcccgcacctccgcgctgtactttagtcagaccataccgatttccgaacactacagaaccctgttcgccagcagtgtgcttaacctgacagagttggctgcgctgaggcccgatctcggtaagctcaagaaaatcctgtactttcatgagaaccagcttatctacccagtgaagaagtgccaggagcgggattttcagtatggctataaccagatcttgtcttgtctggtggcggacgtagtagtgttcaacagtgtctttaatatggagagcttcctgacctccatgggcaaattcatgaagcttatacctgatcataggcccaaggacctcgagagcatcatccgtcccaagtgtcaggtgatttatttcccgataaggttcccagacgtaagccgattcatgccaaaacacaaaacaacccacctgaagaaaatgttgggcctaaagggcaatggcggcgccgtcctgtctatggcgctccctttccagcccgagcagcgtgatagtgaggacttactaaaaaacttcaacagcgagtgcgacacacattgtggactggacactgcccggcaagaatacctgggcaactctctcagacaggagtccgatcttaagaagagcacctcctctgataactcaagctcccaccacggtgagaataagcagaatttaacagttgatccatgtgatattctgggtggggttgataaccaacagaggttgctgcacattgtttggcctcatcgctggctggaggcggtgtattgcgggtgctatccattgtgccctaaggaccttgtttatcccgaaatcttcccggcagagtacctgtactctacaccagagcagctttcaaagagactccagaatttttgtaaacggccagacattatacgtaagcacctgtacaaaggggaaatcgctccattctcctgggctgccctccacgggaaatttcgatctctgctgactactgaaccccgcgaggacctgtag

SEQ ID NO: 118869 - DNA, 1377 bp, synthetic construct
  misc_feature 1..1377: note = Description of Artificial Sequence: Synthetic coding sequence
  source 1..1377: mol_type = other DNA
atgtccatcctgatcatcgaagccttctacggcgggtcccataaacaactggtcgaccttctccaggaggagttgggggactgcgtagtgtacactttgcccgccaagaaatggcactggcgcgcccggacatcagcgttgtacttctctcagactatcccgatatccgaacattaccgcactctgttcgctagtagcgtgctcaatctaaccgagctggctgctctccgcccagacctggggaagctgaagaagatcttgtattttcatgagaaccaactcatctatccggtaaaaaagtgtcaggagagggattttcagtacggttacaaccagatcttgtcttgccttgtggctgacgtcgtggttttcaattcagttttcaatatggagtcattcctcacctctatgggcaagtttatgaaacttattcctgatcacaggccaaaggatctggaatcaatcatcaggcctaagtgtcaggttatctactttccaatcagatttcccgatgtttccagattcatgccaaagcataaaaccacacacctcaaaaagatgctaggtctcaaaggcaatggtggcgctgtgctttctatggccctcccctttcagccggagcagagagacagtgaagacctcttgaagaactttaatagtgagtgtgacacacattgtgggctggacaccgccagacaagaataccttggaaatagcctgaggcaagaatcggacttaaaaaagtccacgtccagtgataacagtagcagccaccatggagaaaacaaacaaaatttgacagttgatccttgtgacattctggggggggtggataaccagcagcgcctcttacatattgtgtggccacatcgctgggagcacgataaggatcctgaaagtttcttcaaagtgctcatgcacctgaaggatctggggttgaacttccatgtcagtgtcttgggcgagacatttacagacgttcccgatattttttctgaagccaaaaaagcactaggctccagcgtgctgcactggggctatctgccttccaaagatgattactttcaagttttatgcatggccgacgtggtgatttcaaccgccaagcacgagttcttcggggtggcaatgcttgaagcagtgtactgtggatgttatcctctttgtcctaaggacttggtctatcctgaaattttcccggcggagtatctctattccactcctgagcagttgtctaaacgtctccagaatttctgtaagcgcccagatatcattaggaaacacctgtacaaaggggagatcgcaccctttagttgggcagcgctgcacggaaagttcagatccctgctcaccacggagccacgagaggacttgtag

SEQ ID NO: 118870 - DNA, 1377 bp, synthetic construct
  misc_feature 1..1377: note = Description of Artificial Sequence: Synthetic coding sequence
  source 1..1377: mol_type = other DNA
atgagcattttaattatcgaggccttctatgggggctctcacaaacagctggtcgacctgctccaggaagagctgggagactgtgtggtatacacattacctgctaagaaatggcactggcgggctagaacatccgccttatacttcagccagacaattcctatcagcgaacactatcgaactctgttcgcctcttcagtgctgaatctcactgaactagctgcactcagacctgacctgggcaagctcaagaaaatcctatatttccacgagaaccagctaatctatcctgtcaagaaatgtcaggagagagatttccagtatggatacaaccagatactgagctgcctggtcgccgatgtggtcgtgttcaattccgtgttcaacatggaaagcttcctaaccagtatggggaaattcatgaagctgattcctgatcatcgtccaaaggatttggagtcaatcatccgccctaagtgccaggtcatctacttccccatccggtttcctgacgtgtctcgctttatgcccaagcacaaaacaacgcatcttaagaaaatgctgggacttaaagggaacgggggggccgtgctcagcatggctctacccttccagcccgagcagcgcgatagtgaggatctgctgaagaattttaacagcgaatgcgatacgcactgcggtcttgacaccgcaaggcaggagtatctcggcaacagcttgcggcaggagtcggaccttaaaaagagcacatcttcagacaatagctcttctcatcacggagagaataagcagaacttaacggtggatccctgtgacatactgggtggagttgacaatcagcagaggctgttgcacatagtgtggcctcatcggtgggaacatgacaaggatccggaaagcttcttcaaggttcttatgcatctcaaggacctgggtctgaacttccatgtgtccgtgttgggcgagacattcacagacgtacctgacatctttagcgaggcaaagaaggcactcggatcaagtgttcttcactggggttaccttccttccaaagacgactactttcaagtgttgtgtatggcggatgtagtcatcagcaccgctaagcacgaattcttcggcgttgctatgcttgaagcggtttactgcggttgctatccactctgtccgaaagacctagtgtacccagagatttttcctgctgagtatctatactcaacccccgagcagctctccaagagactgcagaacttttgtaagagacctgacattatcagaaagcacctgtataaaggtgagattgccccattctcctgggcagcactgcacgggaagttccgtagtctgctcacaaccgagccaagggaggatctatag

SEQ ID NO: 118871 - DNA, 300 bp, synthetic construct
  misc_feature 1..300: note = Description of Artificial Sequence: Synthetic coding sequence
  source 1..300: mol_type = other DNA
atgtctatcttgattattgaggcattctacggaggttcccacaagcagttagtcgaccttctccaggaggaactgggtgattgcgttgtgtatactctccctgccaaaaagtggcactggcgagctaggacctctgccctgtatttcagccagacaattccaatttctgagcattatcgcaccctattcgcaagttcggtgctgaatctgactgaactggctgccctgagacccgatctcggcaagctcaaaaaaatactgtactttcacgagaatcagctgatctatcctgtaaagtag

SEQ ID NO: 118872 - DNA, 522 bp, synthetic construct
  misc_feature 1..522: note = Description of Artificial Sequence: Synthetic coding sequence
  source 1..522: mol_type = other DNA
atgtccatcctaataattgaggctttctatggcggatctcataaacaactggtggacctgcttcaggaagaactgggagattgtgtggtatacactttgcctgcaaaaaaatggcattggagagccaggacctcggccctctattttagccaaactattcccatcagcgaacactatcggactctgtttgctagtagcgtgttgaacctcacggaactggccgcccttaggcctgatctaggtaaactaaaaaagatattgtacttccatgaaaatcagcttatttacccggtaaaaaaatgccaggaaagggacttccaatatggctacaaccagatcttgagctgtctcgttgcagatgtggtcgtatttaattctgtttttaatatggagtcctttctcacatctatgggaaagttcatgaaactgatccctgatcacaggcccaaggaccttgagagcattataaggccaaagtgtcaagtcatctatttccccatccggtttcctgacgtgtcatag

SEQ ID NO: 118873 - DNA, 1377 bp, synthetic construct
  misc_feature 1..1377: note = Description of Artificial Sequence: Synthetic coding sequence
  source 1..1377: mol_type = other DNA
atgagcatcttgatcatcgaagcattttatggaggatcgcacaagcagttagtggatctcctgcaggaggaactaggtgactgtgtggtctacactttgcctgctaaaaaatggcactggcgagcgaggaccagcgccctgtacttctcacagaccatacccatctcagaacactatcgcaccctctttgcctcttccgtcctgaacctgaccgaactggctgcattgaggccagacctgggaaagctcaaaaaaatcttgtatttccacgaaaaccaactgatttaccccgtgaaaaaatgccaagagcgtgacttccagtacggatataatcagatattaagctgcctcgtggcagatgttgtggtatttaatagcgtgttcaacatggaaagctttttgacttccatgggtaaattcatgaagcttattccagatcatcggcccaaggatcttgagagtattattagaccaaagtgtcaggtcatatacttccccatccgttttcctgacgtaagccgcttcatgccaaaacataagacgactcatcttaaaaagatgcttggcctcaaaggcaatggcggggcagtgttatcaatggccttgcctttccaacctgagcagagggattctgaagacctgctgaagaacttcaactctgaatgtgacacccactgtggactggatacagcacggcaagagtatctggggaactcccttagacaggagtcagatctgaagaagtctacaagctcagataactcatcttctcaccatggagaaaataagcagaaccttaccgtggacccttgcgatatcttagggggggtggacaaccagcagcgcctcttgcacatcgtatggccccaccgatgggagcacgacaaagatcctgaatcttttttcaaagtactgatgcaccttaaggatcttggcctgaattttcatgtgtccgtgctgggggagaccttcacggatgtgcctgatatcttttcggaagccaagaaggctttgggtagctctgtattacattggggctacctgccctcaaaagacgattatttccaggtgttgtgtatggctgatgtcgttatctccacagccaaacacgaattctttggggttgccatgctcgaggcagtctattgcggctgttatcccttatgccccaaagatctggtgtaccctgaaatttttcccgccgaatacctttactcaacacccgagcagctttcgaaaagactccagaatttctgtaagaggccggacatcataagaaaacacttatacaaaggtgagattgcacccttcagctgggccgctctacacggtaagtttaggagcctgctgactactgagcctcgggaggatctttag

SEQ ID NO: 118874 - DNA, 2220 bp, synthetic construct
  misc_feature 1..2220: note = Description of Artificial Sequence: Synthetic coding sequence
  source 1..2220: mol_type = other DNA
atgccttcgccaagaccagttctgctgcggggcgctcgcgcggccctgctcctgctgcttcctccccgactgctggcccgtcccagcctgctcctgagaagaagcctgtccgccgcctcctgcccacctatctccctgcctgcagctgccagcagatcaagcatggacggggcaggggcggaggaggtcctcgcaccactgaggcttgccgtccgacaacagggagatctcgtaagaaagttgaaggaggataaggcacctcaagtggatgtcgacaaagcagtggctgaactgaaggcccgaaagcgagtgctcgaggccaaagaactcgcccttcagcccaaggacgacatagtagaccgggcgaagatggaggataccctgaaaagacggttcttctatgatcaagccttcgccatctatggcggagtgtcgggattgtacgacttcggcccagtcggatgtgccctaaaaaataacatcattcaaacctggcggcaacattttatccaggaagaacagatcttagaaatagattgcacaatgctgacgccagaacccgttctcaagacttccggacacgtggataagttcgccgattttatggtgaaagacgtgaagaacggcgaatgtttccgggctgaccacttgctgaaggcccatctgcagaagctgatgtccgataagaagtgcagcgtggagaaaaaatccgagatggaaagtgtgctcgctcagctcgacaattacggccaacaggagctagccgacttattcgttaactataatgtaaaaagtcctatcaccgggaatgatctatccccaccggtttcttttaatttgatgtttaagaccttcatcgggccaggaggtaacatgccgggctacctccgcccagagacagctcaaggtatttttctgaacttcaaacgactgttggagtttaaccagggcaagttgccctttgccgctgcgcaaatcggcaactcatttagaaatgaaatcagtccacgatcagggctaatcagagttagagaattcaccatggccgagatcgaacactttgttgacccgagtgaaaaagatcatcccaaattccagaacgttgccgacttgcacctctatctgtatagtgccaaagcgcaggtttccggacagtcggccagaaagatgcgcctgggcgacgctgtggaacagggcgtcatcaacaatacagtacttggatatttcattggaagaatttatctgtacctgacgaaagtaggtatcagtccggataagctgagattcagacaacacatggaaaacgagatggcccattacgcatgcgattgttgggacgccgaatcaaaaacatcctacgggtggatcgaaatagtcgggtgcgccgatagatcctgttacgacctcagctgccatgcccgggcgacaaaagtgccactcgtggcagagaagcccctgaaagagccaaagacagtgaatgtcgttcagtttgagcccagcaaaggcgccattggaaaagcttataaaaaggatgccaaactagtgatggagtatttagcaatttgtgacgaatgctacattacagagatggagatgctgctgaatgagaagggcgaattcacaattgagaccgagggcaaaacattccagctgaccaaggacatgatcaacgttaaacgctttcaaaagacgctgtatgtggaagaagttgttccaaacgttatagagcccagcttcggacttggtcgtatcatgtacacagtctttgagcatacattccacgtccgagagggggatgaacagcggacgttcttttccttccctgccgtcgttgctccttttaaatgcagcgttctacccctgtcccagaatcaggaattcatgccgtttgtgaaagaactctcagaggcactgacccggcatggcgtttcccataaggtcgacgatagttctggatcaatcggcagacggtatgcacggaccgatgaaattggggtggccttcggagtgacaatcgatttcgatacggtgaacaaaaccccccatactgcaactctgcgagacagagactccatgcggcagattcgtgcagagatcagtgaattgccatctatagtccaggaccttgctaacggtaacatcacatgggcagacgtcgaggcccgatatcctctatttgaagggcaggagacgggaaagaaagagactatcgaagagtag

SEQ ID NO: 118875 - DNA, 555 bp, synthetic construct
  misc_feature 1..555: note = Description of Artificial Sequence: Synthetic coding sequence
  source 1..555: mol_type = other DNA
atggcagaaccccaaccaccatctggaggcctgaccgatgaggccgccctcagctgttgttccgatgcagatccatcaacgaaagactttttattgcagcagactatgcttagagtgaaggatcctaagaaatctctggacttctacacccgggtgctgggcatgaccctaatccagaaatgtgattttccgataatgaagttcagcctgtattttctcgcgtatgaggacaagaatgacatcccaaaggaaaaagacgaaaagatcgcttgggctttgtcccggaaggcaacactggaactcactcataattggggcactgaggacgatgaaacccagtcttaccataatgggaattcggatcccagaggcttcggacacataggaattgcagtccccgatgtgtacagtgcctgtaaaagattcgaggagctcggggttaagttcgttaagaagccagatgatggcaaaatgaaaggcctcgcttttattcaggaccccgacggttattggatagagatcctcaacccaaacaaaatggcaacccttatgtag

SEQ ID NO: 118876 - DNA, 987 bp, synthetic construct
  misc_feature 1..987: note = Description of Artificial Sequence: Synthetic coding sequence
  source 1..987: mol_type = other DNA
atgaggcccgtgcgcctaatgaaagtgttcgtgacaaggaggattcctgctgagggaagagtggcattagcgagagcagctgattgtgaggtcgagcagtgggacagtgacgaaccaatcccggccaaggagctggagcgcggtgtcgcgggggcccatgggttgctctgtttgctcagcgatcatgtggataaacgcattctagacgccgccggagcgaacttaaaagtcatctcaacaatgagcgtaggcattgaccacctggccctcgacgagatcaagaagcggggaatacgggtggggtatacccccgatgtcttgaccgacaccacagccgaactggccgtgtccctgctcctgaccacctgtcgacggcttcccgaggctatcgaagaggtgaagaatggtggctggactagttggaaaccgctgtggctctgtgggtatggacttacccagtccactgtgggcatcatcggtctgggtcggattggccaggcaattgcccgcagactcaaaccgttcggcgttcagcggttcctttacaccgggcgtcaaccacgtccagaggaggccgctgagttccaggccgaattcgtgagtacgccggagctggctgctcaaagtgatttcatcgtggttgcctgctcacttacccccgccactgaagggctgtgcaataaagatttttttcagaagatgaaggagacggccgtgttcatcaatatatcccgcggcgatgttgtcaaccaggacgacctgtaccaagcgctggcctctggaaagatcgcagctgctggacttgatgtgacgtccccagagccacttccgaccaatcacccactgctgacgctgaaaaactgtgtgatccttccacacattggcagcgcaacccacaggacacggaatactatgagtctgctggccgctaacaatctcctggccgggctacggggtgaaccaatgcctagcgagctgaaactctag

SEQ ID NO: 118877 - DNA, 1188 bp, synthetic construct
  misc_feature 1..1188: note = Description of Artificial Sequence: Synthetic coding sequence
  source 1..1188: mol_type = other DNA
atgcgacccgtgcgcttgatgaaggtttttgtgacccgccggatcccagcagaagggcgagtggctcttgccagagcggctgattgtgaagtggagcagtgggacagcgacgagcctattcccgcaaaagagctcgaaagaggcgtcgctggtgcgcacggtttgttatgtctgctttccgatcacgttgacaaaagaatcttggacgcggctggagccaacctcaaggtgatttcaacaatgagcgttggcattgaccatctcgctttggacgaaatcaagaagagaggtattcgagtcggctacacaccagacgtgctgaccgacactacagccgagctggccgtgtcattgttattgacgacctgtcgaaggctgccggaagccatcgaagaggttaagaacggggggtggacctcttggaagccactgtggctgtgtggctacggactgacccaatcgaccgtgggtattatcgggttaggacgcatcgggcaagctatcgcaagacgactgaagccattcggggttcaacgctttttgtatacggggaggcagccccgcccagaggaagccgccgagttccaggctgaatttgttagtacccccgaactggcagctcaaagtgatttcattgttgtagcctgctccctcaccccggcaacagaaggcctgtgcaataaggacttcttccagaaaatgaaagagacagcagtgtttatcaacattagccgctacccccgggccaccctgccgagcaagcccggggaagagccttcccctctgcttccctccggcgattttctgccccgcgggcttctggttaggccgcaggcagagctagctggtttccataaacccaataatcagctgcgaaactcctgggagtacaccagaccaccctaccgggaggaggagccctccgaatgggcctggccagtatgcttctccgctgtcgcccccacccgaagaggcctggctcattcgagtgtcgccagtggttctgtccctcgagaaccgctgcaggcgcattaccctccaccacagagagccggactggaagacttgaagggcccgctggaagcagcttcacacacagcggagcctggctttgtttggctctggtttagtgacactttgaacctaatgctgctgggcggacagactttgaagctgacatggtcttag

SEQ ID NO: 118878 - DNA, 759 bp, synthetic construct
  misc_feature 1..759: note = Description of Artificial Sequence: Synthetic coding sequence
  source 1..759: mol_type = other DNA
atgctcgggggtgtgcccactctgtgtggaacaggcaatgagacctggaccctgcttgcgcttgggcaggccatagcccgacgtctcaagccatttggcgttcagagatttctttatacaggtcggcagccgcgtccagaggaagctgcggagtttcaagccgaattcgtgtccaccccagagttagcggcccagagtgactttatcgtcgttgcctgcagtctgacccctgcaacagagggtctttgcaataaggactttttccaaaagatgaaggagaccgcggtgtttataaatatatcacggtatcctcgagcaacattacctagtaagcctggcgaagagcctagtccactgctgcccagcggagacttcctgccccggggtctcttggttagaccgcaggccgagttagccggatttcacaaaccgaacaatcagcttagaaattcttgggaatatacacggcccccttaccgagaagaggagccttcggaatgggcgtggcccgtgtgtttctctgctgtggctcctaccagaaggggcttggctcatagttcagttgcctctggctcagtaccccgcgagccactccaggcccattacccaccgccacagcgagccggccttgaagatcttaaaggcccacttgaagccgccagccacactgcggaacctgggttcgtttggctgtggtttagtgacactctcaatctgatgctgctcgggggtcagacactgaaattgacatggtcttag

SEQ ID NO: 118879 - DNA, 1677 bp, synthetic construct
  misc_feature 1..1677: note = Description of Artificial Sequence: Synthetic coding sequence
  source 1..1677: mol_type = other DNA
atggaacttagggcgagaggctggtggctgctgtgtgcagctgctgccctggtcgcttgcgcccgaggtgacccagcttcaaagtctcggagctgtggagaggttagacagatttacggggctaaaggtttctccctgagcgatgtcccacaggcggagattagcggtgaacatctgaggatctgtcctcagggctacacatgttgcactagtgagatggaagagaatttagcgaaccgtagtcatgcagagcttgagactgcattacgcgattcctctagagtactgcaggctatgctcgcaacacaactgcggagctttgatgaccactttcagcacctcctgaacgacagcgaacgtaccctgcaggcaacatttccaggagcatttggtgagctgtacacccagaacgcaagagcattccgcgatctgtattcagagctcagactgtactaccggggcgctaatttacatctagaggagaccctggccgaattctgggcccggctgctcgagcgactgttcaaacagctgcacccccagcttctgctgcctgacgactaccttgactgccttggtaagcaggctgaggctctcaggccgttcggggaagctccccgggagcttcgcctcagggcgacccgggcattcgtggccgcccggagctttgtgcaggggctgggcgtggcatcagacgtggttcggaaagtggcacaggtccctcttggcccggaatgctctcgcgccgtaatgaaactcgtttattgcgctcactgtctgggagttcccggcgccaggccctgtccagactactgtcggaatgtcttaaagggatgtcttgccaaccaggccgaccttgatgctgaatggagaaacttgctagacagcatggttctgatcacagacaagttttggggtaccagtggcgtggagtccgtgatcggtagcgtgcacacctggctcgctgaggccatcaatgctctgcaggacaatagggacaccctcaccgcgaaagtcatccaggggtgtggcaatcctaaggtcaacccgcaggggcccggccccgaagagaagcgcaggcggggaaagttggccccaagagagcgccctccatccgggactctcgagaagctcgtgagcgaggcaaaggcacagctgagggatgttcaggatttttggatctctttgcccgggacactttgctccgagaagatggctctgtctactgcttctgatgacagatgttggaacggaatggctcggggtaggtacctgcctgaggtcatgggagacggcctcgccaaccaaattaataacccagaggtggaggttgacataactaagccggatatgaccatccgtcagcagattatgcaattgaagattatgactaatagactccgcagcgcctacaacggaaacgacgtagacttccaggatgcttcagatgatggctcagggagcgggtccggcgatggttgccttgacgacctctgtagtcgcaaggtaagccgcaagagtagctcttctcgtactccacttacacatgcattacctggcctgtccgagcaggaaggccaaaaaacaagtgcggcctcctgtccacagcctccaactttcctgcttcccctcctgctgttcctcgctctcactgttgcccgtcccaggtggcggtag

SEQ ID NO: 118880 - DNA, 1743 bp, synthetic construct
  misc_feature 1..1743: note = Description of Artificial Sequence: Synthetic coding sequence
  source 1..1743: mol_type = other DNA
atggctggaactgttagaactgcttgcctcgtcgtggctatgttgctgtctttggatttccccggccaagcccaaccccccccaccccctcccgacgcgacttgccatcaggtacggtcattcttccagagattgcagcctgggctaaaatgggtgcccgaaacacccgttcctggcagcgatctccaagtgtgcctccccaaaggccccacctgttgtagccgcaagatggaggaaaaataccagctcacagcacgactgaatatggaacagctgctccagtcagcttcgatggagctaaagtttctcatcattcagaatgccgctgtctttcaagaggccttcgaaatagtggttcgccacgctaaaaactacacgaatgctatgtttaagaataattacccctcactgactccccaagctttcgagttcgtgggagaattcttcacagatgtttctctgtacatcctgggcagcgatatcaacgtcgacgacatggtaaacgagttgtttgacagtctattcccggtgatctacacccaactaatgaaccccggcttgcccgattccgccctggatattaacgagtgcctccgaggagcacggagagacctcaaggttttcgggaatttccccaagctaataatgacccaagtgagcaagagtctgcaggtgacacgcattttcttgcaagccctgaaccttgggatagaggtaatcaatacaacggaccacctgaagttcagtaaggactgtggtaggatgcttactcggatgtggtactgttcttattgtcaagggctcatgatggtgaagccctgtgggggatactgcaacgtggtaatgcaggggtgcatggccggagtggtggagatcgataaatactggcgagagtatatcctgtccctggaggaactcgtcaacggtatgtaccgcatttacgatatggagaatgtcttgctggggttgtttagcaccatccatgatagtatccagtatgtacaaaaaaatgcagggaagcttacaacaaccatagggaaactgtgtgcacactcacagcaaaggcaatatcgttcggcttactatcctgaggacctgtttatcgataaaaaggtgctcaaagtggcccatgttgaacacgaagagacactgtccagcaggagaagggaactcatccagaaattaaaatccttcatcagcttttactccgccttaccgggatacatctgttcccattctccagttgccgagaatgataccctgtgctggaatgggcaggagttagtcgagcggtacagtcagaaggccgcgagaaacggaatgaagaatcagttcaatctgcacgagctgaagatgaagggtcccgagccagtggtgagccagattattgataaactgaaacatattaaccaactgctgaggacgatgagtatgccaaagggacgtgtactagacaagaaccttgacgaagaaggcttcgagagtggtgattgtggggacgatgaagacgagtgcatcggcggctccggggatggcatgattaaagtcaaaaatcagctccgcttcctcgccgagctcgcctatgacctcgatgtcgatgatgcgcccggtaacagccagcaggctacacccaaggacaatgagatctccacatttcacaatcttggtaacgtgcattcacctctgaagctcctgactagcatggcgatttctgtggtttgcttcttcttccttgtgcattag

SEQ ID NO: 118881 - DNA, 1812 bp, synthetic construct
  misc_feature 1..1812: note = Description of Artificial Sequence: Synthetic coding sequence
  source 1..1812: mol_type = other DNA
atggcgggcactgtgagaacagcgtgtcttgtcgttgctatgttattgagccttgactttccagggcaagcccagcccccgccacctccacctgatgccacttgccaccaagtccgctcttttttccaaagactgcagcctggtctcaagtgggtcccagaaacaccagtgccggggagtgacctgcaggtatgcctgcctaagggcccaacctgctgctcacggaagatggaagaaaaatatcagcttaccgcccggcttaatatggagcagctgctccaatctgccagtatggagttgaaattcctcataatacaaaatgccgcagtatttcaagaggcttttgagatcgtagtaagacatgctaaaaactacaccaacgctatgttcaagaacaattacccttctctgactcctcaggcattcgaatttgtcggcgaatttttcaccgatgtgagtctttacatcctggggtccgatataaatgtggacgacatggtcaatgagctgttcgactcactctttcctgtgatttatacccagttaatgaatccagggttgccagattcggccctcgacataaacgagtgtctgaggggagcccgtcgcgacctgaaggtgtttgggaacttcccaaaacttattatgacccaggtgagcaaaagtctccaagttactcgcatatttctgcaggctctcaacttaggcatcgaggtgattaatacaacagaccacctaaagttctccaaggactgtggccgtatgctaactcgcatgtggtactgttcttattgccaggggctcatgatggtgaagccctgcggcgggtactgtaatgtggttatgcagggctgtatggcaggcgtcgtggaaattgataagtactggcgtgaatatatactgagtctcgaggaactggtgaatggtatgtatagaatctatgacatggagaacgttttattggggctcttcagcacgatccacgactctatccagtatgtgcagaagaacgcaggtaaactgacaactacagagaccgagaagaagatctggcactttaaatacccaatattttttctatgtatcggcctggatctacaaattggaaaactctgtgcccattcccagcagagacagtaccgcagtgcctattatcccgaggatctctttatcgacaagaaggtgctcaaagtagcccatgtcgagcatgaagaaaccctctcaagccggcgaagggaactgattcaaaagcttaagtcttttattagtttctattcagcccttcctggctatatctgctcacactcccctgtggcggaaaacgacactctttgttggaatggacaggagcttgttgagcgctacagtcagaaggcagcccgtaacgggatgaaaaatcaatttaatctgcatgaactaaaaatgaagggacccgagcctgtggtttcacagattatagacaagttaaagcacattaatcagctgctccgcacaatgtcaatgccgaaggggcgggtccttgataagaacttggacgaggagggcttcgaatctggtgattgcggggatgacgaagatgagtgcataggcggaagtggagacggcatgataaaagtcaagaatcagctgcgattcctagccgagctcgcgtacgatttagatgtggacgacgccccaggaaacagccagcaagctactcctaaggacaatgagattagcacctttcacaatctgggaaatgtacactcgccactcaaacttctgacttcgatggccatatctgttgtgtgtttctttttcctcgtccactag

SEQ ID NO: 118882 - DNA, 771 bp, synthetic construct
  misc_feature 1..771: note = Description of Artificial Sequence: Synthetic coding sequence
  source 1..771: mol_type = other DNA
taaaagccttgcggcggatactgcaatgtcgttatgcaggggtgcatggccggtgttgtggaaatcgacaaatattggagagagtatatccttagtctggaagaactggtaaacgggatgtatcggatttatgacatggagaacgtgctgctaggtctattttcaactatccacgattctattcagtacgttcagaaaaacgcaggaaaactgaccactaccatcggcaagctctgtgcccattctcaacagcgccagtaccgctctgcgtattaccctgaggacctgttcatagacaaaaaagtactgaaagttgcgcatgtggaacacgaagagacactcagctctcggaggcgggaactaatccagaagctcaaatcctttataagcttttactcggccctcccaggctatatttgctcacatagtccggtggctgaaaatgacactctctgctggaatggccaagaactcgtggagcggtatagccaaaaggccgcaagaaatggcatgaagaaccagtttaatctccatgaactgaaaatgaaagggcctgagccagtggtttcacagattattgacaaattgaaacacattaatcagctcctgcgcaccatgtcaatgcccaaggggcgagtgttggataagaatttagacgaggaaggttttgaatcaggcgactgcggagatgatgaagacgagtgcatcggcggcagcggtgacggcatgatcaaggtaaagaatcaactgagattcttggctgggaactag

SEQ ID NO: 118883 - DNA, 1581 bp, synthetic construct
  misc_feature 1..1581: note = Description of Artificial Sequence: Synthetic coding sequence
  source 1..1581: mol_type = other DNA
atggccggtacagtgcgcaccgcatgtttggtggttgccatgctgctctctctggactttccagggcaagcacagccacctccgcccccacctgatgcaacttgccaccaggtgcgctcctttttccagcgcctccagccggggcttaaatgggtccctgagacccccgtacccgaagccttcgaaatcgttgtgaggcatgctaagaattacacgaacgcgatgtttaaaaacaactatccctctctgaccccacaggctttcgagttcgtgggagaattctttaccgacgtgagtctctatatcttgggtagtgacattaacgtggacgatatggtaaacgagcttttcgactccctgttccctgtgatatatactcagctaatgaaccccggtctgcccgactcagcgctcgacattaacgaatgtctgagaggcgcaagacgggatctgaaagtctttggcaactttcccaaactgatcatgacacaggtctcaaaatcgctgcaggttacgcggatctttcttcaggctctcaacttagggatagaagttatcaacactaccgaccatcttaagttttcgaaggactgtgggcgcatgttgacgcgaatgtggtactgtagctattgtcaaggcctgatgatggtaaagccgtgtggaggatattgcaatgtagtcatgcaagggtgtatggccggcgtggtcgagatagataagtattggcgcgaatatatcctgagcctggaggaattggtgaacgggatgtatcgcatatatgacatggagaacgtcctgcttgggttgttctctaccatccatgatagcattcaatacgtacaaaagaatgcaggcaagcttactactactattggaaaactgtgcgcccatagccagcagagacaataccggagcgcctactacccagaggatttgtttatcgacaaaaaggtactgaaggtcgcccacgtagagcacgaagaaactttaagcagcaggcgccgggagctgattcagaagctgaagtcgttcatttctttctatagcgcgctgcctgggtacatttgctcccattcaccagtggcggagaacgacactctttgctggaatggccaagaactggtggagagatacagtcagaaggccgcaagaaacgggatgaagaatcagtttaacctccatgaactgaaaatgaaaggccccgagcccgttgtcagccagatcatagataagctgaagcacatcaaccaacttctgaggactatgtcgatgcctaaggggcgcgtcctggataaaaacttggacgaagagggtttcgagtccggcgattgtggcgacgatgaagacgaatgtatcggcggatctggggacggaatgataaaagtgaagaatcagctccggtttctcgcagaactcgcctacgacctggacgttgacgatgcgcctggaaattcccagcaggcaactcctaaagataatgaaatcagcaccttccataacctgggaaatgtgcatagcccactgaagctcctgacaagcatggccatttcggtcgtgtgcttctttttcctcgtgcactag

SEQ ID NO: 118884 - DNA, 1671 bp, synthetic construct
  misc_feature 1..1671: note = Description of Artificial Sequence: Synthetic coding sequence
  source 1..1671: mol_type = other DNA
atggcacgcttcgggttacccgctttgctgtgtactctggctgtgttaagtgccgctctccttgccgccgagctcaaaagcaagtcttgtagtgaagttagaaggctttatgttagcaaaggcttcaacaaaaatgatgctcccctacatgagattaacggggatcatctgaagatttgtccccaagggtcaacatgctgcagtcaggagatggaggagaagtacagtctgcagtcaaaagatgacttcaagtcagtggtttctgagcaatgtaatcacctgcaggcagtctttgccagccgatacaagaaatttgacgagtttttcaaagagctgttagagaatgccgagaagtccctcaacgacatgttcgtcaaaacgtatggccacctgtatatgcaaaatagtgagctgttcaaggatctttttgtggagttaaagcgatactacgttgtcggtaacgtgaatcttgaagagatgctgaacgatttctgggctcgactcctcgagaggatgttccggctggtaaatagccagtatcatttcactgatgaatacctggagtgcgtctcaaagtacactgaacagcttaagcctttcggggacgtgcctcggaaactaaaactgcaggttaccagagccttcgtcgctgctcgtaccttcgcccagggactcgcagtggccggagacgtagtgtctaaggtgagcgttgtgaaccctaccgctcaatgcacacatgccctgttgaagatgatctactgctcacactgcagaggcctggtgaccgtgaagccatgctacaactattgctccaatattatgcgcggctgcctcgcaaaccagggcgatctcgacttcgagtggaataacttcatcgacgctatgctgatggttgccgagcgcctggaaggcccctttaacatagaatcagtcatggacccgatagatgtgaagatcagcgacgccatcatgaacatgcaggacaattcagtgcaggtcagccaaaaagtgtttcaagggtgcggcccacccaaacccctgcctgccggccggatttcccggagcataagtgagtcagccttttctgctcgcttccgaccccatcaccctgaagagagacccactactgctgctgggacaagcctcgataggttggtgacggatgtgaaggagaaacttaaacaagcaaaaaagttttggtcgtctctgcccagcaatgtgtgcaacgacgagagaatggccgcaggaaatggcaatgaagatgattgctggaacgggaaaggcaagagccggtacctgtttgcagtaaccgggaatggcctggctaaccagggaaacaatcctgaggtacaggttgataccagcaagcccgacatcctgatcttaagacagataatggcattaagagtaatgacatctaaaatgaaaaatgcttacaatggcaatgatgtggattttttcgatatttctgatgagtcctctggagaagggagcggttctggttgtgaatatcaacaatgcccaagcgagttcgactacaatgcgactgatcatgcgggaaagtcagccaacgaaaaagctgattctgccggcgtgaggccaggggcccaggcttacttactgaccgtgttctgtatcctgttcttagtaatgcagcgagaatggagatag

SEQ ID NO: 118885 - DNA, 1461 bp, synthetic construct
  misc_feature 1..1461: note = Description of Artificial Sequence: Synthetic coding sequence
  source 1..1461: mol_type = other DNA
atggaggagaagtactccctgcagtctaaagacgacttcaagtctgtggtgtccgaacagtgtaatcacttgcaagctgtgttcgctagtaggtacaaaaaatttgatgaattcttcaaggagttgctcgaaaacgctgagaaaagcttgaatgacatgtttgtgaaaacctacggccacctctacatgcagaattctgagcttttcaaagatttgtttgtcgagctgaaacgctactacgtggtgggcaatgtgaacctggaagagatgctgaacgacttctgggctcgcttgctggagcggatgttccgcctggtgaacagccagtaccactttaccgacgaatatctagagtgcgtcagcaagtataccgagcaactgaaaccctttggcgacgtcccccgtaagctgaaacttcaggtgacaagagctttcgttgctgctagaacattcgcccaggggctagctgtcgcaggagatgtggtaagcaaagtttccgttgtaaacccgacggcgcagtgtacacacgctctgctgaagatgatctattgttctcactgtcgagggctggtgaccgtgaaaccttgctacaattactgttcgaacatcatgagggggtgcctcgcgaaccagggagatctcgacttcgaatggaataactttattgacgccatgctgatggtggctgagcgtctggaaggtccttttaatatcgagagcgtgatggacccgatcgatgtgaaaatcagcgatgccattatgaatatgcaggacaacagcgtacaggtctcccagaaggtgtttcagggctgtggccccccgaagcctttgccagccggacggattagcaggtcaatttctgagtccgcgttttccgcacgcttccggccacaccacccagaagagagacctacaaccgcagctgggacaagcctcgaccggctggtgaccgatgtgaaggagaaattgaaacaagcaaaaaaattttggtcttctcttccctcaaacgtttgcaacgatgaacggatggccgcaggcaacgggaacgaggacgattgttggaacgggaaggggaaatctcggtatctgtttgccgtgaccggcaacggtctggctaaccagggaaacaaccccgaagtccaggtggacacctcaaaacctgacatactgattctccggcaaattatggccctgagggttatgacctcaaaaatgaagaacgcttacaacgggaacgatgtggacttctttgatatctctgatgaatccagcggagagggctctggttcgggctgtgaataccagcagtgcccatccgagtttgattataacgctacagaccatgctggcaagtccgctaacgaaaaggctgattctgctggcgtaaggcccggagctcaagcttatttactgaccgtgttttgcattctgtttctggtcatgcagagagagtggagatag

SEQ ID NO: 118886 - DNA, 1653 bp, synthetic construct
  misc_feature 1..1653: note = Description of Artificial Sequence: Synthetic coding sequence
  source 1..1653: mol_type = other DNA
atggcgagattcggcctgccagcgttgctgtgcacactggccgttctctccgccgctctgttggctgccgagctgaaaagtaaaagctgctccgaggttaggcgactctacgtcagtaagggatttaacaagaacgacgctcccctacacgagattaatggcgaccacgaggatctgtccccaggcttttacctgctgttaagccgcgacgggggatactcactgcagtcgaaggatgattttaagtcagtcgtgtcagaacagtgcaaccacctccaagcggtttttgcctcgaggtacaaaaagtttgacgagttttttaaagaactgttggagaatgccgaaaaatccctgaatgatatgttcgttaagacctatggccacttgtacatgcaaaatagcgaattattcaaagacctgttcgtggaactaaagcgctattatgtcgtggggaatgtaaatctggaagaaatgctaaacgacttctgggccagactgctggagcggatgttcaggttggtcaattctcagtaccactttacggacgagtacttagaatgtgtgtctaagtacacagaacagcttaaaccattcggggacgtgccgcggaagctaaaactgcaggtcacacgagcttttgtcgccgcaagaaccttcgcacagggcctcgccgtggccggcgatgtggtgtccaaagtgtcagttccaagttgtactcacgcactgctcaagatgatatactgctcccattgtaggggtctcgtgaccgtcaaaccctgttataactattgctccaatattatgcgcggctgtttggcaaaccagggagatctggactttgagtggaataactttatagacgcaatgctgatggtcgccgaacgtctcgaggggcctttcaatatagagagcgtgatggaccctatcgacgtcaaaataagtgatgcaatcatgaacatgcaagacaacagcgtacaagtctctcagaaggtgtttcaaggatgtgggccacctaagccgctcccagctggacggattagccggagcatttcagaaagtgccttctcagccagatttagaccgcaccaccctgaagagcggcctacaaccgccgctggcacctctttagacaggttagtcactgacgtcaaggagaaactgaaacaggccaagaaattctggtcaagcctgccgtcaaatgtttgtaacgatgaacgtatggcagcggggaacggcaacgaagatgattgctggaacgggaagggaaagtcgcgatatttgtttgcggttaccggcaatgggctagctaatcaggggaataacccggaagtccaagtggatactagcaagcctgatattcttattttacgacagattatggcgttgagggtgatgacatcaaagatgaagaacgcatacaacggcaacgatgtggacttcttcgatatctccgacgaatcaagcggggaagggagtgggtcaggctgtgagtatcagcagtgtcctagtgaattcgattacaatgctacagatcatgccggaaagtctgcaaatgagaaagctgatagcgccggagtaagaccaggggcccaggcttatttattaacggttttctgtattttattcctagtgatgcagcgggagtggcgatag

SEQ ID NO: 118887 - DNA, 1719 bp, synthetic construct
  misc_feature 1..1719: note = Description of Artificial Sequence: Synthetic coding sequence
  source 1..1719: mol_type = other DNA
atggacgcacagacttggcctgtgggattccgctgtctgctgctgttggctcttgtggggagtgccaggagcgaaggagtacagacttgtgaggaggttcggaaacttttccagtggcgtctgctaggcgctgtcagaggcttgccagactctccccgagcaggcccggacttgcaagtgtgtatctccaagaagcccacctgctgcaccaggaaaatggaagagcgctatcagattgccgctcgtcaagatatgcaacaattcctgcagacaagctcatctactttgaagtttctgataagcagaaacgccgctgctttccaggaaaccctggagacgttaatcaagcaggctgagaattacacaagtattctgttctgtagcacttaccggaatatggcccttgaggctgccgcctctgtacaagaattcttcacagacgtgggactgtacttatttggcgcggacgttaacccggaggaattcgtgaaccggttcttcgactccctctttcccttggtgtataaccatcttataaatccgggggtcacggactcttctcttgagtattcagagtgtattcggatggctaggcgcgatgtgtccccattcggcaacatcccccagagagtgatgggtcagatgggcaggtcactgctgccctcccgtacctttctccaggccctaaacctaggaattgaggtgatcaatacaactgattatctgcatttcagcaaggagtgttctcgcgccctcttgaaaatgcaatattgtccccactgccaggggttggcactcactaagccctgtatggggtactgccttaatgtcatgagaggctgcctagcacacatggccgagctaaacccgcactggcatgcttacatcaggtcactagaggaactgtctgatgccatgcacggcacatatgatattggccacgtgctgctgaatttccacctcttagtcaacgacgccgttctccaggcacatcttaacggtcagaagttgttggaacaggtgaacaggatctgtggaagacctgtaagaacccccactcagagtcctcgttgctcttttgatcagtctaaagagaagcacggaatgaagactactactcggaatagcgaagaaaccttagccaaccgtcgcaaagaatttatcaactctcttagactttataggtctttctacggcggcttagcagaccagctctgcgctaacgagctggccgctgccgatggtctgccttgctggaatggagaggatatagtgaagtcctacactcagcgagtagtcggtaacggaattaaagcacaatccggaaaccctgaagtgaaagttaaagggatagaccctgtaatcaaccagattatcgataagctgaaacacgtagttcaactgcttcaaggccggtcaccaaaacctgacaaatgggaactgttgcagctgggcagcgggggagggatggtagagcaagtttctggcgactgcgacgatgaagatggctgtggaggaagcgggagtggtgaagtaaagcgcaccctcaagattactgactggatgccagacgatatgaacttctctgatgtgaaacagatccaccagactgatactggtagcacactggacaccaccggagccgggtgcgcagtggcaaccgaaagtatgacattcaccctgatctctgtcgtcatgttgctgcccggaatttggtag

SEQ ID NO: 118888 - DNA, 1668 bp, synthetic construct
  misc_feature 1..1668: note = Description of Artificial Sequence: Synthetic coding sequence
  source 1..1668: mol_type = other DNA
atgccgtcctggatcggtgctgtgatactccctctgttggggctgctcctaagcctgcccgccggagcggatgttaaggcacgtagttgcggagaagtgcggcaggcttacggagccaagggttttagcctggcagatatcccataccaggagatagcgggggagcacctgcgcatctgcccgcaggagtatacctgctgtacaacggagatggaagataaactctctcaacagtccaagctggagtttgagaacctggtagaggaaaccagccacttcgtaagaacgactttcgtttcacgacataaaaaattcgatgagttctttcgggagttgctggagaatgccgaaaagtctctgaatgacatgtttgtcagaacatacggcatgctttacatgcagaactctgaagtcttccaagacctgtttacagaactcaagcgttattataccggggggaatgttaacctggaagaaatgcttaatgacttctgggcccggcttctggagaggatgtttcagctaattaatccacagtaccacttcagcgaggactatttggagtgcgtatccaagtataccgaccagcttaagccattcggggatgttcctagaaaactcaagatccaggtgactcgggcttttatcgccgcgcggactttcgtgcaagggctgaccgtgggcagagaggtcgccaaccgggtgtccaaggtctcccctactccaggctgcatcagggccctgatgaaaatgctgtattgcccatattgtcgagggcttcctacggttaggccatgtaacaactattgcttgaatgtgatgaagggatgtcttgccaaccaggccgaccttgacactgaatggaatctcttcattgatgcaatgctactcgttgctgagcgcctggagggaccttttaacatagaaagtgtaatggaccccatcgacgtcaagatcagcgaagcaatcatgaacatgcaggaaaatagtatgcaggtgagcgccaaagtgtttcaggggtgtggtcagccgaagcctgctcccgccttgcgtagcgcccgttccgcccccgagaatttcaacaccaggttccgaccatacaatccagaggaacggccgacaaccgccgccggtacaagtcttgaccgactcgtgaccgatattaaggaaaagctaaaactgtccaaaaaagtttggagtgccctcccgtatacgatctgcaaggatgaaagcgtcaccgccgggacaagcaatgaggaagaatgttggaacggccactccaaggcccgttacctgccagaaatcatgaatgacggactgactaaccagattaataatccagaagttgatgtcgacattactcggcctgatacattcatcaggcagcagattatggcacttagagtgatgactaataagttgaaaaatgcgtacaatgggaacgacgtcaattttcaagataccagtgacgagagttctgggagcggctcaggttcagggtgcatggacgatgtctgccctaccgaattcgaattcgtgaccactgaggcccccgccgtagacccggatagacgcgaggtggactctagcgccgcccagcgaggccacagcctgctgtcttggagcctcacttgcattgtacttgcactacagaggttatgtcggtag

SEQ ID NO: 118889 - DNA, 582 bp, synthetic construct
  misc_feature 1..582: note = Description of Artificial Sequence: Synthetic coding sequence
  source 1..582: mol_type = other DNA
atgcaatccctgatgcaggctcccctgttaattgcactgggccttctgttggccgcccctgcccaagcgcacttgaaaaaaccaagtcagcttagttcattcagctgggacaactgcgacgaaggaaaagatcctgcagtgatccgcagtctgactctcgagcccgatccaatcatcgtacctggtaatgtgactctcagtgtgatggggagcacctccgtgcccctttcctccccactgaaggtggacctggtgctggaaaaggaggtagcgggtctgtggatcaaaataccatgcacagattacatcggaagttgtactttcgagcacttttgtgacgtgcttgacatgctgataccaactggagaaccctgccccgaacctcttcgaacctacggcctgccgtgccattgtccattcaaagaagggacgtacagtttgccaaagtcagagttcgtggtcccggacctggagctgccctcttggctaacgactggcaattataggattgagtctgtcctgagttccagcggaaaacggctgggctgcatcaaaatcgccgccagcctgaagggcatttag

SEQ ID NO: 118890 - DNA, 1140 bp, synthetic construct
  misc_feature 1..1140: note = Description of Artificial Sequence: Synthetic coding sequence
  source 1..1140: mol_type = other DNA
atgggatgcctgggaaattcaaaaactgaggatcagcgcaatgaagaaaaggcccaaagggaggctaacaaaaaaattgagaagcagctgcagaaggataaacaggtgtatagagcgacccacagattgttgttgctgggcgcaggtgagagcggaaaatctactattgtgaagcaaatgcgtatcttgcatgtgaatgggttcaatggcgacgagaaggctactaaggtgcaggacatcaagaacaacctcaaggaggcaatcgaaaccatcgtagctgcaatgtccaatctggtgccaccagtcgagcttgcaaatcctgaaaatcagttccgggtagattacatactgtctgtgatgaatgtgcccgacttcgactttcctccggaattctacgagcatgcaaaagccctgtgggaggacgagggcgtgcgcgcttgttacgagcggtccaatgaataccagctgatcgattgcgctcagtactttctggataaaatcgatgtcataaagcaggccgactacgtgccctccgatcaagaccttctgaggtgccgggttctgacctccggtatttttgagactaaattccaagttgacaaggtgaattttcacatgtttgacgtaggtggccaacgggacgagcgccggaagtggatccagtgcttcaatgacgttaccgctatcattttcgtcgttgcatcatcctcctacaacatggtgatacgggaagataaccagactaacaggctccaggaagctttaaatctgtttaagagcatatggaacaataggtggttgcggaccatcagcgtgatcttattcttgaataagcaggacttgctggcagaaaaggtcctggccgggaagtcaaagatcgaggactactttcctgaatttgcacgctacaccacgcctgaggacgccactccggagccaggcgaggatccccgggtgaccagggctaagtattttattagggatgaatttcttagaatcagcactgctagcggggacggacgacactattgttacccgcattttacatgtgctgtggacactgagaatattcgtagggttttcaatgactgtcgagatataatccagaggatgcatctgcgacagtacgaactactgtag

SEQ ID NO: 118891 - DNA, 1143 bp, synthetic construct
  misc_feature 1..1143: note = Description of Artificial Sequence: Synthetic coding sequence
  source 1..1143: mol_type = other DNA
atgggctgtttgggtaactccaaaacggaggatcaacggaatgaggaaaaggcccagagagaagcgaataagaagattgaaaagcagctgcagaaggataaacaggtttaccgcgctacccatcgtctcttgctgttgggcgctggcgagtccgggaagagcacgattgtcaagcagatgcgcatactccacgtgaacggtttcaatggcgatagcgaaaaagctaccaaggtccaagatatcaagaataacctgaaggaagcaattgaaacaatcgtcgccgccatgtctaatctggtccctcccgtggaactggctaatcctgaaaatcagttccgcgttgattacatactctcggtcatgaatgtgcccgacttcgatttccccccggagttctacgagcacgcaaaagccctgtgggaagatgagggcgtgagagcatgctacgagcggagcaatgagtaccaactcatcgactgcgcccagtactttctggacaaaatcgacgtcatcaagcaggcagattatgtgccttctgaccaggatctgctgcgctgccgcgtcctaacctccggcatatttgaaactaaattccaggtggacaaagttaactttcacatgtttgacgtcgggggacagagagatgaaagaagaaagtggatccagtgttttaacgacgtaactgccatcatcttcgtagttgcctcctcctcctacaacatggtgataagggaggacaaccagacaaatagactccaggaagcattgaacctgtttaaatccatctggaataataggtggctgcgtaccatttccgtgattctttttctgaataagcaggaccttttggcggaaaaagtactggccggaaagagcaaaatcgaggactactttcccgaattcgcacgctatactactcccgaagatgccacgcctgaaccaggcgaagatccgagagtgacacgcgccaaatactttattcgggacgagttcttgcgcattagcaccgctagtggagacggccgccattactgctatcctcattttacatgcgcggtagacaccgagaatatacgtagggtctttaacgattgcagggatattattcagaggatgcacttgaggcaatacgagctgctctag

SEQ ID NO: 118892 - DNA, 738 bp, synthetic construct
  misc_feature 1..738: note = Description of Artificial Sequence: Synthetic coding sequence
  source 1..738: mol_type = other DNA
atggatcgccgaagccgggcacagcagtggcgacgggccaggcataattacaatgacctatgtccaccgatagggcgtcgagccgccactgctctgctgtggttgagctgcagcatcgccttgctcagggcattagccacctctaatgcgagagcccagcaacgggctgccgcccaacaaagacgctccttccttaatgcccatcacaggagcggcgcccaagtgtttcctgagtctcctgaatctgagtcagatcacgagcatgaagaggcggacttggagctgagcctacccgaatgcctagaatacgaggaggagtttgattatgaaactgaatctgagactgagtcagagattgaaagtgagaccgacttcgaaactgaacccgagacagccccgacaacagaacccgagacagagcctgaagatgatagagggccggtggttccaaagcactccacgtttggccagtcactgactcaaagactccacgcattaaaactgagatcgcctgacgcatccccgtcaagggcccccccaagcacccaagagccccaatcacccagggagggtgaggaacttaaaccagaggacaaagaccctcgggacccagaagagagtaaggagcccaaggaggagaaacagcgtagacggtgcaagcctaagaaacccacaagaagggacgcctctcctgaatccccttctaagaaaggacctattcctatcaggaggcactag

SEQ ID NO: 118893 - DNA, 1188 bp, synthetic construct
  misc_feature 1..1188: note = Description of Artificial Sequence: Synthetic coding sequence
  source 1..1188: mol_type = other DNA
atgggctgcctgggtaactcaaaaactgaagaccagaggaatgaggagaaggcccaaagggaagccaacaagaaaattgagaagcagctccagaaggacaagcaggtctatcgagcgacacataggctgctgctgctgggggccggcgaatcaggtaagagcacaatcgttaaacagatgcgcatccttcatgtcaacggctttaatggcgaggggggcgaggaggacccccaggcagcccggtccaactcagatgggtcggaaaaagctactaaagttcaggatataaaaaacaatctcaaggaggccattgagactattgtagccgccatgagcaatctggttcctcccgtggaactcgctaacccagaaaaccaattccgcgtggattacattttgtccgtaatgaatgtcccagattttgatttcccacctgagttttacgaacacgctaaggctctttgggaagacgagggagtccgggcctgttacgagcgcagtaatgagtatcagctaatcgattgtgctcagtacttcttggataaaattgatgtgatcaaacaggccgattacgtgcccagtgaccaagacctcctgcgttgtcgcgtgctaacctccggcatcttcgagaccaagttccaggttgacaaagttaacttccatatgtttgacgttggcggccagcgtgacgaaaggcggaagtggattcagtgtttcaatgacgtaaccgcgatcattttcgtcgtcgcttcatcctcgtacaacatggttatcagagaggacaaccagaccaataggttacaggaggctctgaatctttttaagtctatttggaacaatcgctggctgcgaactatctctgtgatactgtttcttaacaaacaggatttactcgctgagaaggttcttgcggggaagagtaaaatcgaagattactttcctgagttcgctcggtacaccactcccgaggacgctacacccgagccgggtgaggatccaagggtgacaagagccaaatatttcatcagagatgagttccttcgcatttccaccgcctcaggggacgggaggcattactgttacccacactttacatgcgccgtagatacagaaaacattcgcagagtgtttaacgactgccgtgatattattcagcgcatgcacttgcgacagtatgaacttctgtag

SEQ ID NO: 118894 - DNA, 738 bp, synthetic construct
  misc_feature 1..738: note = Description of Artificial Sequence: Synthetic coding sequence
  source 1..738: mol_type = other DNA
atggatcggaggtcgcgcgcgcagcaatggcggcgtgcaagacataactacaacgatctatgccctccaatcggccggcgggcagctacggcgctcctgtggctgagctgtagtatcgcacttttgagggctttggcgacatcaaatgcaagggcccagcagcgggccgcagcccagcaaagacggtctttcctgaacgctcatcaccgaagcggcgcacaggtcttccctgagagtccggagtcagagtcagatcacgaacacgaggaggcagacctggagctgtctctcccggagtgccttgagtacgaagaggagtttgattacgagaccgagagtgaaaccgaaagtgaaatagagagcgagactgattttgagactgagcccgagactgcccctaccaccgagcccgagaccgaacctgaagacgaccggggcccggtggtgcctaaacacagtactttcgggcaaagtttgactcagcgcttgcatgccctgaagcttaggtcacctgatgcgagtccatcccgagccccgccgagcacacaggaaccgcagtcccctagggagggtgaggagctgaagccggaggacaaagatcccagagacccagaagagtccaaagagccaaaagaggagaagcagaggcgcaggtgtaaaccaaagaagcctacccgtcgcgatgcctcccctgaaagtccttccaagaagggccccatccccatcaggaggcactag

SEQ ID NO: 118895 - DNA, 483 bp, synthetic construct
  misc_feature 1..483: note = Description of Artificial Sequence: Synthetic coding sequence
  source 1..483: mol_type = other DNA
atgggctgcctgggcaactctaagactgaagaccaaaggaacgaagagaaagcacagagagaggcaaacaaggaggataatcagacaaatagactccaggaggcgctgaacctctttaagtcaatctggaacaataggtggcttagaacaatctccgttatcctgttcctcaacaagcaggacctactggccgagaaggtactggccggtaagtctaagatcgaggactactttcccgagttcgctcgatacactacacccgaggacgcaaccccagagcctggtgaagacccgagggtgactcgcgcgaagtattttatacgtgatgagttcctgcgtatcagtacagcatccggcgatggtcggcactattgttatcctcatttcacctgtgcggtcgacaccgaaaatatcaggagggtttttaacgactgcagggatatcatacagaggatgcatctgcggcagtacgagttgctgtag

SEQ ID NO: 118896 - DNA, 1185 bp, synthetic construct
  misc_feature 1..1185: note = Description of Artificial Sequence: Synthetic coding sequence
  source 1..1185: mol_type = other DNA
atgggttgcctaggcaactctaagacagaggaccagaggaacgaggaaaaagcccagcgggaagccaataaaaagatcgagaaacaactgcagaaagacaagcaagtttacagggccacacatagactgctgctgctaggagcaggcgagagcggaaagagcactatcgtgaagcaaatgcgtattttgcatgttaatggctttaacggggagggcggagaggaagatcctcaggctgcccggagtaattccgacggcgaaaaagccacaaaagtacaggatatcaagaacaacttgaaagaggcgatagagacaattgtcgcagccatgagtaatctggtgccgcctgtggaacttgccaaccccgaaaatcaatttcgggtggactacattctcagcgttatgaatgtgccagattttgactttccccccgagttctacgagcatgcaaaagcactgtgggaagacgaaggggtccgggcttgctacgagcgttccaatgagtatcagcttatagactgcgcccaatattttttggataaaatagatgtgatcaagcaagccgactatgtgccatcagatcaggatttactccgctgccgagttctgacctctgggatctttgagacgaaatttcaggtcgacaaggtcaatttccatatgtttgatgtaggcgggcaacgcgacgagcgcaggaaatggatacagtgttttaatgacgtgaccgctataattttcgtagtagctagcagtagctacaacatggtgataagggaagataatcagaccaacagattgcaggaagccctgaatctattcaagagcatttggaataaccgatggttacggaccatctctgttattctttttctgaataaacaggatctgctggctgaaaaggtcctcgcggggaagagcaaaatcgaggactatttccccgagttcgctaggtacaccactcctgaagacgctacccccgaaccgggagaagaccccagggtgacaagggctaagtactttatcagagacgagtttctgcggatttctaccgcctcgggggatggcaggcactattgctacccccactttacctgcgcggtagataccgagaatatcagaagggtgttcaacgattgtcgggatataatccagagaatgcacctaaggcagtatgaattgctgtag

SEQ ID NO: 118897 - DNA, 1143 bp, synthetic construct
  misc_feature 1..1143: note = Description of Artificial Sequence: Synthetic coding sequence
  source 1..1143: mol_type = other DNA
atgggctgcttgggaaactccaagaccgaggatcagcgcaacgaagagaaggctcagagggaagccaataagaagattgagaagcaattacaaaaggacaaacaagtgtatagggccactcatcgcctgctgctactcggcgccggcgaaagcggcaagtcaacaatagtaaagcagatgcgcattttacacgtgaacgggtttaatggggattctgaaaaggcaacaaaagtccaggatattaagaataatctcaaagaggccatcgagaccatcgtcgcggcaatgagcaacttggtgccccctgtggagctcgccaatccagaaaatcagttcagagtcgactacattctctctgtaatgaacgttccagacttcgatttcccgcctgagttttacgagcacgcaaaagctctatgggaagatgagggggtgcgcgcctgttacgagcgaagcaatgagtaccaattgatcgattgcgcacaatacttcctggacaagatcgacgtgatcaaacaagccgattatgtaccatcagatcaggaccttcttagatgccgggtcctgacctctggcatctttgagaccaaattccaggtggacaaggtgaacttccatatgtttgatgtgggcgggcagcgcgacgagcggcgcaaatggatccagtgtttcaacgatgtcaccgccatcatctttgtggtggctagctcttcctacaatatggttatccgggaggacaatcagacaaatcgcctccaggaagcattgaatttgtttaaaagcatttggaacaatcgttggttgaggaccatctcagtgatactctttctcaataagcaggatttacttgctgagaaggtgcttgcgggtaaatctaaaattgaggattactttcctgagttcgcaaggtatacaacccctgaggatgctacgcctgagccgggcgaagacccccgcgttaccagagcgaagtacttcatacgggatgaattcttgaggatatccaccgcaagtggggacggcagacactattgttacccccactttacctgcgcagttgataccgagaacataaggagagttttcaacgattgtcgggatatcattcagagaatgcacctgcgacagtacgaactgttatag

SEQ ID NO: 118898 - DNA, 738 bp, synthetic construct
  misc_feature 1..738: note = Description of Artificial Sequence: Synthetic coding sequence
  source 1..738: mol_type = other DNA
atggaccggagaagccgtgcgcagcaatggcgccgggcacgacataactacaatgacctatgccctccaattggccgtcgagcagctacagccttactgtggctcagctgttcaattgctctgttacgggcccttgccacaagtaacgccagggcacagcagcgagccgctgcccagcagcgccgatctttcctcaacgcccaccatcgcagcggtgctcaggtgtttcccgagagcccggaaagtgaatctgaccacgaacacgaagaggctgacctggaactgtccctccctgagtgccttgaatacgaggaggagttcgactatgaaacagagtctgagacagaatctgagatcgaatccgagaccgacttcgagacagagccggagactgctccgacaactgagcccgagacggagcccgaggatgaccgtggcccagtcgtgcctaaacactccacctttgggcagtccctgacccagcgcctgcacgccctgaaactaaggtccccggacgcttcaccttcccgggccccacctagtactcaggagcctcagtctccccgggaaggagaggaactgaagcctgaagataaagatccaagagatcctgaggagagcaaagagccaaaagaagagaagcagaggagaaggtgcaagccgaagaaaccgacccgccgggacgcctctcccgagtccccttctaaaaagggtcctatccccatcaggcgccattag

SEQ ID NO: 118899 - DNA, 3114 bp, synthetic construct
  misc_feature 1..3114: note = Description of Artificial Sequence: Synthetic coding sequence
  source 1..3114: mol_type = other DNA
atgggcgtgcgtaattgtctctatgggaataatatgagcggccagcgggacattccccccgaaattggagagcagcctgaacagccacccctggaagcgcccggtgccgccgcaccaggcgctgggccttctccagcagaagagatggagacagaacctccacataacgaaccaattcctgtggagaatgatggtgaagcatgcgggccccccgaggtatcccggcccaacttccaggtcctcaaccctgccttcagggaggcgggggcccatgggtcatatagtcctccacccgaggaagcaatgccatttgaagccgagcaaccgtctctagggggattttggccaactctagagcaaccaggcttcccgtcgggtgttcacgctggacttgaagcttttggccctgcactgatggagcccggggcatttagtggagccagacccgggctgggcggttactcaccccccccagaggaggccatgccattcgaattcgatcagccggcccagagggggtgctcccagctcctcttacaggtgcccgacctggcaccaggcggccctggagccgcaggggtgcccggagcaccaccagaagagccacaagctctgaggccagccaaggctggcagccgcggaggctactcccctccacctgaggagacaatgcctttcgagctggatggcgagggctttggagatgactcgccaccccccgggttaagtcgcgtgattgcgcaggtcgatgggagctctcaatttgctgccgtggccgcttcttcagctgtaagactaaccccagcggccaatgctcctcccttatgggtacccggggccattgggagcccttcgcaggaggccgtaaggcccccgagcaacttcacaggctcctcgccgtggatggaaatttccggtccgcctttcgagattggcagtgcccctgccggcgtggacgacacacccgtgaacatggactctcctccaatcgctctggacggaccgccaattaaagtctcaggcgcccccgacaagcgggaacgcgctgagaggccgccagttgaagaagaagcggctgagatggaaggagccgctgatgcagcagaggggggtaaagttcctagcccaggttatggcagtccagccgccggtgccgctagcgccgacaccgctgcgagagctgccccggccgcgcccgccgaccctgatagtggcgctacccctgaggaccccgattcgggcacagccccagctgatcctgacagcggggcattcgcagccgaccctgacagcggagctgctcctgccgcgcctgcagatccagacagcggtgctgcccctgacgcaccagcagacccagattccggggcggctccggacgccccagctgatcccgatgcaggggccgcccctgaagccccggctgccccagccgcggcagaaacccgagctgcccatgtggctcccgctgccccggacgccggtgcccctaccgcaccggcggcgtcagctacgcgagcagcccaggtgcggcgggctgcttccgcagcccctgcttctggagctaggagaaaaatccaccttaggcctccaagcccagagattcaggcagctgatccaccaacgccaagaccaaccagggcttccgcatggcggggtaagtcggaatctagtcggggcaggcgcgtttattacgacgaaggcgtggcgagtagcgacgacgattcaagtggagacgagagcgatgatggaacctctggttgcctgagatggtttcagcaccgcagaaaccggcgccggcgcaagccccagcgcaatctgcttaggaacttcctggtacaggccttcggtggctgtttcggacgatcagaatctccacagccaaaggccagccgcagcttgaaagtgaagaaagtgcctctggctgagaagcgacgccagatgagaaaggaagccttagagaaacgggcccagaagcgagccgagaaaaaacggagcaaactgatcgacaaacagttgcaggacgagaaaatgggctatatgtgtacccatcggcttctgctgcttggtgccggcgaaagtggaaagtccaccatcgtgaagcagatgcgcattttgcacgttaacggtttcaatggtgagggtggagaagaggacccgcaagcggctaggtcgaattcagacggagagaaggctacgaaagtacaggacatcaagaacaatctaaaggaagctatcgaaaccatcgtggctgccatgtccaatctggtcccacccgtggagcttgccaaccctgagaaccaattccgcgtggattatattctgtccgtgatgaacgttcctgatttcgactttcctcctgaattctatgaacatgcaaaggctctctgggaggacgagggtgtgcgggcctgctatgaaagatcaaacgagtatcagctgattgactgtgcgcaatactttctggataaaatcgacgttatcaagcaggccgactatgtgccaagcgaccaggatctcctgcggtgccgtgtactcacaagcggcatcttcgaaaccaagtttcaggtagataaagtcaattttcacatgttcgatgtcggaggtcagagggacgaacgcaggaagtggatccagtgctttaacgatgtcaccgctatcatcttcgtggtcgcaagtagttcttataacatggtcattcgcgaggacaatcaaacaaataggctgcaggaagcattgaatttgttcaagtccatttggaacaataggtggctccgtacaatcagcgtgatcctctttctcaacaaacaggacctcctagcggaaaaggtgctggctgggaaatcgaagatcgaggactacttcccggaatttgctaggtacacgacacctgaggacgcgacacccgagcctggcgaagaccctcgcgtgacccgagcaaaatactttatcagagatgagttcctcaggatctccacagcaagcggggacggacggcattattgttaccctcacttcacctgcgccgtggacacggagaatattagacgagtgtttaacgactgtcgtgatatcatacagcgaatgcaccttagacagtacgagctgttatag

SEQ ID NO: 118900 - DNA, 342 bp, synthetic construct
  misc_feature 1..342: note = Description of Artificial Sequence: Synthetic coding sequence
  source 1..342: mol_type = other DNA
tgaactacagaaccggagactgagcctgaggatgatcgggggcctgtggtcccaaagcactctacctttgggcagagcttgacacagaggctgcatgcgttaaaattacgcagcccagatgcttcacccagcagagcgcccccttccacacaggaaccccagtcaccgcgcgagggagaggaactcaaacctgaagataaggatcctagggaccccgaggaatctaaggagcccaaagaggaaaaacagaggcgaagatgcaagccaaagaaacccacaaggcgcgatgctagccctgagagcccctcaaagaaaggccctatccctatccgcagacactag

SEQ ID NO: 118901 - DNA, 501 bp, synthetic construct
  misc_feature 1..501: note = Description of Artificial Sequence: Synthetic coding sequence
  source 1..501: mol_type = other DNA
cccgagagcgaatctgatcatgaacacgaagaagcggacttggagctctcactgccagagtgcctggaatatgaggaggaattcgactatgaaacggagtccgagaccgagtcggaaatcgaatctgaaaccgactttgaaaccgagccagagaccgcccccacaacagagcctgagactgagccagaggatgaccgggggcccgtggtccctaaacattctactttcggacagtcactaacgcagcgcctgcacgccctcaagttaaggagcccagatgcttccccctcaagagcgcccccatccacgcaggaacctcagtctccaagagagggagaagagctgaagcccgaggacaaggatccgcgcgatccagaggagtcgaaagagccaaaggaagagaagcaacgccggcggtgtaagccgaaaaagcccacacgcagagacgcaagcccagaatccccaagcaaaaaaggcccaatcccaatccgccgtcactag

SEQ ID NO: 118902 - DNA, 5580 bp, synthetic construct
  misc_feature 1..5580: note = Description of Artificial Sequence: Synthetic coding sequence
  source 1..5580: mol_type = other DNA
atggttgataaaaacatttacatcattcaaggcgaaattaatatagtggtgggcgccattaaaagaaatgccagatggagcacacatacccctctggatgaggagagagacccactgctgcacagctttgggcacctcaaggaggtcctcaactccatcaccgagttgtccgagattgagccgaatgtttttcttcggccctttttggaagtgattcggagcgaggacaccacggggccaataactggactggctttaaccagcgtgaacaagtttctgtcatacgcactcattgatcccactcacgagggtacagcagagggcatggaaaatatggccgacgctgtgactcatgcaaggtttgtggggaccgatcccgcctcagatgaagtcgtcctgatgaagattcttcaggttttacgcactttactgctgactccagtcggagcacacctaacaaatgagagcgtgtgcgaaatcatgcagagctgtttcagaatctgttttgaaatgcgattatcagagctgctgcgcaaaagtgccgaacacaccttggttgacatggttcagctcctcttcaccagactaccccaattcaaggaagagcctaaaaactacgtgggcaccaacatgaaaaagctgaagatgcgagctggcggaatgtccgattccagcaaatggaaaaagcagaagaggtccccacgccccccccgccacatgacaaaggtgacccctggttcggaactcccaactcctaatgggacgaccctgagttccaacttgacagggggaatgccctttattgacgttcccactcctatctcgagcgcgtcctctgaggcagcttctgctgtcgtgagcccttctacggatagcgggttagagttttcatcacagacaacatctaaggaagacctgacagatctcgaacaaccggggagtccaggatacagcacagctacagaaccgggtagttctgaactgggtgtgcctgaacagcctgacctgcaggagggcacgcacgtggaaaagtctcagagcgcaagcgtggaaagcatccccgaagtgcttgaggaatgtacctcccccgctgaccactccgactccgctagcgtgcacgatatggactatgttaaccccagaggagtgcggttcacacagtccagccagaaggagggtaccgcgctcgttccctacgggctgccatgcattagggaactgttcagatttttaatctccctgactaatccccacgacaggcataacagtgaagtgatgattcatatggggctacatttactgaccgtggccctcgaaagtgcacccgtggcacagtgccagaccctgctgggactcataaaggacgagatgtgccggcacttatttcagctgttatccatcgaacggctgaatctctacgcagcatcgctgcgggtttgcttcctgctgttcgaatcaatgagagagcaccttaaatttcagatggagatgtatatcaaaaaattgatggagattatcaccgtggagaatcctaagatgccttatgagatgaaagagatggccctggaagctatcgtgcaactgtggagaatcccctcttttgttacagagctttatatcaactacgattgtgattactactgtagcaatctgttcgaggagctgactaagctgttatccaaaaacgcttttcctgtgagtgggcagctgtacactacacatttgctgtccctagatgcactgctgactgtgatcgactccactgaggcccactgccaggcaaaggtcctgaatagccttacccagcaggagaaaaaggagaccgcacgtccaagttgcgagatcgttgacggcactagagaggctagtaacaccgagaggaccgcaagtgacgggaaggccgttgggatggcaagcgatatcccgggtctgcatttgcctgggggaggccgtctgcccccggaacacgggaagagcggttgcagcgacttagaggaggctgttgattcgggcgcagacaaaaaattcgccagaaagcctcctcgtttctcatgcctcttgcctgatcctagggagctaatcgagataaagaacaaaaaaaagctcctcatcactggcaccgaacagtttaatcaaaagcccaaaaaagggatccagttcctgcaggagaaggggctgctgaccattccaatggataatacggaggtagcacagtggctcagagaaaatccgaggttggacaaaaagatgatcggcgaatttgtctccgatcgaaagaacatcgaccttcttgagtcctttgtgtctaccttctcgtttcagggcttgcggctggacgaggcactgaggctgtatctggaggcgttccgacttcctggggaggctccggttatccagagacttctcgaggcgtttactgaacgttggatgaattgcaacggctctccgtttgccaattccgatgcttgtttttcgctggcctatgctgtcataatgctgaataccgatcagcataaccataacgtgcgtaaacaaaatgccccaatgacactggaggagttcaggaaaaacctgaagggcgtaaatggtggtaaagactttgaacaggatattttggaggatatgtaccacgccatcaagaatgaggaaattgtgatgccagaggagcagacaggcctcgtccgcgaaaattacgtctggaacgtcctgctgcaccgcggcgcaacacctgagggcatcttcctccgcgtgcccacagcatcctacgacctagatctgtttactatgacctggggccccaccattgcagccctgagctacgtatttgataaatctttagaagaaacaattatccagaaagcaatctctggcttccggaaatgcgcaatgattagcgcccactacggcctgtcagacgtgttcgataaccttattatctccttatgcaaattcaccgccctaagcagtgaaagcatcgaaaatctgcctagtgtgttcggaagtaacccaaaggcccatatagccgcaaagacggtgtttcacctggcccatcgacacggcgatatacttcgagaggggtggaaaaatatcatggaagctatgttgcagcttttcagagcccagctgcttcccaaagccatgatagaagtggaagactttgtcgaccccaatggcaaaattagcctgcagcgcgaggagaccccgagcaaccgcggagagagtactgtcctgtctttcgttagttggttgaccctgtcgggacccgagcagagctcagtcagggggccctccactgagaaccaggaagccaaacgcgtggcattagaatgtatcaagcagtgcgaccctgagaaaatgatcacagaaagcaagttcctgcaattggaaagcctacaagagttgatgaaagctctggtaagcgtgactccagacgaggaaacatatgatgaggaggatgccgccttttgtctggagatgctgctgagaatcgtgcttgaaaacagggaccgagtgggatgcgtctggcagacagtacgcgatcacttgtatcacttatgcgtgcaggctcaagatttttgttttctggtcgaacgggccgtggttggtctgctcagacttgcgatcagactcctacgacgagaggagatctccgctcaagtgctcttgtcactgcggatcctcttactgatgaaaccatccgtcctctctcgggtctcgcatcaggttgcttatggattgcacgagcttttgaagacaaatgctgccaatatccattccggcgatgactgggcaactctatttactctcctcgaatgcataggaagtggggttaaaccacctgctgcacttcaggcaactgcccgagccgatgctcctgatgcaggggcccagtccgattccgaactgccttcctatcatcaaaacgacgtgtcccttgaccgcgggtatacctcagactcagaagtgtatactgaccatggacggcctggcaagatacacaggagtgccactgacgcagacgtggtaaatagcggatggcttgtggtcggtaaagatgatgtcgataacagcaagcctggaccttcgcgtcccggtccttcacccctaatcaaccagtactccctgaccgtgggactggacttgggtccccatgataccaagtctctcctcaagtgtgtggagtcgttaagtttcatcgtgagggacgctgcccacattacacccgacaactttgagctgtgcgttaaaacactccgaattttcgtggaggcttctctcaatggaggctgcaaaagccaagagaagcgaggaaaatctcataaatatgattccaagggaaatcggtttaagaagaagagtaaggaaggatctatgctccgacgccccagaactagttctcagcatgcgagccgcggaggacagtccgacgacgacgaggatgagggagtgccagcctcttatcacacggtctctttgcaggtgtcccaggacctcctggacctgatgcacacattgcatactcgcgccgcctccatttattccagctgggccgaagagcagagacacttagagaccggcggccaaaaaattgaggctgacagtcggacgctctgggcccactgctggtgtccactgctgcaggggatcgcttgtctctgctgtgacgcaagacgccaggtgcgaatgcaggcccttacctaccttcaacgcgccctgctggtccatgatctgcagaagctggacgccctggaatgggagagttgttttaacaaagtgctgttccctttgttgacaaagctactggagaacatttcgcccgctgacgtggggggtatggaggaaactagaatgagagcaagtacactcctgagtaaagtgttcttgcagcatcttagcccactcttgtctctgtccacttttgcagctttgtggctgaccattctggacttcatggacaaatacatgcacgcaggaagcagtgatcttctttctgaggcaatcccagagtctcttaagaatatgctgctggttatggatacagctgaaatctttcattctgccgatgcacgggggggcggtccctctgcactgtgggaaataacatgggagagaatcgactgttttctgcctcatctgcgcgacgagttgttcaagcagaccgtgattcaggatccgatgcccatggagccgcagggtcagaagccgctcgcaagcgcccacctgactagcgcggctggggacacccggactcccggccatccacccccacctgaaatcccttcagagttgggcgcttgcgactttgagaaacccgagtcgccgcgcgcggcttcttcttcttcacccggttctcctgtagcctcaagtcctagcagactgtcgcctacccctgacggacctcccccccttgcacagccgcccctaattctgcagcccctggctagtcctctccaggtgggcgtacctccgatgacactgccaattatcttgaatcctgctctgatcgaagccacatcaccagtgccactccttgccacaccacgccccaccgatcccatccctacaagcgaagttaactag

SEQ ID NO: 118903 - DNA, 1749 bp, synthetic construct
  misc_feature 1..1749: note = Description of Artificial Sequence: Synthetic coding sequence
  source 1..1749: mol_type = other DNA
atggggggatcaagcccagtaactagcaaggcgatagtcgatgcagatggtaggatatatatcagaaactggcaaggcggcattctgtccgggggatttgagaaaaatcccaaaccaattttcactgaggggaagaaccaactcgaaattcagaacctgcaggaggactgggatcatttcgaacctcttttatcgtcactcttgagacgaatgccagagcttgaaactctcgaaataatgaaactcgtcaattgtcccgagacctttacccccgatatgaggtgtattatgggggaaagcccggccgttcagggatattttgtgctcgctgggatgaacagtgctggactttccttcgggggcggcgccggaaaatatctggcggagtggatggtgcacggctaccccagtgagaacgtatgggagttggacctgaagaggtttggagccctccagagttccagaacattcctgagacatcgcgtcatggaggtgatgcccctgatgtatgatctcaaggtgcctcgctgggatttccagacggggcggcagcttaggacttcccccctctatgaccgcctggacgcacaaggcgctagatggatggaaaaacacgggtttgagagacctaagtattttgtgccccccgacaaggacctgctggcactggaacagtcaaagaccttttataaacctgactggtttgatatcgtagagtctgaagtaaagtgctgcaaagaagctgtgtgcgtcattgatatgagctcattcactaagttcgagataacgagcacaggagaccaggcacttgaagtccttcagtatctgttttccaatgatcttgacgtcccggtagggcacatcgtacacacaggcatgctgaatgagggtggaggctacgaaaacgattgctccatcgcccgccttaataagcggagcttttttatgatcagccctacagatcagcaggtgcactgctgggcgtggctgaaaaaacatatgcccaaggactccaacctcttgctcgaagatgtcacgtggaagtacaccgcactaaaccttattgggcctcgggccgtggatgtcctaagtgagctatcctatgcgcctatgactccagaccatttcccatcgctgttttgcaaggaaatgtccgtggggtacgccaacgggattagagtgatgtccatgacccataccggcgaaccaggcttcatgctgtatatcccaattgagggcatggacttcataggcagagatgccctgctgcagcagaagcaaaacggggtttataagaggctgacgatgttcattctggacgatcacgacagtgacctagacctgtggccatggtggggggagccaatttacagaaatggacagtatgtggggaaaactacttctagcgcctactcctacagtctggaacgacatgtgtgtcttggtttcgtccataatttctctgaggataccggcgaagagcaagtggtcacagctgactttatcaatagaggtgaatatgaaatcgatattgcagggtaccgctttcaggctaaggcaaagctttatcctgtggcctccttgttcacccagaaacgccggaaagatgacatggagcttagtgccttcttagccctgcctcctccacctcccaacatccatagtggcctgttctttccttcgcatccatctctgtctttctcgtggtggcaagaggtgtgcctgaccggccagaagcaggcgccttag

SEQ ID NO: 118904 - DNA, 3540 bp, synthetic construct
  misc_feature 1..3540: note = Description of Artificial Sequence: Synthetic coding sequence
  source 1..3540: mol_type = other DNA
atggccgcatgtgggcgcgtgcgaagaatgttccgcctgtcagcggcgctgcatttgctgctgttatttgccgccggtgccgagaaacttcccggacagggtgtccactcgcaggggcaaggcccgggcgccaattttgtgtcctttgttgggcaagctggtggaggcgggccagcagggcagcagctgccgcagcttccacaatcctctcagttgcagcagcaacagcagcagcaacagcagcagcagcagcctcagcctcctcagccacctttcccagccggcggtccaccagctaggagaggaggggcaggcgcaggcggtggttggaaattagcagaagaggagtcatgtagagaagacgtcacacgcgtatgtccaaaacacacctggtctaataatcttgccgttctcgagtgtctacaggatgtgcgcgagcccgagaatgaaatctcctctgattgtaatcatctgctgtggaattataagcttaacctgacaaccgatcccaaatttgagtccgtggcaagagaagtgtgcaagtccacgataactgagataaaggaatgcgcggatgaacccgtcggaaagggctacatggtgtcctgcctggtggaccatcgcggaaatatcaccgaataccaatgtcatcagtatatcaccaaaatgacagctataatattctcggactatcgccttatttgtggcttcatggatgattgtaaaaatgatatcaatattctgaaatgcggttcaatacggctgggcgagaaggatgcacacagccagggagaagtggtgagctgcttagagaaggggctggtgaaggaggcggaagaaagagagcctaaaatccaagtctcagagctgtgcaaaaaggccattctcagggtcgcagagttgtcatccgatgatttccacttggatcgccatctgtacttcgcatgccgagacgacagggagaggttttgtgaaaacacacaagctggggagggccgtgtctacaagtgcttgtttaatcataagttcgaagaatcaatgagcgagaaatgcagagaagctctgaccacaagacaaaaactgatcgctcaagactacaaggtgagttatagtctagcgaagtcgtgtaagagcgacctcaaaaagtatcgctgtaatgtggagaatctgcctcggtccagggaggcccggttgtcttacttgctgatgtgccttgagtcagctgttcaccggggcagacaggtcagcagtgagtgccagggcgaaatgctggactacagacgaatgctgatggaggatttcagcctgtcaccagaaatcattctctcctgcaggggggagatcgaacatcattgtagcggactccaccgcaagggacggacgttgcattgcctcatgaaggtggtaagaggcgaaaagggaaacttaggtatgaactgccagcaagcgttacagaccctgatccaagagactgaccctggggcggactacagaattgaccgagcactgaatgaggcatgtgagtcagtcatccagactgcctgcaagcatatacgttccggcgacccaatgattctgtcctgccttatggaacatttatacacagagaagatggttgaggattgcgagcacagactgctagagcttcaatattttattagccgtgactggaagcttgaccccgtcctataccgaaagtgtcagggagatgcatcacggctttgccacactcacgggtggaatgaaacctccgagtttatgccccagggcgccgtgttcagctgcttgtatagacacgcctatcgtaccgaggaacaaggaaggcggttgagcagagagtgtcgcgctgaagtgcagcggattctgcatcaaagagctatggacgtaaagctggatccagctctacaggacaaatgtctcattgatctcgggaagtggtgcagcgaaaagacggaaactgggcaggaactggagtgcctccaagatcacttggacgatctggtggttgagtgcagggacattgtcggtaacttgacggaactggaatcggaggacattcaaatcgaagcgttactgatgcgggcctgcgaaccaattatccagaacttttgtcacgatgtagccgataatcaaatagattccggggatctcatggagtgcctgattcaaaacaagcaccaaaaggacatgaacgagaagtgcgccatcggagtgactcactttcaactggtgcagatgaaagactttcgtttctcttataagtttaagatggcgtgcaaagaagacgtgctgaagctgtgtcccaatatcaagaagaaagtggatgtggtcatttgtctgtcaacgacagttaggaacgacacacttcaagaggctaaagaacaccgggtttctctgaaatgcagacggcagctaagagttgaagagcttgaaatgacggaggatatcaggcttgagcccgatctgtatgaggcgtgcaaatctgacatcaagaatttctgttctgcagttcaatatggaaatgcacaaatcatcgaatgcctgaaggagaataagaagcagttgtcaacacgctgtcaccagaaggtgttcaagttgcaagagacagagatgatggaccccgaactcgactatacccttatgagagtttgtaagcagatgattaaaaggttctgccctgaggcggactccaagaccatgcttcagtgcctgaagcagaacaagaactctgaactaatggatcccaaatgtaaacaaatgattaccaagagacagatcactcaaaatactgattatcgcctgaatcctatgctgcggaaggcatgcaaagccgacatacccaagttttgtcacggtatactgaccaaggccaaagatgattctgagctggaagggcaggtgatctcctgtctgaagctgcggtacgcggaccagaggcttagcagtgattgcgaagaccagatccgtatcatcatacaagaatctgccctcgattaccgactcgaccctcagctccagctccattgctcagatgagatcagttcattatgtgccgaagaagcggcggctcaggaacagacaggccaagtagaagaatgccttaaggtgaacctgttaaaaataaaaaccgagctgtgcaaaaaggaggttttgaacatgctgaaggagtcgaaggcggatatatttgtcgaccctgtcctgcacacggcctgcgctttggacattaagcatcattgtgccgctattactcccggtcggggtaggcagatgagttgcttgatggaggcactcgaggataagagagtgaggctacagcccgaatgtaagaagagactcaacgacagaattgagatgtggtcctacgccgccaaggtggccccagctgacggcttttctgatctggccatgcaggttatgacatccccaagcaaaaactatattctgtccgtgatctccggatctatttgcatactgttcctgattggtctaatgtgtggtaggatcacaaaaagagtcaccagagaattgaaggacagatag

SEQ ID NO: 118905 - DNA, 3579 bp, synthetic construct
  misc_feature 1..3579: note = Description of Artificial Sequence: Synthetic coding sequence
  source 1..3579: mol_type = other DNA
atggccgcctgtgggagagtcaggaggatgttcagactgtctgcagccctgcacttgctgcttttgtttgccgctggagcagagaaactccccggccaaggcgtccacagtcagggccagggacccggtgccaattttgttagtttcgtggggcaagcaggcggcggcgggcccgccggtcagcaacttccgcaactgcctcagtccagccagctgcagcagcagcagcagcagcagcaacagcaacagcagccacagccaccacagccaccatttcctgctggaggacccccagctcgaagagggggcgctggggcgggaggcgggtggaagctcgcagaggaagagagttgcagagaggacgttacacgcgtgtgtccaaagcacacctggagcaataacctcgcagtgctagaatgcctacaggacgtaagggaactgctgtggaactataagctcaaccttacaaccgatcctaaattcgaatccgtcgctcgcgaagtttgtaagtccacaattactgagattaaagaatgcgcggacgaacctgtgggaaagggatatatggttagctgtctcgtggatcacagagggaacattaccgagtaccaatgtcatcaatacattacaaagatgaccgccatcatcttctccgactatagactgatttgcggtttcatggatgattgcaaaaatgacataaatatattgaaatgtggaagtatacgcttgggagaaaaggatgcgcattctcagggcgaggtggtaagctgcctggaaaaggggctcgtgaaggaagccgaggagcgggagcctaagattcaggtctcggaactgtgcaaaaaggccatcttgcgcgtagccgagctgtcatctgatgatttccatctagaccggcatctttatttcgcatgcagagatgaccgggaacgtttttgcgagaatacacaagccggcgagggacgcgtttataagtgtctgtttaatcataaattcgaagaaagcatgagcgagaagtgcagagaagcactgacaaccaggcaaaagctgatcgcccaggattataaggttagctattccttggctaagtcctgcaagtcggacctcaaaaaatatagatgtaacgtggagaacctgcctcgctccagagaggctagattgagttaccttctcatgtgcctcgagtcagctgtgcatagagggcgccaggtgtcctccgaatgtcagggagagatgcttgattacagacgcatgctgatggaagatttttcactctctccagagattattttgtcctgccgaggcgaaattgaacatcattgctcaggtctacatcgaaagggcagaactctccactgtctcatgaaggtcgttagaggcgagaagggaaatctgggaatgaattgccagcaagccctgcaaacactgatccaagaaaccgatccaggcgctgattacagaatcgacagagcgctcaatgaggcatgcgaaagcgtgatacaaactgcctgtaagcatatcagaagcggggatcctatgatcctcagctgcctgatggagcacctgtatacggaaaagatggtggaagattgtgagcacaggctgctggaattgcagtatttcataagtcgagactggaagctcgaccctgtgctctatcgtaagtgccagggggatgcctctagattatgccacactcatgggtggaacgaaacatctgaattcatgccccagggtgctgttttctcatgtctttacagacacgcgtatcgcactgaggagcagggccgacgcctgtctagagagtgcagggccgaagtccagcggatcctccaccaacgtgccatggatgttaagctcgaccctgcgctgcaggacaagtgcctgatagacctcggtaaatggtgttccgaaaaaaccgagacaggtcaggaactggagtgcctgcaggaccacttggatgatttggtggtggagtgtagagacatagtcggcaacctaaccgaactcgagagtgaggacatccagatagaagcgttattgatgagagcctgtgaacctattatccagaacttctgtcatgacgtggcagacaatcagattgacagcggggacctcatggagtgtctgatccagaataaacaccagaaagatatgaacgaaaaatgtgctatcggagtaacccatttccaattagtacagatgaaggactttcggttttcttacaaattcaaaatggcttgcaaggaagacgtgctaaagctttgcccgaatattaagaagaaagtcgatgtggtgatttgcctatctacgaccgtgaggaatgatacacttcaagaagctaaggagcaccgcgtgagtttgaaatgccggaggcagctcagagtcgaagaactggagatgactgaggatatcagacttgagccagatttatacgaggcctgtaaaagtgacatcaaaaatttttgcagcgcagtccagtacggtaatgcacagattatcgaatgcttgaaggagaataagaagcagctgagcacacggtgccatcaaaaggtattcaagctccaggaaacagagatgatggaccccgaactggattatacacttatgagagtttgcaaacagatgattaaaagattctgtccagaagcagacagtaaaaccatgcttcagtgtttgaaacagaacaaaaacagtgagctcatggatcccaagtgtaaacagatgattactaaaagacagatcacccagaatacagactacaggctcaaccctatgctgagaaaagcatgcaaagccgacattcctaagttttgtcatgggattttgacgaaggccaaggacgacagcgaattagaagggcaggtcattagctgcctgaagctacgctatgccgatcagcgcctgtctagtgattgtgaagaccaaattagaataataatccaggagtccgctctcgattaccgcctggacccacagcttcagctccattgcagtgatgagatcagcagtctgtgtgctgaagaggctgccgcacaggaacaaactggccaggttgaagagtgcctgaaggtgaacctgctcaaaatcaagactgagctgtgtaagaaagaagtcctaaatatgctaaaagagagtaaagccgacatctttgtggacccagttctgcacaccgcttgcgccctagacatcaaacaccattgcgctgcgattacccctggtcgaggaaggcaaatgtcgtgtctgatggaggctctagaggataaaagggtgcgactgcagcccgagtgcaaaaagcgcttaaacgaccgcatcgagatgtggagctatgccgctaaggtggcccctgcggacggatttagcgatctggctatgcaggtcatgacgtccccttccaaaaattatattctgtcggtgatcagcgggtctatctgcattctttttctgattggcctgatgtgcggcagaattacaaagagggtgacaagggaactgaaagatcgactacagtaccgcagtgagaccatggcatacaagggtctggtgtggagccaggacgtaaccggctcacctgcatag

SEQ ID NO: 118906 - DNA, 2091 bp, synthetic construct
  misc_feature 1..2091: note = Description of Artificial Sequence: Synthetic coding sequence
  source 1..2091: mol_type = other DNA
atgggaaacggcatgtgttcacgtaagcagaagcggatcttccagacgttgcttctcctgacagtggtgttcggatttttatacggcgctatgctctactacgagttgcagacacaattacgtaaagccgaagcagtggccctgaagtaccagcagcaccaggagagtctgtcagctcagctccaagtggtttatgagcataggagcagactggagaagtcattacagaaagagcgactcgagcacaaaaaggccaaagaagatttcctggtctacaaactggaggcacaggaaacccttaacaaggggcggcaggatagcaactcccgctactccgcgcttaacgtacagcaccagatgctgaagagtcagcacgaggagctgaagaaacagcatagtgacctcgaagaggaacacaggaagcaaggagaggatttcagccgcacttttaatgaccataaacagaagtatctgcagcttcagcaggagaaggaacaggaactgagtaagctcaaagagaccgtatacaatctcagagaggagaataggcagcttcgaaaagcccaccaggatatccacactcaacttcaggatgtgaaacagcagcacaaaaacttgctatcagaacatgagcagcttgtggttaccttagaggaccacaaatccgccctggcagccgcccagacccaagtggctgaatacaagcaactgaaagatacactcaatagaattccatctcttcgcaaacctgaccccgctgagcagcagaatgttacccaggttgctcacagcccccaaggctacaacacggctagggagaagccaacaagagaggttcaagaggtgtcacggaacaatgatgtttggcagaatcacgaggctgtgcctgggagagctgaggacaccaagctgtacgcccctacacataaggaggccgagtttcaagccccacctgaacctattcagcaggaagtagaacgacgggaacccgaagaacatcaggtcgaggaagaacacaggaaggctttggaggaagaggagatggaacaagtgggccaggcagagcatctggaggaggagcatgatcccagcccagaggaacaggatcgggagtggaaggaacagcacgagcagcgggaggcagctaatctgctggaggggcacgcaagggccgaggtgtacccaagcgcaaagcccatgatcaagttccagagtccatatgaagaacaattagagcagcaaaggctggccgtgcagcaggttgaagaggcccaacagctgcgcgagcaccaggaagctctgcaccagcagaggctccaggggcatctcctcaggcagcaggagcagcagcagcagcaggtggcaagagagatggcccttcagaggcaagccgagctcgaggagggtcgcccccagcaccaagagcagcttcgccagcaggcccattatgatgccatggataatgatattgtacagggcgccgaagatcaggggattcaaggtgaagagggcgcttacgaaagagataaccaacaccaggatgaagcagagggagaccccggcaaccgccatgagccaagggagcagggtcccagagaggccgatcccgaatcggaggcggaccgagccgccgtcgaagacattaacccggcggatgatccaaataaccagggtgaagatgaattcgaagaggctgagcaagtgcgagaggaaaatctgccagacgaaaatgaagagcagaaacagtccaatcagaaacaggagaacacagaagttgaggagcatttggtgatggcggggaaccccgaccaacaagaggataacgtggacgaacaataccaagaggaagccgaagaagaagtccaggaggacctcacagaagaaaaaaagcgcgagcttgagcacaacgccgaagagacctacggcgaaaatgatgagaatacagacgacaagaataacgacggggaagagcaagaggtaagagacgataaccggcccaagggccgagaggaacactacgaggaggaagaggaagaagaggaggacggagccgctgtcgcagagaaatcccatagacgcgcagagatgtag

SEQ ID NO: 118907 - DNA, 897 bp, synthetic construct
  misc_feature 1..897: note = Description of Artificial Sequence: Synthetic coding sequence
  source 1..897: mol_type = other DNA
atgacctctctcacccaacggagttccggtttggtgcagaggcggactgaagcatcacgcaacgctgctgacaaggaacgggccgccggggggggagccggaagctctgaggatgatgctcagagtagaagagacgaacaagatgatgatgataaaggggactctaaggaaactagactgaccctgatggaggaggtactgctgctaggcctcaaggatcgagagggatacaccagcttttggaatgactgtatctcaagcggtctgcggggttgcatgcttattgaactggctctacggggtcgcctgcagctcgaagcatgcggtatgaggaggaaaagcttgctgacccgaaaggtgatttgcaaatctgatgcacccacaggcgatgttctgctcgatgaggcccttaagcacgtgaaagagacccaaccccctgaaacagtgcagaactggatcgaactgctaagcggcgaaacttggaatccgctaaagttacactatcagctgcggaacgttcgggagcgtctagccaaaaacctggtggaaaaaggcgttctcactactgagaagcagaatttcttactctttgacatgacaacacatccactgactaataacaacataaaacaaaggctgataaagaaagtgcaggaagcagttctggataaatgggttaatgacccccatcgtatggatcgaagactgctcgctttaatatatctggcacacgcgagcgatgtacttgaaaatgcctttgcaccacttctcgatgaacagtatgatcttgcgactaagcgcgtaagacagctgctcgatttagacccagaagtggaatgcctaaaagccaatacaaacgaggtgctctgggcggttgttgccgctttcacaaagtag

SEQ ID NO: 118908 - DNA, 846 bp, synthetic construct
  misc_feature 1..846: note = Description of Artificial Sequence: Synthetic coding sequence
  source 1..846: mol_type = other DNA
atgacatcactgacccaacgatcctccggtttggtgcaaagacggaccgaggcgagtcgaaacgctgcagacagtagacgagatgagcaagacgacgatgataagggcgattcaaaagagacacgcctgaccctcatggaggaggtgctgctcctcggcctgaaagatcgcgaaggatacacgtctttctggaatgactgtatttccagcggcctccgcggatgtatgctcatagagctggcccttcgcgggcgtcttcagctagaggcttgtggaatgagaaggaaaagcctgctgacacggaaagttatctgtaaatccgacgcacctactggggacgttcttttggacgaagctctaaagcacgtgaaagagacgcagcctcctgagaccgtccagaattggatcgagttactttccggtgagacctggaatccccttaagcttcactatcagctcagaaatgttcgagagcgcctggctaagaatctggtagagaagggggtgttaacaactgagaagcagaacttcctgctctttgacatgacaacccaccctcttacaaataataatatcaagcaaagactgattaaaaaggtccaggaggccgtgctggacaaatgggtgaacgacccacatcggatggacaggcggctgttggctcttatctacttagcacacgcctccgacgtgctggagaacgctttcgccccgcttctggacgagcagtacgacctggccacgaagcgggtgcggcagttgttggacctggatcccgaggtggagtgtctgaaagcaaataccaatgaggtgttatgggctgtggtggccgcttttactaaatag

SEQ ID NO: 118909 - DNA, 858 bp, synthetic construct
  misc_feature 1..858: note = Description of Artificial Sequence: Synthetic coding sequence
  source 1..858: mol_type = other DNA
atgaccaccctgacccatagagccagacgtacagagatttctaaaaattcagaaaaaaaaatggaatccgaggaagactccaactgggagaagtcaccagacaacgaggactcaggcgactccaaagatattcgcctaactctgatggaagaggtcctgttgctcggcctaaaagataaggaaggctacacatcattctggaatgactgtataagctctgggctccggggcggaatactgatagagttggcaatgcggggaaggatctacctggagccgcctacaatgcggaaaaagaggctgctggatcgcaaagtcctgctgaagagcgactccccgacaggcgatgtactcctcgacgagacgctaaagcatattaaggccaccgagcccaccgagacagtccaaacctggatcgagctcctaacaggagaaacctggaaccctttcaaactccaatatcagctcagaaatgtgcgggaacgtattgctaagaacctcgtcgaaaagggaattctgaccacggaaaaacagaattttttgctcttcgacatgacgacgcatccggttaccaacactaccgagaaacagcgattggtgaagaaactgcaagattcggtgctcgaaagatgggtaaatgacccccagcgtatggataagaggaccctggccctattggtcttggcccatagcagcgatgtccttgagaatgttttctcctcgctgactgatgacaagtacgacgtggcgatgaacagagccaaggacttagtggaattagacccagaggtagaaggaactaagccaagcgcgactgagatgatttgggccgtgttagctgctttcaacaaatcgtag

SEQ ID NO: 118910 - DNA, 924 bp, synthetic construct
  misc_feature 1..924: note = Description of Artificial Sequence: Synthetic coding sequence
  source 1..924: mol_type = other DNA
atgactacacttactcatagggcccggaggaccgagatctcaaagaatagtgagaaaaagatggagagtgaagaagacagcaactgggagaaaagcccggataacgaagacagcggtgattctaaagacatcagattaacgcttatggaagaagtcctgttgctcggcctcaaggataaagaggctaatattaactcctggatcactcggtggctcactcccgtgatacccgccctttggggcgccgagggttataccagcttttggaacgattgcatttcaagtggcttacggggtggaatcctgattgaacttgcgatgcgcggccgcatctatctggaaccccctacgatgagaaaaaagcgactcctggaccgcaaggttctgctcaaatcggattctcccacaggagacgtgctcctcgatgagacacttaagcacatcaaggcaacagagccaaccgagaccgtccagacctggattgaactgctgactggagagacctggaacccctttaagctccagtatcagctgcggaatgttagagagcgaattgccaaaaaccttgtggagaagggtattctcactactgagaagcagaactttctgttgttcgatatgaccacacatccagtcaccaacacaacagaaaaacagcgccttgtgaagaaactacaagacagtgtactggagaggtgggtgaatgatccacagcggatggacaagaggaccctagccctgctggtgctagcacactcatccgacgttctagagaatgtatttagtagcttgaccgatgacaaatacgacgtggccatgaatagggccaaggacctggtggaattagaccccgaggttgagggaacaaaaccttcagccaccgagatgatatgggccgttctggcggcattcaacaagagctag

SEQ ID NO: 118911 - DNA, 810 bp, synthetic construct
  misc_feature 1..810: note = Description of Artificial Sequence: Synthetic coding sequence
  source 1..810: mol_type = other DNA
atgacgacactgacacacagagctcggcgtaccgaaatctccaagaattctgaaaaaaagatggaatcagaagaggactcgaattgggaaaaatcacctgacaatgaggactcaggcgactcgaaggatatccgccttaccctgatggaggaggtactgcttctgggactaaaagataaggaggcaaacattaattcgtggattactaggtggctgacacctgttattccggctctgtggggagcagaaggctataccagtttttggaacgattgcattagcagtgggctaagaggggggatcttgattgagctggccatgaggggaagaatctatctagagccaccaacaatgcgaaagaagagactacttgaccggaaggtcttactgaagagcgactctcctaccggggatgtactcctggatgaaacactgaagcacatcaaagcgacagagccaaccgaaacggtacagacttggatcgaactgctgactggggaaacctggaatcctttcaaactccagtatcagctgcggaatgtccgcgagcgtattgccaaaaacctcgtggagaagggcatattgacgaccgagaagcagaacttcttactctttgacatgacaacccaccccgtgacaaacaccactgaaaaacaaagactggtaaaaaagttgcaagactccgtgctcgagcggtgggtcaacgacccccaaaggatggataagagaactcttgcgctgttggtgctagctcattccagcgatgtgcttgagaatgtgttctcttctctaacagatgacaagtactag

SEQ ID NO: 118912 - DNA, 726 bp, synthetic construct
  misc_feature 1..726: note = Description of Artificial Sequence: Synthetic coding sequence
  source 1..726: mol_type = other DNA
atgaccactctcactcaccgagcccggaggaccgagatctctaagaactctgagaagaaaatggaaagcgaagaagactctaattgggaaaagtcgcccgataacgaagacagtggcgattctaaggacataaggttgactctgatggaggaagttttactgctgggtcttaaggataaggaagtcttgcttaagtcagattcacctacaggcgatgttctgttagacgaaactttgaagcacatcaaagcaacagagccaacagagacagttcagacctggattgagctgctgaccggggagacttggaatcccttcaaactacagtatcagctccgtaatgtgcgcgaaaggatcgctaaaaatctggtcgaaaaggggattctcaccactgaaaaacagaacttcctgctgtttgatatgacgacccaccccgtaacaaacaccactgaaaagcagcgcctagtcaagaaactgcaggactcagtactggaaagatgggtgaacgatccacaacggatggacaaaaggactctcgccctgctggtgttagcacattcaagcgatgtgttggagaatgtgtttagtagcctcaccgacgataaatatgacgtggccatgaatagagccaaagatctcgttgagctggatccggaagtggagggaacaaagccatccgctactgagatgatttgggctgtactggccgcttttaataaaagctag

SEQ ID NO: 118913 - DNA, 1323 bp, synthetic construct
  misc_feature 1..1323: note = Description of Artificial Sequence: Synthetic coding sequence
  source 1..1323: mol_type = other DNA
atgggcctcggcgtgtcagctgaacagccagccggcggcgccgaaggcttccacctgcatggcgtccaggaaaacagcccagcccagcaggcaggcctggagccatatttcgatttcatcatcacgattggacatagcaggttgaacaaggagaatgacaccctgaaggcccttctgaaggccaacgtagagaaacctgtcaagttggaagtttttaacatgaagaccatgagagtgcgggaagtagaggtggtgccgtctaacatgtggggcgggcaaggcctgttgggggcttccgtcaggttctgtagctttcggcgggccagtgagcaggtgtggcacgtcctggacgtggagccctcttctccagctgctctcgccggcctcaggccatatacagattatgtggtcggttcggatcaaatcctgcaggaaagcgaggattttttcaccctgatcgaatcacacgagggaaaacccttaaaactcatggtgtataatagcaagtctgactcctgtagagaggttacagtgactccaaacgcagcttgggggggggaaggatccctcggatgcgggatcgggtacggctacctgcacagaattcctactcagcccccttcttaccataagaagcctccaggaacacctcctcccagcgccctgccgctgggtgccccaccaccagatgctcttcctccgggcccaactcctgaggactctccttctctagaaacaggatccagacaatctgattacatggaagctttgctgcaggccccggggtccagcatggaggatccccttcctggaccagggtctcccagccatagcgcccccgatcccgatggcttaccccacttcatggaaacaccgcttcaaccccctccccctgtccaaagggtgatggaccccggctttttggatgtgagcgggatctccctcttggataattccaacgcttccgtctggcctagtctgcctagcagcacggagctgaccactactgcagtctcaacttccggccctgaagatatctgctcaagcagtagtagtcacgagcggggtggtgaagctacgtggtctgggtctgagttcgaagtaagcttcttagactctcctggagctcaggcccaggcagatcatctgcctcagctcactcttccggatagcctgacatctgctgcatccccggaggacggcctcagcgccgagttgctcgaagcccaagcagaagaagagccagcgtctacagaggggcttgacaccgggactgaagccgaagggcttgatagtcaggcgcagatttcaactaccgaatag

SEQ ID NO: 118914 - DNA, 4143 bp, synthetic construct
  misc_feature 1..4143: note = Description of Artificial Sequence: Synthetic coding sequence
  source 1..4143: mol_type = other DNA
atggcgtccggccgcgatgaacggccgccgtggcggctaggccggttactcttgcttatgtgcctgctgctgctgggaagctctgctagagcagcacatatcaaaaaagctgaagccacaacgacgacaacttctgctggtgcagaggctgcagagggccagttcgaccgctattaccatgaagaggagttggagtccgccctaagagaggctgcagctgccgggctccctggacttgcacgattgttttccatcggccggagtgttgaaggacggcctctctgggttcttcgactgactgcaggcctcggatcattgattcctgagggcgacgccggacctgatgctgcaggccctgatgccgcggggccactgctgcccggacggcctcaggtgaagctcgtgggtaacatgcacggcgatgaaaccgtcagtcgccaagtactaatttatctggctcgggagctagctgctggttacaggaggggagatccaagacttgtccggctgttaaacaccacagacgtgtacctccttccgtcccttaatccagacggctttgaacgcgcacgggagggtgattgcgggtttggcgacggagggccttccggcgcatctggccgcgataattctagaggtcgcgatctgaaccggtcatttccagatcagttcagtacaggagaaccacccgctttggatgaggttccagaggtgcgcgccctgatcgaatggatccggcgaaataagtttgttttatctggtaatttgcacggggggagtgtagtggcctcttatcccttcgacgactccccagagcacaaggctaccgggatttacagcaaaacctccgacgatgaggtgttcaagtacctcgctaaagcttacgcaagcaaccacccaattatgaaaactggcgagcctcactgtcccggcgatgaagacgagacattcaaagacgggatcaccaacggggcccattggtatgatgtcgaaggtggaatgcaggattacaactacgtatgggctaattgcttcgagatcactttggaacttagctgctgtaagtatccacccgcttctcagctacgccaagaatgggagaacaatcgagagagtctgatcacactcatagaaaaggtgcacatcggtgtcaaaggtttcgtgaaggatagcatcacaggctctggcctggaaaacgcaaccatatctgtggccggaattaaccacaatatcacaactggccggttcggagatttctaccgcttactcgtgccgggcacctacaacctgactgtggtcctaacaggctacatgcctcttaccgtgaccaacgtagttgtcaaagagggccctgcaacagaagttgatttcagcctgcgacccactgttacctctgtaatccccgacactactgaagccgtctccactgcctcgaccgtggcaattccaaatattctgagcggcactagctccagttaccagccgatccagcctaaggatttccatcaccaccactttcccgatatggaaatcttcttgagacgcttcgcaaacgagtatcccaacatcactaggttatatagtctcggcaaatctgttgagagccgggagctctatgttatggaaatctcagataatccgggtgtgcatgaacctggtgaacccgagttcaagtacattggaaatatgcatgggaacgaagtggtaggcagggaattacttctgaatctaatcgaatacttatgtaaaaacttcggcacagatcctgaagtgaccgatctcgtccacaacacacgcatccacttgatgccaagcatgaatcccgatggatacgaaaaatctcaggagggggatagtatatccgtaatcggccgaaacaattccaacaactttgacttgaaccggaacttccctgatcagtttgtgcagattacagatccaacgcaaccagaaacaatcgcagtgatgagttggatgaagtcatatcccttcgtactgtctgccaacctacacgggggctccctcgtcgttaattatccttttgatgatgatgaacagggcctcgctacatactctaagagccctgacgatgctgtgtttcagcagattgccctgtcttatagcaaggaaaattcacagatgttccaaggccggccctgcaagaatatgtacccgaacgagtacttcccgcatgggattaccaatggcgcctcatggtacaacgtgccaggcggcatgcaagattggaattacctccagaccaattgcttcgaagtcactatagagttaggttgcgtgaaataccctcttgagaaggagctgcctaacttttgggagcagaacagaagatctctaattcaatttatgaagcaagtacaccaaggagtccgcgggtttgtgctcgacgccacagatggacgcggaattctcaacgcgactatctcggtcgctgagatcaatcatccagtaactacgtacaagactggcgactactggagattactggttcctgggacttataagatcactgcgtccgcacgggggtacaatccggtgacaaaaaacgtcacagtgaagtcagagggcgctatccaggtcaactttaccctcgtcagatcttctacagactccaataatgagtccaaaaaagggaaaggggcctcctcatccactaatgatgcctcggatcccaccaccaaggagttcgagacattaataaaggatctctcagccgagaacggactcgaatcactcatgctgcgatcgtccagtaatcttgccttggctctataccgctatcattcatacaaggaccttagtgaatttcttcggggactggttatgaattacccacacataaccaatctgactaacctcggacagtccaccgaataccggcacatttggtcattggagatttctaataaacctaatgtttccgagcctgaggaacccaaaattcggtttgtagcagggatccatggaaatgcccctgtgggaacagagctgttactggcactggccgagttcctttgcttgaattacaagaaaaacccggcggtcacccagctggtggacagaactcgcatcgtcattgttccctcactcaatccggatgggcgggagagggcgcaggagaaagactgcacctccaagatcggacagaccaacgctcgcggaaaggatctcgacactgatttcactaataacgctagtcaacctgagaccaaggcaatcatagagaacctcatccagaaacaagatttctcactgagtgtggctctggatggcgggtccatgctggtgacatatccatacgataaacctgtacagactgttgagaacaaagaaactctgaagcacctggcaagtctatacgctaataaccatccctccatgcacatggggcagcccagctgcccaaataagagcgatgaaaacatccctgggggggtgatgcgtggagctgaatggcatagtcacctagggagtatgaaggattactccgtgacctacggacactgccctgagattacagtctatacatcctgctgttacttcccatccgcagcccgactcccgagcctttgggccgacaacaagagatccctgttatctatgttggttgaggtacataaaggggtgcacgggttcgtcaaagacaagaccggcaaacctatttctaaggcggttatcgtgttaaacgaagggataaaggtgcagactaaagaaggtggctacttccatgtgttgcttgcacccggtgtccataatattatcgccatcgcagacggctatcagcagcagcactcgcaggtatttgttcatcacgacgctgccagctccgtggtgattgtttttgataccgacaacagaatcttcgggctcccacgtgaattggtcgtcacggtcagtggcgccactatgtccgcactcattctgaccgcctgtatcatctggtgtatatgtagcataaagtccaataggcacaaagacggatttcataggctacgtcagcaccatgacgaatacgaggacgaaatcagaatgatgagcacgggttccaagaaatcccttctatcccacgagttccaggacgaaactgacactgaagaggaaaccttgtattctagtaaacattag

SEQ ID NO: 118915 - DNA, 558 bp, synthetic construct
  misc_feature 1..558: note = Description of Artificial Sequence: Synthetic coding sequence
  source 1..558: mol_type = other DNA
atgtttgaaactatggcaatagagatcgaacagttacttgcccgactgactggcgtgaacgacaaaatggctgaatatactaattccgccggagtccctagcctcaatgccgccttgatgcatacgcttcaaaggcacagagatattctgcaggattatacccacgagtttcacaagaccaaggctaactttatggcaatccgtgagagggagaatctcatgggctcagtgcgcaaggacattgaaagctacaagtcgggcagtggagttaacaatcggcggacagagttattcctgaaagaacacgaccacctgagaaacagtgataggttgattgaagagaccatcagcatagcaatggcaaccaaggaaaatatgacaagtcaaaggggtatgctgaagtccatccacagcaagatgaatacactggcaaatcggttcccagcagtaaattccctgattcagcgcattaacttaaggaaaaggcgcgattcactgattctgggaggagtgattggcatctgcactattttattactcctgtacgcgtttcattag

SEQ ID NO: 118916 - DNA, 525 bp, synthetic construct
  misc_feature 1..525: note = Description of Artificial Sequence: Synthetic coding sequence
  source 1..525: mol_type = other DNA
atggctgccggaacctcgagttattgggaggacttgaggaaacaagcacggcaattagagaacgagcttgacctcaagctggtctcctttagtaagctgtgcactagttattcacattcctcaacacgagacggacggcgggattcctctgataccaccccccttctgaacggcagctcccaggatcgcatgttcgagacaatggctattgagatagaacagttgcttgccaggctgactggggttaacgataaaatggctgaatacactaactctgccggcgttccaagcctgaatgcagctcttatgcacaccttgcagagacacagagatatactgcaagattacacacacgagtttcacaagacaaaggcaaattttatggcaatacgagaacgggagaacctgatgggcagtgtcaggaaggatatcgaaagctacaagtctggctccggggtcaataaccgccggaccgagttgttcctgaaggagcatgatcacctgcgcaaaggcttccagtggtag

SEQ ID NO: 118917 - DNA, 747 bp, synthetic construct
  misc_feature 1..747: note = Description of Artificial Sequence: Synthetic coding sequence
  source 1..747: mol_type = other DNA
atggccgccggaacctctagttactgggaggaccttcggaagcaggccagacagctggaaaatgagctcgatctgaagctggtgagcttctcaaaactgtgtacctcctactcccacagttcaacccgggacggacgacgcgacagctcagatactaccccccttctgaacgggtcaagtcaggatcgcatgttcgagacaatggccatcgagatcgagcagctgttggccaggctgacaggcgttaacgataaaatggctgaatacaccaacagtgctggtgtaccaagtctgaatgcagcattgatgcacactttgcagagacacagggatatattacaggactacacacacgagtttcataagacgaaggctaatttcatggccatccgcgagagggagaatttgatgggatccgtccgcaaagacattgagtcatataagtccggtagtggtgttaacaaccgaagaaccgagttatttctgaaagaacatgaccatttgcggaacagcgaccgcttgattgaagagactatctctattgcaatggccacaaaggaaaatatgacctcccaacggggtatgctgaagtccatccactctaaaatgaacacgttggccaataggttccccgccgtgaatagcttaatccaaagaattaacctacgcaagcgtcgggacagcctcatactgggcggggtgatcgggatctgtactatactgctgctgctctacgcatttcactag

SEQ ID NO: 118918 - DNA, 528 bp, synthetic construct
  misc_feature 1..528: note = Description of Artificial Sequence: Synthetic coding sequence
  source 1..528: mol_type = other DNA
atggccgctggcacatcttcatactgggaagacttgagaaaacaagcccggcagctggaaaacgaactagacctgaaactggtgagcttctccaagctctgtacctcttactcgcattcctctacacgggacggcagacgggataggtactcaagtgacaccacccccctcttgaatgggtcaagtcaagaccgcatgtttgagaccatggccatcgaaatcgagcagctcctcgcacgcctgacgggagttaatgataaaatggccgagtatactaacagtgcgggggtcccctccctgaatgccgctctgatgcataccctccaaagacatcgggacatactgcaggtgatctattgggcccgcgatgtctttatcattaccggcgtctgggtcttctttttcaacccctgtataggatatgttcatatctatctgaagggacagcgcgaaaagagcgaaaagattaatgccatgctgaagggcttagtgttacttttctttggagtcactatcatcaagttctag

SEQ ID NO: 118919 - DNA, 558 bp, synthetic construct
  misc_feature 1..558: note = Description of Artificial Sequence: Synthetic coding sequence
  source 1..558: mol_type = other DNA
atgtttgagaccatggcaatcgagattgaacaactcttggcccgcctcacaggcgtcaatgacaaaatggccgaatataccaatagcgccggagtgcccagcctcaacgccgcgttaatgcacaccttgcagcggcaccgggatattctccaagattacacccacgagttccacaagacaaaagccaactttatggccatccgtgagcgagaaaacctcatgggctcggttcggaaggatatcgaaagctacaagtcggggtctggcgtgaacaatcggcggacagagctgtttttaaaagagcacgaccacctccgcaactcagaccggctgatcgaagagaccatctctatcgccatggcgactaaggagaatatgacatcccagcgcggaatgctcaaaagtatccattctaaaatgaatacgctagcaaaccgattccctgcggttaactctttgatccaaaggatcaacctccgtaagaggagggactcactgatactaggcggagtgattggaatctgcacaattctactgcttttatatgccttccattag

SEQ ID NO: 118920 - DNA, 1350 bp, synthetic construct
  misc_feature 1..1350: note = Description of Artificial Sequence: Synthetic coding sequence
  source 1..1350: mol_type = other DNA
atgacttcattttatagtacaagctcatgccccttgggatgtactatggctcccggagcgcgcaatgtgttcgttagccctattgacgtcggatgccaacccgtggccgaggccaatgcagctagtatgtgcttattggccaacgtcgcgcatgcaaaccgtgtgagggtggggtctactcctttgggaagaccttcactgtgtctgcctcccaccagtcacacggcctgcccgctgcccggaacttgtcatatcccagggaatatcggtatctgtggcgcatatggcaaaaacactctgaacggtcatgagaaagagactatgaagttcttgaacgacagattagccaattatcttgaaaaggtgagacaattagagcaggaaaatgccgaactggagactacactgcttgaaaggtctaaatgtcacgaaagcacagtgtgtccagactatcagtcatattttcgcacgatcgaagagctgcagcaaaagatcctgtgttccaaagcggagaacgctagattgattgtgcagatagacaatgcgaagttggctgctgacgatttcaggatcaaactggaatccgaaagatccttgcaccaattggtggaggccgataagtgtggcactcagaagctcttggacgatgcaacccttgccaaagccgacttagaagcacagcaagaaagcctgaaggaggaacagctctctctcaaaagcaatcatgagcaagaggtgaaaatcttgaggagtcagcttggcgaaaaattccggatcgagctggatatagagcccacgatcgaccttaacagagttctcggcgagatgcgtgctcagtacgaggcaatggtggagacgaaccaccaagatgtagagcaatggtttcaggctcagtctgagggcatcagtctgcaagccatgtcctgctccgaagaactgcaatgttgccagagtgaaatccttgaactccgctgcaccgtcaacgctctagaagtggaacgccaggcccagcatactctcaaagattgcctgcagaattcgctctgcgaagccgaagacagatacggcacagaactggctcagatgcaaagcttgatcagtaacctcgaagagcagctgagtgaaattcgcgcggacctggagaggcagaaccaagaatatcaggtcctcctcgatgtgaaggcccggctggaaaacgaaatcgctacatacaggaatttgctcgaatctgaggattgtaagttgccctgcaacccatgttccacacctgcttcctgcacaagttgtccttcttgcgggccagttaccgggggaagccccagcggacatggcgcgtctatgggacgctag

SEQ ID NO: 118921 - DNA, 639 bp, synthetic construct
  misc_feature 1..639: note = Description of Artificial Sequence: Synthetic coding sequence
  source 1..639: mol_type = other DNA
atggatccactgttccagcagactcacaagcaggtgcacgaaatccagtcttgcatggggagactggaaacagcagataaacagtctgtacacattgtggagaatgagatccaagcctcaatcgatcagatctttagccggctagagcgtctcgagatcctgtcatcaaaggaacccccaaacaaacggcagaacgctcggctgcgagttgaccagctgaagtatgacgtgcaacatctgcaaactgccctccgtaactttcagcatcgacgccacgcgcgcgaacagcaggagagacagcgtgaagagttgctgtctcggacctttactactaatgatagcgatacaacaatacccatggacgagtccttacagttcaacagttctttgcagaaggtacataatggtatggacgatcttattctggacggacataatatcctggacgggctgagaacccagcggctgacactgaaaggtactcagaagaagatcctggatatcgcgaacatgttaggcctgagcaatactgtaatgaggctgatcgagaaaagagcgttccaggacaagtactttatgataggcggcatgttgctgacttgtgtagttatgtttctggtggtacagtacctcacgtag

SEQ ID NO: 118922 - DNA, 588 bp, synthetic construct
  misc_feature 1..588: note = Description of Artificial Sequence: Synthetic coding sequence
  source 1..588: mol_type = other DNA
atggatcccctgttccagcaaacgcataaacaggttcacgagattcagtcctgcatgggcagactggaaactgctgataagcaatctgtgcacattgtggagaatgagattcaagcaagcatcgatcaaatcttcagcagactggagcgcctggagattctgtcgtcaaaggagcccccaaacaagcgacagaacgcacggctgcgggtggaccaactgaaatacgatgtgcagcatcttcaaacagcactacggaattttcagcaccgtcgtcacgcgagagagcagcaagaacggcaaagggaggagcttcttagcagaacatttaccactaacgattcggacactactattccaatggacgagtcactacagttcaactctagcctgcagaaggtgcataatggtatggacgacctgatcctggacggacataatatcctagacggcttacggacgcagaggttgaccttgaaagtaggtagtctgctgggggaccgcgaaaaagcttcttgtttcagtctcattcaacagttcagcaactgtgtgtatattctgattacttgtccccagatagtgatattctag

SEQ ID NO: 118923 - DNA, 699 bp, synthetic construct
  misc_feature 1..699: note = Description of Artificial Sequence: Synthetic coding sequence
  source 1..699: mol_type = other DNA
atggacccactgtttcagcagacccacaaacaggtgcacgagattcaatcatgcatgggaaggctcgagacagccgacaaacagtccgtgcacatcgtcgaaaatgaaattcaggccagtattgatcagatcttcagtcggctggagcggctggagatcctaagctcgaaagagccgcctaataaaagacagaacgctcgccttagggtggaccagctgaagtacgacgtacaacatctacaaacggctctgaggaactttcagcacaggagacacgcgcgggaacaacaggagaggcaacgggaagagctcctgtcaagaaccttcactactaacgattcagatacaacaattccaatggacgaaagcctgcagtttaactcatcgttacaaaaggtccacaacgggatggatgacttgatcctcgatggccacaacattctcgacggactgagaactcagcgcctgaccctgaagggcactcaaaaaaagattttagatatcgcaaacatgctgggccttagtaacactgtgatgaggctgattgagaagcgggctttccaggataaatacttcatgatcgagaccaggagccaccacgtggcccagaacggccccgagctgctgtcgtccagggacccgccagcctccgctagtagaagcgccgggatcattgagttctccgagaaaataacctag

SEQ ID NO: 118924 - DNA, 984 bp, synthetic construct
  misc_feature 1..984: note = Description of Artificial Sequence: Synthetic coding sequence
  source 1..984: mol_type = other DNA
atggcagcggcggctgccatggcagagcaggaaagtgcaaggaacggtgggagaaatcgcggcggcgttcagcgagtggaaggtaagctcagagcctctgtggaaaaaggagactattatgaggcccaccagatgtaccgaactctctttttcaggtatatgtcacagagtaagcacactgaagcccgtgaactgatgtattcaggagccctgttgtttttcagccacggtcagcaaaactccgccgccgacctctctatgctcgtcctggagagcttggagaaagccgaagtggaggtagctgatgagctattggagaatctcgcaaaggttttctcccttatggatccaaattccccagagagggtgacctttgtttccagggcgcttaagtggagctccggtggttctggcaagttaggacatccgcgcctacatcaattactggctcttacactttggaaggagcagaattactgcgagtctcgctaccattttctgcacagcgctgatggcgagggatgcgccaacatgctggtggagtatagcacttcgagagggttcagatctgaagtcgatatgttcgttgcgcaggccgtcttgcagttcctctgtctgaagaataagtccagcgcctctgtcgtcttcactacttatactcaaaagcatcccagcattgaggatggccctccgtttgttgagccccttcttaatttcatctggttcctgctgctggctgttgatggaggaaagttaaccgtgtttacagtgctttgcgagcagtaccagccttccttgcggagagaccccatgtacaatgagtatctggatagaattggacagctgttttttggcgttccgccgaaacagacctcaagctacggagggttactggggaatctgctcaccagcctcatgggttctagtgaacaggaggatggtgaagaatcacccagtgacggttcccctatcgagctggactag

SEQ ID NO: 118925 - DNA, 1779 bp, synthetic construct
  misc_feature 1..1779: note = Description of Artificial Sequence: Synthetic coding sequence
  source 1..1779: mol_type = other DNA
atggctctccctgaagaggcaaaaattaaggacgcctaccacatgttgaagcggcaaggaatcgtgcagtcagacccacctattccagtcgaccggacactcatcccaagcccacccccgcgcccaaagaatcccgtgttcgatgacgaagagaaatccaaactgctggcaaaactgctgaaatccaagaatcctgacgacctccaagaggcaaacaaattgattaagtcaatggtaaaggaggacgaggcccgcatccaaaaggtgacgaaacgcttgcacactctggaagaggtcaataacaatgtgcgacttttgtctgagatgctgctccattatagccaggaagacagctcagatggagatcgagagttgatgaaggagctcttcgatcagtgcgagaataaacgccggaccctcttcaagcttgcctcagagacagaggataatgacaactctctgggagatattttgcaggcctctgacaacctgtctcgagtgatcaactcttataaaacgattattgaggggcaagtcattaacggcgaggtggctactttgaccctcccagattccgagggaaacagtcagtgcagcaatcaaggaacattaatcgatctcgctgaactcgatacaacaaactcgctatcttccgtacttgctccggcccccaccccccctagttcagggatcccaatcctgcccccaccacctcaggctagtggaccccctaggagccgcagcagctcacaggcggaggccaccctgggaccttcttccacttccaatgcgctttcgtggctggacgaggaactgctgtgcttgggattagctgaccccgctccgaatgtcccaccaaaggagtccgccgggaatagccaatggcatctgctgcaaagagaacagagtgaccttgatttcttttctcccaggccgggaactgcggcttgtggcgctagtgatgcaccactcctgcagccctcggccccttcctcctcatcttcgcaggcccccttacccccaccttttcccgcccctgtggtgccagcttccgtgccggcaccttccgcagggtcctcgttattctcaaccggcgtcgccccagctttggctccgaaggtggaacctgcggtgcctggccaccacggactcgcactgggcaatagcgctctacatcatctggacgccctcgatcagctcctagaggaggctaaggtgacctctggcctagtcaagccaaccacgtcacccctgataccaaccaccacacctgccaggcccttattgcccttcagtaccggtccaggtagtccactgttccagcctctctccttccaatctcaggggagtccgcctaagggccccgagttgtccttggcttcgatacatgtgcccctggaatcaataaaacctagtagtgccctgcctgttacagcctacgacaagaacggttttcgtatcctgttccactttgccaaggagtgtcccccagggcgccctgatgtgttggtggtggtagtttccatgctgaatacggctcccctacccgtgaaaagcatagtgcttcaggccgctgtgccaaaatccatgaaggttaaactgcagccgccttccggtaccgagttaagtccattttcaccaatacaacctccagccgccatcacacaggtgatgctgttggcaaaccctctgaagaaacaggtcctgtcatttctggggaaagcttgtctgcagccctgggggcaagccatcttgctgaccacctcatgcctggcatag

SEQ ID NO: 118926 - DNA, 1956 bp, synthetic construct
  misc_feature 1..1956: note = Description of Artificial Sequence: Synthetic coding sequence
  source 1..1956: mol_type = other DNA
atgaagaattgtggcagacggtttcataacgaggtagggaagttcagatttctgaacgagctcattaaagtcgtgtcccccaaatacctaggggatagagtgagcgagaaggtgaaaacgaaagtgatcgagctactgtatagctggaccatggccctgccggaagaggcaaaaatcaaggatgcatatcacatgctcaagcgtcagggcattgtacaaagcgaccccccaatcccagtggatcgaactttaataccgagcccccctcctcgccccaagaatcccgtgtttgacgacgaagaaaaaagcaaactgctcgctaaactcctaaaaagcaagaatcccgacgatctccaggaggctaataagttgataaagtctatggtcaaggaagacgaagcccgcattcagaaagttacaaagagattacacacacttgaagaggtgaacaacaacgttcggctgctgtccgagatgttactccattattcacaagaagactcttcagatggggaccgagagctgatgaaagaactcttcgatcagtgtgagaataagaggagaacgttgtttaagctcgccagcgagacggaggataatgataattccctcggcgatattctgcaggccagtgataatctgtcacgagtcattaattcctacaagaccatcatcgagggccaagtgatcaacggagaggtggcaaccctcacactacctgattcagagggaaattctcagtgttcaaatcagggcaccctcattgacctggctgagctagatactactaatagcctttcctccgtattggcaccagcccctacacccccgtcaagcggcattccgattctcccgccacctccccaggcaagcggtccgcctcgatccaggtctagctctcaggcagaagctaccctgggcccatcctccactagtaacgctctgtcctggcttgatgaggagctgttgtgcctgggcctcgcggaccctgcacccaatgttccacctaaggaatctgcgggcaactcccagtggcacctgctgcaacgagagcaaagcgacttggattttttttcccctaggcccggcaccgcggcatgcggtgcctccgatgctcctctcctgcagcccagcgcgccctctagcagttcatcgcaggcccctcttccccccccattccctgcccctgtcgtgccggccagtgtgcctgccccctccgctgggtcttcactgttctcaacgggcgtggcacctgcccttgcacccaaggtcgagcccgccgtccctggtcaccacgggctggccctcgggaactcagctctgcatcatctggatgcactggaccagctccttgaagaggcaaaggtgacctccggtctcgtcaagcccaccaccagtcccttgatcccaacgacgacaccggctagaccactgctgcccttctccacaggccctggtagccctctgtttcaaccgctgtcttttcagtcccagggaagccccccaaagggccctgagctgagcttagcctccattcacgtaccgctggagagcatcaagccatccagcgccctgccagtcacggcttacgacaaaaatggcttcaggatattgttccattttgctaaagagtgcccaccaggaagacctgacgttctggtagtcgtggtctcaatgttgaacaccgcccccctgccagtcaagtccattgtgttgcaggcagctgtgccaaagagtatgaaagtgaaactccagcccccatccggcaccgaactgtcccctttcagtccaatccagcccccggccgccataactcaggtaatgctgttggccaatcccctcaaggaaaaggtgagactgagatacaaactgaccttcgcgctgggcgaacagctgagcactgaggtgggagaagtcgatcagttcccccccgtggagcaatgggggaatctgtag

SEQ ID NO: 118927 - DNA, 1365 bp, synthetic construct
  misc_feature 1..1365: note = Description of Artificial Sequence: Synthetic coding sequence
  source 1..1365: mol_type = other DNA
atgtcagcaggtgggccatgccccgctgcagctgggggcggaccaggtggagcttcctgtagcgtcggtgctcctggaggcgtctccatgttccgctggcttgaagtgctggagaaagaattcgataaagcattcgtcgatgtggatctgctcctgggagaaattgatcctgatcaagccgacatcacctacgaaggaaggcaaaagatgacatctctctcctcctgttttgcacagctctgccacaaggctcagtccgtttcccagattaatcacaagttagaggcacaactagttgatctgaagtccgagctcaccgagacccaggccgaaaaagtggtgctggagaaagaagtccacgatcaactcctccaacttcactccattcagctgcagctgcatgcgaaaacaggccagagcgcggactctgggacaattaaagccaaactggaacgcgagctggaggctaataagaaggaaaaaatgaaagaggcccagctggaagccgaagtcaagctgctgcgcaaggagaacgaggctctccgccggcatatcgcagtcctgcaggctgaggtctacggcgctcgactcgccgcgaagtacctggataaagaactagcagggcgcgtgcaacagattcagttgctgggccgagatatgaaaggtccagcacacgacaagttgtggaatcagctggaagctgagatccatttgcacaggcacaagactgtcattagggcatgcaggggtaggaatgacttgaaaagacccatgcaagccccgcctggacatgatcaggatagcctgaagaagtcacagggggtgggacctatccgtaaagtgttactgttgaaagaagaccacgagggactgggaatctccattacagggggaaaggagcacggcgtccctatccttatttctgaaatccatcccggacagcctgcggatcggtgcggtgggctgcacgtcggagatgcaatcttggccgttaatggggtcaatttgagggacaccaaacacaaagaagcagtgaccatcctatcccagcaaagaggcgaaatcgaatttgaagtggtgtatgtggcccccgaggtggattcggacgatgagaatgtggaatacgaagacgagagtggacaccgttaccggctctacctggatgaattggagggaggaggcaatcccggcgctagttgtaaggatacttctggagagatcaaggtgctgcagggattcaataagaaagctgttaccgatacacacgagaacggcgacttgggaactgcttctgagactccactggacgacggagccagtaaactggatgatctgcatacgctgtatcacaaaaaatcctactag

SEQ ID NO: 118928 - DNA, 1389 bp, synthetic construct
  misc_feature 1..1389: note = Description of Artificial Sequence: Synthetic coding sequence
  source 1..1389: mol_type = other DNA
atgagcgccgggggcccttgtcccgcggcagccggtggtggccctggcggggcttcctgctccgtgggtgcccctggaggcgtgtctatgtttcggtggctagaggtgctggaaaaagagttcgataaagccttcgttgacgtggacctgctgctgggtgagattgaccccgaccaagctgatattacctacgagggacgtcagaagatgacaagcttgagttcatgctttgctcagctgtgccataaggcacagagtgttagccagatcaatcataagctcgaagctcaactcgtcgaccttaagagtgaactcacagagacacaggcagagaaagtggtgttggaaaaggaagttcacgaccagttactccaactgcactcaatccagttgcagctacacgctaagacaggtcagtctgctgactcaggtaccatcaaagcaaaactcagcggcccatcagtcgaggaactagagcgtgaattggaggcaaataaaaaggaaaagatgaaggaagcccaattagaagccgaagtgaagctgctcagaaaggagaacgaagccctcagaaggcacatcgcagttctgcaagcggaggtttacggagcacggttggcagccaagtatttggacaaagagctcgcaggacgagtacagcagatacagttgttgggccgggatatgaaaggcccagcacacgataaactgtggaaccagcttgaggccgagatacacttgcaccgtcataagaccgtcatcagagcgtgccgcggcaggaacgacctgaagaggcctatgcaggctccaccgggacatgatcaggacagcttaaagaagtcccagggcgttgggcctatcaggaaggtccttctgctgaaggaggaccatgagggcctgggaatcagtatcaccggaggaaaggaacatggggtccccatcctgatctctgaaattcacccagggcagcctgccgatcggtgcggcggtctgcatgtgggagacgcaatacttgcggtgaacggagtgaatctccgagacactaaacataaagaggccgtgacaattttgtcccaacagcggggcgagatcgagtttgaggtggtgtacgtggcaccggaggtggatagcgatgatgagaacgtggagtacgaggacgaatctggccatcgctatcgtctctacttggacgagctggaaggcggggggaacccaggcgctagttgcaaggacacctccggggagattaaagtcctgcaaggcttcaataagaaagcggtgaccgacacacacgagaatggagacttagggactgcgtcagagacccccctcgacgacggggcctctaagttggacgatctgcacacactctaccacaagaagtcttactag

SEQ ID NO: 118929 - DNA, 1389 bp, synthetic construct
  misc_feature 1..1389: note = Description of Artificial Sequence: Synthetic coding sequence
  source 1..1389: mol_type = other DNA
atgagcgcgggggggccctgcccggccgctgccggagggggccctggaggggcctcatgttcggtcggagctcccgggggcgtgagcatgttccgctggctggaagtgttggaaaaggagttcgataaggcgtttgtggacgtggacttgctactgggggagatcgaccccgaccaggcggacattacctacgagggccggcaaaagatgacatcactgtccagttgttttgcccagttgtgccataaagcgcagagtgtttcacagatcaatcataagttagaagcacagcttgtggaccttaaaagtgagttgaccgaaactcaggccgaaaaggttgtcctggagaaagaagttcatgatcaactgcttcagttgcacagcattcagctgcagttgcatgcgaagactggacagtcagccgattctggtaccatcaaagcaaagctggtgagtcgctcatccagcaagatggaaagggaactggaggccaataagaaagaaaaaatgaaagaagctcaattagaagccgaagtaaagctgttgaggaaggagaatgaggccctgaggcggcatatcgcagtccttcaggctgaagtgtatggtgcccgactcgcggcaaaatacctcgataaagagttagctgggagagtgcagcaaatccagctgctaggccgggacatgaagggcccggctcatgataagctgtggaatcagcttgaggccgagatccacctccaccgacataaaaccgtgattcgcgcgtgtaggggcagaaatgatctgaagcgaccgatgcaggctccacctggccacgaccaggattcactgaaaaaatcacagggtgtaggacccattcgcaaagtcctgctgctcaaggaggaccacgaaggcctgggcatatcaatcactggggggaaggagcatggggtccccatcctgatcagtgaaattcaccctgggcagcccgcagaccggtgcgggggcctgcacgtaggggacgcaatcctggctgtcaacggagtcaatctgagggataccaagcacaaggaagcagttaccatattgagtcaacagcgaggagagattgagtttgaagtggtgtatgttgccccagaggtggactcagacgacgagaacgtcgagtacgaagacgagtccggccataggtataggctgtacctggacgagctggaaggaggagggaatccaggagcttcttgcaaagacaccagcggggaaattaaggtcttacagggctttaacaaaaaggctgtcacagacacacacgagaacggcgacttgggcactgcttcagagacacctttggatgatggagccagcaaactggacgatcttcacacactctaccataaaaagtcctattag

SEQ ID NO: 118930 - DNA, 1659 bp, synthetic construct
  misc_feature 1..1659: note = Description of Artificial Sequence: Synthetic coding sequence
  source 1..1659: mol_type = other DNA
atggaacccgctatggagccagagaccttggaagcgagaataaaccgggctactaatccgttgaataaagagcttgactgggctagtataaatggtttttgtgagcaactgaacgaagatttcgagggcccacctctggcaacccgattgctggcccataagattcagtcgcctcaggagtgggaggcgatccaggccttaaccgttctggaaacctgcatgaagtcgtgcggcaagaggtttcatgacgaggtagggaaattcagattcctcaacgagctcatcaaggttgttagccccaaatacctcggttcccgaaccagcgagaaggtgaaaaacaagattctcgaattgctgtatagctggaccgtcggattgccggaggaggtcaagatcgccgaagcatatcagatgctcaagaagcaaggcatagtgaaatccgacccaaagcttccagatgatacgactttccctcttcctccacctcggccgaaaaatgttatcttcgaagacgaggagaagtcaaagatgttagctcggctccttaaatcaagccacccagaagatctgagagctgccaataaactcattaaggagatggtacaggaagaccaaaagcgtatggaaaagatcagcaagagggtcaacgctatcgaggaggttaacaataatgtaaaactcctgaccgagatggttatgtcacactcccaaggcggtgccgctgctggaagcagtgaagacttaatgaaggagttatatcagagatgcgaaagaatgcgcccaacgctgtttcgcctggcctcggatacagaggacaacgacgaagccctcggtctctcagatccaacgccaccttccggtccctctttggacgggacgggctggaattctttccagagcagcgatgcaaccgagcctcccgccccagcactggcacaagctccaagcatggaatcccgcccacccgcacaaacatcgctgcctgccagcagcgggctcgacgacctagacctgcttggaaaaactctgctccagcagagcttgccaccggaatctcagcaagtgcggtgggagaaacagcagcccactccacggcttacgctgagggatctgcagaacaagagttcttcttgttcaagcccctcgagcagtgctacatctttgctgcacacggtctcccctgaacctcctcgcccaccacagcagcctgtacctaccgagctgtccttggcaagcatcaccgtccccttggagtccatcaaaccctcaaacattctgccagtaaccgtgtatgatcagcatggcttcagaattctgttccattttgcccgcgatcctctccctggcaggagtgatgtactggttgtagtcgtatccatgctgagtaccgccccacaacccatcagaaatattgtattccaaagtgccgttccgaaagtgatgaaagtgaaactgcagcctcctagcggtaccgagctgcctgcgtttaatcccattgtccacccctcggccatcacgcaggtactcctcctggctaaccctcagaaggaaaaggtgcggctgagatataagttaacctttaccatgggcgaccaaacatacaacgagatgggtgatgtcgaccagttccccccacctgaaacatgggggagtttgtag

SEQ ID NO: 118931 - DNA, 117 bp, synthetic construct
  misc_feature 1..117: note = Description of Artificial Sequence: Synthetic coding sequence
  source 1..117: mol_type = other DNA
atgaagtcctgcgggaaaagattccatgacgaggtcggcaagttcaggttcctgaatgagctgatcaaagtagtttctcctaaatatctaggcagtaggacctctgaaaaggtgtag

SEQ ID NO: 118932 - DNA, 1821 bp, synthetic construct
  misc_feature 1..1821: note = Description of Artificial Sequence: Synthetic coding sequence
  source 1..1821: mol_type = other DNA
atggagcctgcgatggagcccgagacccttgaagcccgcataaatcgggctacgaaccccctcaacaaagagcttgactgggcttcaattaatggcttttgcgaacagttgaatgaggacttcgaaggccccccactggcaactaggctgctcgcccacaagatacagtccccccaggaatgggaggccatccaggcccttacatacttgggctccaggacatccgagaaagtaaaaaacaaaatactggagctcctttactcctggacagtcggattgccagaggaggttaaaattgctgaagcctatcaaatgcttaagaaacaggggatagtaaaatccgatccaaaactgcccgacgatacaacttttcctctgccaccaccacgaccaaaaaacgttatctttgaagatgaagagaagtccaagatgttggcaagattgcttaagtcttcccaccccgaggacttaagggcggcaaacaaactaatcaaagaaatggtgcaggaagatcaaaagagaatggagaaaatatcaaaaagggttaatgccattgaagaagtgaataacaacgtaaaactgctgaccgagatggtcatgtcacactcccagggcggagctgccgcaggatcttccgaagacctgatgaaggaactttaccagcgatgcgagagaatgcgacctaccttgtttaggctggcaagcgacacagaagataacgatgaggcactggcagagattcttcaggcgaatgataatctgacacaagtgattaacctgtataagcaactggttcggggcgaagaagtgaatggcgatgcaaccgctggcagcattcctggaagtacatctgcgctcctggacctgtccggcctcgacctgcctcctgccggcaccacataccctgcgatgcctacacgccctggcgaacaggcttctcccgagcagccatcggcaagtgtgtccttattggatgatgaacttatgagcctcggacttagcgaccctacacctccttccgggcctagcctggacggaactggttggaactccttccagtcttccgatgccaccgagcccccggcccccgcgctcgcgcaggcgccatctatggaaagccgcccccccgcgcaaacaagtttgcctgcttccagcggattagatgatctggacctgcttgggaagacactcctccagcagtctctgccccccgaatcacagcaggtccgatgggagaaacagcagccgacccccagactaacactccgggatcttcagaacaagtcaagcagttgttcgtccccatcaagtagcgctacatcgttgctgcacaccgtatccccggaacctccaaggccaccacagcagcccgtgcctacagagctctctctggcttcaataacagtaccgctggagtctattaaacccagtaatattctgccagtgacagtttacgatcagcacggattcaggattctgttccacttcgctcgtgatcctctcccagggcggagcgacgtgttggtggtcgtggtgtctatgctgtccaccgctccacagcctattagaaatatcgtgttccagtctgctgtaccaaaggtaatgaaggtgaagctccagccaccatccggtacagagctgcctgcttttaaccccatcgtgcacccgtccgccatcacccaagtgcttctgcttgccaaccctcaaaaagagaaggtgagattgcggtacaaactgacctttaccatgggtgaccagacatataatgaaatgggagacgtggaccagttccctcccccagaaacgtgggggagtctgtag

SEQ ID NO: 118933 - DNA, 1920 bp, synthetic construct
  misc_feature 1..1920: note = Description of Artificial Sequence: Synthetic coding sequence
  source 1..1920: mol_type = other DNA
atggagcctgcaatggagcccgagaccttggaggcgagaattaacagagccaccaatccactcaataaggaactagactgggctagcatcaatggcttctgcgagcaactaaacgaggacttcgaaggccctcctctggcgactaggctactggcccacaaaatacagtctccacaggagtgggaggctatccaggcactgaccgtcctggagacatgtatgaagtcttgcggaaagcgcttccatgatgaggtcgggaaatttcgctttctaaatgagctgatcaaggtggtttctccaaagtatttgggttcccggacaagcgagaaagtcaagaacaagatactcgagctgctttatagctggaccgtgggcttgccagaggaagtaaaaatcgccgaagcctatcaaatgctgaaaaagcagggcatagtaaaatctgatcctaagctcccggacgacaccacatttccactgccccctcccagaccaaagaacgtaatttttgaagacgaggaaaaaagcaagatgttggctaggctcctcaagagcagccaccccgaagatctccgggccgccaataagctcattaaggaaatggtacaagaggaccaaaaaaggatggagaaaatcagcaagcgtgtgaatgctatcgaggaggttaataacaatgtgaaattgcttacagaaatggtcatgagtcactcacaaggaggtgccgcagccgggagctctgaagatttgatgaaggaactctatcagagatgtgaacgcatgcgcccgaccctattcagactcgcctcagacaccgaagacaatgacgaggccttggcagagattttgcaggcaaatgataatctgacccaagtaattaatctctataagcagctggtcaggggggaggaggtgaacggagatgcaactgctggtagcataccaggctccacctccgccctgcttgatctttccggtcttgacctgccccctgcagggactacttaccccgcaatgcctactaggccgggcgagcaggcatcaccagaacagcctagcgcaagtgtgtctctgctagacgatgagctgatgagcttgggcttatcggatcctaccccaccatcaggccccagcctggacggaaccggatggaactccttccaatcatctgatgcaactgaaccccccgcccccgcccttgcccaagctcctagcatggagtctcgtccccctgcacagacctccctgccagcgtcctcaggactagacgaccttgatttgctggggaagaccctgctgcagcagagcctacccccggaatcccagcaagtcagatgggagaagcagcagccaaccccccgcctgacactgagggacctgcagaacaaaagcagttcttgcagtagtccctcatcctccgctacctctctgctccacactgtgtccccagaaccacctcgtccacctcaacagcctgttccaacagagctgtccctagcctctattaccgtccccttggaaagcatcaaaccttctaatatcctgcccgtaacagtctacgatcagcacggtttcagaatcctgttccattttgcacgtgaccctctgccggggaggtcagatgttctcgtggtagttgtgtccatgctgagcaccgccccgcagcccatccgcaacatcgtgtttcagtctgctgtccccaaggttatgaaggtaaagctgcagccaccgagcggcacagaattaccagcattcaatcctatcgtacacccgtctgctataacacaggtgctgttgctagcaaacccccagaaggagaaggtgaggttgaggtacaaactgacctttacaatgggcgatcagacgtataatgagatgggcgacgtggatcagttcccccctccagaaacgtggggttccctctag

SEQ ID NO: 118934 - DNA, 1971 bp, synthetic construct
  misc_feature 1..1971: note = Description of Artificial Sequence: Synthetic coding sequence
  source 1..1971: mol_type = other DNA
atggaacctgcaatggaacctgaaaccttggaggcccgtattaaccgcgccactaaccctctgaataaagaactggactgggccagtatcaacggcttctgcgagcaacttaatgaggattttgagggcccccctctcgcgacacgtctgctggctcacaagatacagtcgccccaagaatgggaagctatccaggctctcaccgtcagacgaggtgaggctactatccgaccgccaccgtgtgacgacacaaaagtgttggaaacctgtatgaaatcgtgcggcaaacggtttcacgacgaggtgggaaagttccgcttcctaaatgaactcataaaggtcgtctcacctaaatacctgggaagccgcaccagtgagaaggtcaagaataaaattcttgaactgctgtactcctggaccgtggggctgcccgaagaagtcaaaattgctgaggcttaccagatgcttaaaaagcaaggcattgtgaaaagcgaccccaagctgcctgacgacacaaccttccccctgcccccgcctcgacccaagaacgtaatttttgaggacgaggagaagtcgaaaatgttagctcgtttgctgaagagctcccatcctgaagacctgcgggcagctaacaaactcattaaggagatggtgcaggaggatcaaaagcgcatggagaagattagtaagcgagtcaatgccatcgaggaagtcaataataacgttaagcttctgacagaaatggtgatgtcgcactcccagggaggcgctgccgctggctcaagcgaagatctcatgaaagagctttaccagaggtgcgaacgaatgcggccaaccctgtttcgactggccagtgatacggaagacaacgacgaggcactggccgagatcttacaggccaacgacaatctcacgcaggttatcaacctatacaagcagttggtgaggggggaggaggtgaatggcgacgccaccgctggatccatccctgggtctacgtctgccctcctggatctgtctggtctggacctaccgcccgcaggtaccacttacccagctatgcccactcggcccggcgagcaggcatcgcctgaacagcctagcgcttcagtgtccttgcttgatgatgaactgatgagccttgggctctccgaccctactccccccagcggaccgtctttggacggaaccgggtggaattcgttccaatcaagcgatgctacagagccccctgcacctgccctcgctcaggctccctctatggagagtcgcccacctgcccaaacctctttgcctgcctcttcaggactggacgacttagacctgctcggtaagaccctgttacagcagagtttacctcctgagagtcagcaggttcgctgggagaagcaacaaccaaccccgagactcacactaagagatttgcagaacaagtcctctagctgctctagtcccagcagttctgctaccagcctgctacacactgtcagtcccgaaccgccccgtcccccacagcagcccgttcctaccgagttgtcccttgcaagcatcaccgtccctctcgaatcaattaaaccttctaacatcctcccagtgacggtgtacgatcaacacgggttccgcattctgttccactttgctcgtgacccactacctgggcgtagcgacgtattagtcgtcgtggtttccatgctgtcaactgctccccagcccattagaaatatcgtgtttcagtctgccgtgcccaaagtcatgaaggtcaaattgcaaccaccaagtgggacagaactgcccgcgttcaaccccatagtccatccctctgcaattacacaggtacttttgctggctaacccacagaaggaaaaagttaggctcaggtacaagctgacttttaccatgggggatcaaacatacaatgaaatgggtgatgttgatcagttccctccgcctgagacgtggggatccctgtag

SEQ ID NO: 118935 - DNA, 1701 bp, synthetic construct
  misc_feature 1..1701: note = Description of Artificial Sequence: Synthetic coding sequence
  source 1..1701: mol_type = other DNA
atgaaaagctgcggtaaacgattccacgacgaagtgggcaagttccgctttcttaacgaactaatcaaagtggtttcgcccaagtatctggggtctcgcacttccgagaaagtgaaaaacaagatcctcgaactgctgtactcttggaccgtggggctaccagaggaggtgaagattgctgaggcttatcagatgctcaaaaaacagggcattgtcaagagtgaccctaagctgcccgacgatacaacttttcccttacctcctcctagacctaaaaacgttattttcgaggacgaggagaagtctaaaatgcttgcccggcttctaaagagttcccatcccgaggatctgagagcagctaacaagctgataaaagaaatggtacaggaagaccagaaaaggatggaaaaaatcagtaagcgggtgaacgctatagaggaagtgaataataatgtcaagctgctgacggaaatggtgatgagccattctcagggcggggctgccgcaggatcctccgaagaccttatgaaagaattgtaccaacggtgtgagcgaatgagacctacactctttcgcctcgccagcgatacagaggataatgatgaggccctagctgaaatacttcaggccaacgataacctgactcaggttatcaacttgtacaagcagctggtgcggggagaggaagtgaatggtgatgcgacggcagggtcaatcccaggctcgacttcggcactgctcgacctgtcgggtttggacctgcctccagccggaactacttaccctgcaatgccaacgcggccaggcgagcaggcgtctcccgaacagccctctgcttccgtgtctctgctggatgatgagttaatgtctttaggcttgtcagatcccacaccaccatcaggcccctcactggacgggaccgggtggaatagcttccagtcctctgacgccaccgagccccccgctcccgctctggctcaggcccctagtatggagagtcgcccgccagcacagacatcactcccggctagttccggtctagacgacctggacctgctgggcaaaacactgctgcagcagtctctgccccccgagagccagcaggtaaggtgggagaagcagcagccaacgccccgcctgacccttagagatttgcagaataaatcctcttcatgttcttctccatccagttcagcaacttctctgctacatacagtgtcccccgagcctccaaggcccccccaacagcccgtgccaaccgagctcagcttagccagcatcacagtgcccctggaatccatcaaacctagtaatattctgcccgtcacggtctacgaccagcacgggtttcggatactgttccactttgctcgtgaccctctgcccgggcggtccgatgtactggttgtggttgtctctatgttatccacggcccctcaaccaataaggaacattgtattccagtctgccgtccctaaggtgatgaaagtcaaactacagccgccctctggtacagaacttcctgcttttaatcccatcgtacaccccagcgccattacccaggtcctgcttcttgcgaatccacaaaaagagaaagttcggctcagatacaaattaaccttcaccatgggagaccagacttacaacgagatgggcgacgtggatcagttccccccacccgagacgtggggtagcttatag

SEQ ID NO: 118936 - DNA, 123 bp, synthetic construct
  misc_feature 1..123: note = Description of Artificial Sequence: Synthetic coding sequence
  source 1..123: mol_type = other DNA
atgaagagttgcggcaaaaggtttcacgacgaagtgggcaagtttcgcttcttgaatgagctcataaaagtcgtcagccccaagtacttaggctccaggacaagtgagaaggtgaaaaactag

SEQ ID NO: 118937 - DNA, 330 bp, synthetic construct
  misc_feature 1..330: note = Description of Artificial Sequence: Synthetic coding sequence
  source 1..330: mol_type = other DNA
atgaagtcatgcggcaagcgcttccacgacgaggtaggcaagtttagattcctcaacgagctcatcaaggtggtgtcccccaaatatcttgggtctagaacctccgagaaagtcaagaataagatcctggagctgctgtacagctggacagtggggttgcccgaggaagtcaagatcgcagaggcataccagatgctaaaaaaacaaggaatcgtgaaaagcgatccgaagctgcccgacgacaccacctttccgctacctccaccccgacctaagaacgtgatttttgaagacgaggagaagtccaagatgctggctcgcttgttgtag

SEQ ID NO: 118938 - DNA, 270 bp, synthetic construct
  misc_feature 1..270: note = Description of Artificial Sequence: Synthetic coding sequence
  source 1..270: mol_type = other DNA
atggagccggccatggagccagagacattagaagcgcgcataaatcgggcaactaaccccctgaacaaagagctggattgggcatctatcaatggattttgtgagcaattgaacgaagatttcgaggggccaccactggccactcggctgctcgcccataagatccagtcaccacaggaatgggaagcaatccaagccctaactgtcagaagaggagaggccaccatccgtccccccccctgtgatgacacgaagggcggccaggactag

SEQ ID NO: 118939 - DNA, 330 bp, synthetic construct
  misc_feature 1..330: note = Description of Artificial Sequence: Synthetic coding sequence
  source 1..330: mol_type = other DNA
atgaaatcatgtggtaagagatttcatgacgaggtggggaaattccggtttctcaacgaactcatcaaggtggtttcccctaagtatctcgggtcaaggacgtccgaaaaggtgaaaaataaaatccttgaacttctgtattcatggactgttggtcttcccgaggaggtaaaaatcgctgaagcataccagatgctaaaaaaacagggcatcgtcaagagtgacccaaaactccccgacgatactactttcccactgccccccccaagaccgaagaacgtcatatttgaagacgaggagaagagcaagatgctggctagattactgtag

SEQ ID NO: 118940 - DNA, 327 bp, synthetic construct
  misc_feature 1..327: note = Description of Artificial Sequence: Synthetic coding sequence
  source 1..327: mol_type = other DNA
atgaaatcctgtggcaagcggtttcacgacgaggtggggaaattccggttcctgaacgaattgatcaaggtcgtgtcacccaaatatttgggaagcagaacttcggaaaaagtaaagaacaaaattctggagctcctgtatagctggaccgtggggttaccggaggaagtcaaaattgcggaggcttatcaaatgctcaagaagcagggtatcgtgaagtctgatcctaagctgcccgatgataccacattccccctgccccccccgaggcctaaaaacgtcatttttgaagacgaggagaagagtaagatgctcgcacgtttgtag

SEQ ID NO: 118941 - DNA, 57 bp, synthetic construct
  misc_feature 1..57: note = Description of Artificial Sequence: Synthetic coding sequence
  source 1..57: mol_type = other DNA
atgaagagttgtgggaagcgctttcacgacgaggtcgggaagttcaggtttctttag

SEQ ID NO: 118942 - DNA, 183 bp, synthetic construct
  misc_feature 1..183: note = Description of Artificial Sequence: Synthetic coding sequence
  source 1..183: mol_type = other DNA
atgaaatcgtgcgggaaacgattccatgacgaagtgggaaagtttcgatttttgaacgagcttattaaggttgtaagccccaaatacctggggtctcgcaccagcgagaaggtgaagaataagatccttgagctgctctattcctggaccgtgggtctccccgaggaggtcaagattgcatag

SEQ ID NO: 118943 - DNA, 87 bp, synthetic construct
  misc_feature 1..87: note = Description of Artificial Sequence: Synthetic coding sequence
  source 1..87: mol_type = other DNA
atgaaaagttgtggaaagcgattccacgacgaggtaggcaaatttaggttccttaatgaactgattaaggtcgtgtcgccaaagtag

SEQ ID NO: 118944 - DNA, 741 bp, synthetic construct
  misc_feature 1..741: note = Description of Artificial Sequence: Synthetic coding sequence
  source 1..741: mol_type = other DNA
atgacacccgggactgctaacagggccaccaatcctctcaacaaggaactggattgggcctccatcaacggcttctgcgaacagctcaacgaagattttgagggccctcccctcgctaccagactgttggcacacaagatccagtcgcctcaagagtgggaggccatacaggcccttaccgttctcgagacctgcatgaaatcttgcggtaaaagattccacgatgaagtgggcaagttcaggttcctgaatgagttgataaaagtcgtgtctcccaagtacttggggagcaggacaagtgagaaggtgaagaataagatcctggagctcttgtacagctggacggtgggcctgccagaagaagtaaagatcgccgaagcatatcagatgctgaagaagcaagggatcgtgaaaagtgatcccaagttgccggatgacactacatttcccttaccccccccaagacccaagaacgtgatcttcgaggacgaggaaaagtccaaaatgctggccagattattaaaatcatcgcatccagaggacctccgggctgctaataagctgatcaaggagatggtccaagaggaccaaaagcgcatggaaaagattagcaagcgagtcaatgcgatcgaagaggtcaacaacaacgtgaaattattaactgagatggttatgagtcatagccaagggggcgctgcagccgggtccagcgaagacctgatgaaagagctttatcaatag

SEQ ID NO: 118945 - DNA, 213 bp, synthetic construct
  misc_feature 1..213: note = Description of Artificial Sequence: Synthetic coding sequence
  source 1..213: mol_type = other DNA
atgaagtcctgcggaaagagatttcacgacgaagttggaaagttcagattcctgaacgagctgattaaggtggtcagtccaaaatacctcgggtcacgaacctcagaaaaagtcaaaaacaaaatcctggaactgttgtattcttggacggttggcctgccggaggaagtaaaaatcgctgaagcatatcagatgctcaagaagcagggctag

SEQ ID NO: 118946 - DNA, 2172 bp, synthetic construct
  misc_feature 1..2172: note = Description of Artificial Sequence: Synthetic coding sequence
  source 1..2172: mol_type = other DNA
atggcagaggctgaaggtgagagcctggaatcatggctgaacaaggccacgaaccctagtaaccgccaagaggattgggaatatataataggattctgcgatcagattaacaaagaacttgaagggccacaaatcgcagtacgcttgttagctcacaaaatccagtctccacaggagtgggaagcgctgcaggctctcacggtccttgaggcatgcatgaaaaattgtgggcggagattccacaacgaggtgggtaagttcagattcctgaatgagcttattaaggttgtcagccctaaatacctgggcgaccgtgtgagcgaaaaggtcaaaacaaaagtaattgagctcctgtacagctggaccatggccctgcccgaggaagctaagattaaggatgcataccacatgttgaaacgccagggtatcgttcagagcgatccacccatccccgtcgaccgcacactcatacccagccctccgccgcgcccaaagaaccctgtcttcgacgatgaggaaaagagcaagctcctcgcaaaactgctcaagtcaaagaacccagacgatttgcaggaggctaataaactgatcaagtccatggtgaaggaagatgaggcgaggattcagaaagttaccaagcgcttgcatacactggaggaggtgaataacaacgtccgcctcctgtcggagatgctgctgcattactcacaggaggattcatcagatggggacagggaactgatgaaggagctgtttgaccagtgtgagaacaagagacgtacgctgttcaaactcgcgtcagagactgaggacaatgataattccctcggtgatatcttgcaagcgtccgataacttgagtagagttatcaattcatacaaaaccatcatagaaggtcaggtaatcaacggggaagttgccaccctcactctgccggacagtgagggcaattctcaatgctccaaccaagggacactaattgatttggctgaactcgacaccactaatagtttgtctagcgtgctcgccccggcccctacccctccaagtagcggtatccccattttgccaccaccccctcaggcgagcggccctcctaggagtcgctcatcctcacaggcagaagcaaccctgggccccagcagcacctctaatgccctgtcctggctcgatgaggagctgctctgcctgggactagccgatcccgctcccaatgtgccacccaaagaaagcgctggtaactcacagtggcacttactccagcgtgagcagagcgatttggattttttctcgcccaggccgggcactgcagcgtgcggcgcctcggacgctcctttgctccagccttcggccccctcttcgagctcctcccaggcccctctgcctccgccttttcctgctccagtggtgcccgcttctgtgcctgctccgagcgccggatcctcattattcagtacaggcgtcgcccctgccttggcccctaaagttgagcctgccgttcctggccaccatggcttggcccttggaaactcggcccttcatcaccttgacgctttggatcagctgttggaagaagccaaagtaactagtggcctagttaagccaaccacctccccgttaattcccaccaccactcccgcacgccccctcctcccctttagtacggggcctggctcccccttgttccaaccattaagctttcagtctcagggttccccgccaaaaggacccgagctgagtctggcaagcatccacgtgcccctggaatccataaagccttctagcgccctacccgtcactgcatacgataaaaacggctttaggatactatttcactttgccaaggagtgccccccagggaggccagatgttctggttgtcgtggtgtcaatgttaaataccgcgcccctccccgtcaagtctatcgtactccaggccgctgtgcctaagagcatgaaggtgaagctccagcccccttccggcacagagttgtcacccttcagtccaatccagccccccgccgccatcacacaagtcatgttactggccaatcccttgaaagaaaaagtgcgcttgagatataagttgacctttgccctgggcgagcagctcagcacagaagtcggcgaagttgaccagtttcccccagtggaacagtgggggaacctgtag

SEQ ID NO: 118947 - DNA, 2073 bp, synthetic construct
  misc_feature 1..2073: note = Description of Artificial Sequence: Synthetic coding sequence
  source 1..2073: mol_type = other DNA
atggcggaagccgaaggcgaaagtttagaatcttggttgaacaaagcgaccaacccgagcaaccgccaggaggactgggagtacatcatcggcttctgtgaccagatcaataaagaattggagggcccacagatagctgtccgactgctcgcacacaagatccagtcaccgcaggagtgggaggctctccaggccttgacatacctcggagatcgggtctccgagaaggtcaagaccaaggtgattgagttgctgtattcctggacaatggcccttccagaagaggctaagataaaggatgcttaccacatgctcaagaggcagggcattgtacagagcgaccccccaattccggtcgatcgtaccctgatcccatcccctcccccacggcctaaaaaccctgtgtttgatgacgaggagaaaagtaagctccttgccaagttattaaaatcaaaaaacccagacgatctgcaagaggccaacaaacttataaaatctatggtaaaggaggacgaggctaggattcagaaggtcaccaagcgactgcatacactggaagaggtgaataacaatgtgagactgctctctgagatgctcctccactactcccaggaggatagctctgacggagaccgagaactgatgaaggaactgtttgaccagtgcgaaaacaaacggcgaaccctttttaagctcgccagcgaaaccgaagacaacgataattccttgggcgacatcctgcaagcgagcgataatctgagcagggttatcaattcttataagactatcatagaaggccaagtcatcaatggcgaagttgccacattgactcttccagattctgaggggaacagtcaatgttccaatcaggggaccctaatagacctcgccgagctcgatacgactaactccctgtcatccgtgctggcacctgcccctacacctccatcctcgggaatccccatcttgccaccacctccccaggctagcgggcctccacggagccgctcctccagtcaggctgaagccactctgggcccttcttctactagtaacgctctgtcttggcttgatgaggagcttctgtgcttgggactagccgatcctgcacccaacgtgcctccaaaagagtcggctggaaattcgcagtggcacttattacagagggaacagagcgacctggacttctttagcccacggcccggcactgctgcgtgtggagcctctgacgcccccctactacagccctctgctcccagctcgagctccagccaggcccccctgcccccaccattccctgcccccgtggtgcctgcctcagtccccgcgccttctgccgggagttccctgtttagcaccggcgtagctcctgccctggcacctaaggtggagcccgcagttcccggacaccatgggctggcgctggggaatagtgcactccaccacctagacgccctggatcagctgctagaagaggcgaaggtgactagcggactcgtgaaacccactaccagtcctctgatcccaaccaccaccccagcacgacccctgctgccattcagcaccggccctggaagccctctgttccaaccactgtccttccagtctcaaggctctccgcccaaagggccggagttgtccctagcgtcaattcatgtgcccctcgaatccatcaaacccagcagcgcccttcccgtgacagcctacgataagaatggcttcaggattcttttccactttgctaaagaatgtcctccgggccgccctgatgtgctcgtggtcgtggtatctatgttaaacacagcccccttaccggtcaagagcatcgtgctgcaggcggccgtaccaaagtccatgaaggtgaaacttcagcctcccagtggtaccgagttgagcccgttttcaccaatccagcctcccgctgcgataacacaggtgatgctcctggcaaacccactgaaggagaaggtgagactgaggtataaactcacatttgcattaggtgaacaattatctactgaggtaggagaggtggatcagttccctccggtggagcaatggggtaacctctag

SEQ ID NO: 118948 - DNA, 1956 bp, synthetic construct
  misc_feature 1..1956: note = Description of Artificial Sequence: Synthetic coding sequence
  source 1..1956: mol_type = other DNA
atgaaaaattgcgggcgccgcttccacaatgaagtcggaaagtttcgttttctcaacgaactcatcaaggttgtgtcccctaaatacctaggagaccgagtgtccgaaaaggtcaaaacgaaggtgattgagctgttatatagttggaccatggcactgcctgaagaagcaaaaattaaggacgcataccacatgctcaagaggcaggggatcgtgcagagtgacccccctattcccgtggacagaaccttgatcccatctccaccaccacggcctaaaaacccagtgttcgatgatgaagagaagtcaaagttactggcaaagctcctgaaatcaaagaaccctgacgatcttcaggaggccaataagttaatcaagtccatggttaaggaagacgaggcgcgcatccagaaagtgaccaagcgactccacacgcttgaagaggttaataacaacgtacggcttctctctgagatgctgttgcactactcacaggaggatagcagtgacggtgacagagagttaatgaaagaactctttgatcagtgcgagaacaagaggaggactctgtttaaattggcctctgaaaccgaagacaatgataattccctgggagatattctgcaggcgtctgacaacctcagccgtgttataaacagttataaaacaatcatagagggacaggtgataaatggggaggtggcaactctgaccttgcccgacagtgagggcaatagccaatgcagcaaccaggggactctaatcgatctggccgaacttgataccacgaactcactttcatctgtcctcgctccagctccaacgcctccaagctccggaatccctatcttgcctcctccccctcaagcgtccggacctccaaggagtaggagcagctcacaggctgaggccactctggggccttcctcaacttcaaacgcactgtcatggctggatgaagagctgctctgtctgggcctggccgacccagccccgaatgtcccccctaaagagagcgccggaaattctcagtggcaccttttacagcgtgagcagagtgacctcgacttcttttcgccccgccccggtaccgccgcctgcggcgcttccgacgcgcccctcctgcagccgtctgctccctcgagcagtagttcccaggccccgttgccaccacctttccccgcacccgtcgtgccagcttcagtccctgccccatccgctggtagctctctcttttccacaggggtggctcccgcgctggctccgaaggttgagccagcggtgcctggccaccacgggctggcgctcggcaactctgcactgcaccatctggacgctctagatcagctactcgaggaagccaaggtgacatctggactcgtcaagccgacaacatcccccctcattcccacaaccacccccgctcgcccgcttctgcctttctcaacaggacccggttcacccctctttcaaccgctttcattccaatctcagggaagcccaccaaagggccctgagctctccttggccagcattcacgtgccattagagtcaattaagccaagcagcgccttacctgttactgcttacgataagaacggctttcgcatcttattccacttcgctaaagagtgcccgcccggacgacccgacgtgctggtggtagtggtgtcaatgcttaataccgctccgctgccagttaagtcaatagtgctgcaggctgcagtccccaaatcaatgaaagtcaagctgcaaccaccaagtgggaccgaattgagtcccttctcaccgatccagccacccgcagccattactcaggtgatgctgctggcaaatccgctgaaggaaaaagtccggttgaggtacaaactgaccttcgctctgggcgagcagctgtccacagaggtgggcgaggtcgaccagttcccacctgtggaacagtggggcaacctctag

SEQ ID NO: 118949 - DNA, 462 bp, synthetic construct
  misc_feature 1..462: note = Description of Artificial Sequence: Synthetic coding sequence
  source 1..462: mol_type = other DNA
atggcagaggccgagggagagtctctggagagctggctgaataaggctaccaacccaagcaatagacaggaggattgggaatacattattgggttttgcgatcagataaacaaagaattagaagggccccagattgctgtgcgactgctggcccataaaatccaatccccccaggagtgggaggccctgcaggccttgacggtcctggaggcatgtatgaaaaactgtggtcggagatttcataatgaggtcgggaagttcaggttcctgaacgagctcataaaggttgtgtcccctaaatacttaggcgatagagtgtctgaaaaagtaaaaacgaaggtcatcgaactactgtactcctggaccatggctcttccagaagaggcaaagattaaggacgcgtatcatatgctgaaaaggcaggcattctcccaagccgctgagaaacagaagcccagatag

SEQ ID NO: 118950 - DNA, 1806 bp, synthetic construct
  misc_feature 1..1806: note = Description of Artificial Sequence: Synthetic coding sequence
  source 1..1806: mol_type = other DNA
atggccctgcccgaggaggcaaaaataaaagacgcctatcacatgctgaaaaggcagggtattgtgcagagtgacccccccatcccagtagataggacattgattccttcgccaccgccacgtccaaaaaatcccgtgttcgatgatgaggagaaatcaaagctgctggctaaactgctgaaaagcaagaatccagacgacctacaggaggcaaacaagctcatcaagagtatggtaaaagaggatgaggcccggatccaaaaagttaccaagcgcctccatactcttgaggaagtcaacaacaatgtgagactgctgagtgagatgctgcttcactattcacaggaagacagtagcgacggggatcgcgagctgatgaaggaactgttcgaccagtgcgagaacaaacgccgaactctttttaagctggctagtgagactgaggacaatgacaactcactgggggacatccttcaagccagtgacaacctgtcccgcgttatcaacagctacaagaccattattgaaggtcaggttatcaatggcgaggtcgctactctgactctgcccgacagtgaagggaattctcagtgtagtaaccaggggaccctgattgacctggccgagctagacacaaccaattctctatccagtgtgctcgcccctgcgcctacgcccccatcctccggcatacctattctcccacctccgccacaagcctccggccccccacgaagcaggtctagctcccaagcagaggcaaccttgggcccatcatcaactagcaatgccctctcatggctcgacgaagaactcttgtgtctgggccttgccgatccagcaccgaacgtgcctccgaaggagtctgcaggtaactcccagtggcacctactccagagagagcagagtgacttagacttcttctcgcctaggcccgggaccgctgcgtgcggagcgagcgacgcaccactgttacagccgagcgctccctcctcctccagctcccaggcacccctccccccaccgtttcctgccccagtggtgccagcatctgtgcccgcccccagcgcgggatcgtccctgttttcaaccggcgtggcccccgcactcgccccgaaagttgagccagctgtgcccgggcaccacggactggccctgggaaattctgccttgcatcatctggatgccttggaccagcttctggaggaggcaaaagtgacatcgggtcttgtgaagccaacaacatctcccctgattcctaccacaacaccagccagaccgcttctcccattctccaccggccctgggagtccactatttcaaccactgtcattccagtcacagggcagcccgcctaagggacccgaactgtcactggcctcaattcacgtgcctctggaatctatcaagccatcatctgccttgccagtgacggcatacgataaaaatggtttcagaatcctgttccatttcgcgaaggaatgcccgcccgggagaccggacgtcctggtggtggtcgtctcaatgttgaataccgctcccctcccagtcaagagcatcgtcttacaggcggccgtgcctaagtcaatgaaggtcaagctccagccacccagcggtactgaactctcgccattcagccccattcagcccccggccgccattacacaggttatgctattggcaaacccgctgaaagagaaggtccggctgcgatacaaactgaccttcgccctcggagaacagcttagcaccgaggtgggggaggtcgatcagttccctccagtggagcaatgggggaacctgtag

SEQ ID NO: 118951 - DNA, 918 bp, synthetic construct
  misc_feature 1..918: note = Description of Artificial Sequence: Synthetic coding sequence
  source 1..918: mol_type = other DNA
atggccgccggtttggcaagactgttgctcctcctcgggttgtcagctgggggtccggcccccgctggcgccgcaaagatgaaggttgtcgaagaacctaacgcttttggtgtcaacaaccctttccttccacaagcatcaaggcttcaggcgaaacgggatccctcccctgtttccggccctgtccatctgttccgcctgagtggcaagtgcttctccctcgtggaaagcacctacaagtatgagttttgccccttccataatgtcacccagcacgaacagactttccgctggaatgcttacagcggcatcttgggaatttggcacgagtgggagatcgccaacaatacttttaccggcatgtggatgagggacggcgatgcctgccgttcaagaagccgacagagcaaggtggagctcgcctgtggcaagagcaacaggcttgctcacgtcagtgaaccgtctacatgcgtttacgccctcacatttgagacgcctctcgtctgccatccccacgccctgttagtctaccctacactgccagaggccctgcagagacagtgggaccaggtggagcaggacctcgccgatgagttgatcacaccccagggtcatgaaaagctgttgcgaacactctttgaagacgcggggtacctgaagacaccagaagaaaatgagccaacacagctggagggggggcctgactcactgggatttgagacactcgagaactgtcggaaagcccacaaagaactgtccaaagagattaagcggctcaaagggctcctgactcagcatggcataccctacactcgcccaacagagacatctaacctggagcacctcggccacgaaacccctcgggccaaatccccagagcagcttcggggggaccccggcctcagggggtctctttag

SEQ ID NO: 118952 - DNA, 4497 bp, synthetic construct
  misc_feature 1..4497: note = Description of Artificial Sequence: Synthetic coding sequence
  source 1..4497: mol_type = other DNA
atggacggggcttctgcagagcaggacggcctgcaagaagatagatcccactccggaccatcaagcttgcccgaggccccattaaagcccccggggcctttggttcctcctgaccagcaggacaaagtgcagtgcgcggaggtaaaccgggcctccaccgagggcgagagtcctgacggcccaggacagggtggattgtgtcaaaatgggccaacacctccttttcctgaccccccaagctccctcgacccaaccactagtcccgtgggccctgacgcatctccaggcgtggccggctttcacgataatctccggaaatcacaagggacaagtgccgaaggttccgtccggaaggaagctctgcagagcctgcgtctttccctgccaatgcaggagacgcagctatgttccaccgattccccattgcccctggagaaagaagaacaagtgcgactgcaggctcgtaagtggttagaagagcaactgaaacagtatcgcgtcaaacgtcagcaagagaggtcttcacagcccgctaccaagacaagactgttcagcacgctggaccctgagctgatgcttaaccccgaaaacctgccgcgcgccagcaccctcgcgatgacgaaggagtactcatttctgcgcacctccgtgccgagaggacccaaagtagggagcctcggcctgccagctcacccccgagaaaaaaagaccagcaaatcatcgaaaattcgttctttagctgattatcggacagaggatagtaacgctggaaattctggcggcaatgttcctgcccctgatagtactaagggcagcctcaaacagaaccgttcttccgctgcttccgtagtctcagagatttcactctctccagatactgatgataggttagaaaatacctctctcgctggggatagtgtgtccgaagtagatgggaatgattccgacagttcttcatactcgtccgcatcgactcgtgggacctacgggattctgagcaagacagtggggacgcaagacacaccctacatggtgaacggacaggaaatacctgcggatacgctgggacagttcccatctattaaggacgtcttgcaggccgcagccgccgagcatcaggaccaaggccaggaggtgaatggcgaggttcgatcgcgccgggactctatctgcagtagtgtatctctggagtcatcagctgctgaaacccaggaggagatgttgcaggtgctgaaggaaaagatgcgcctggagggccagctggaggctctctcactggaggcttcacaagcgctcaaagaaaaagctgagctgcaggcgcagcttgctgctctctctacaaaactgcaggcccaagttgaatgctcccatagcagccagcaaaggcaggactccctctcatccgaggtcgataccctgaagcagtcttgttgggatctggagagagcaatgacagacctgcaaaatatgttagaggctaagaatgcaagtctcgcttccagcaacaacgacctgcaggtggccgaggagcagtaccagcgtctgatggcaaaagtcgaggacatgcagcgttctatgctctctaaagataatacagtgcacgacctaaggcagcagatgactgcactccaatcacagctacagcaggtgcaattagagcgaactaccctgaccagtaagttgaaagcaagtcaggccgaaatctcctcgcttcagagtgtaagacagtggtatcaacaacagcttgccctggcccaggaagctagagtgcgattgcagggggagatggctcatatacaggtgggccagatgacccaggcgggacttctggagcatctgaagttggagaatgtgtcgctgagtcagcaactaacagagacccagcatcgatctatgaaggaaaaaggccggatagcggcccagctgcagggaatagaggcagacatgctcgatcaggaagctgcattcatgcagattcaagaggcgaagaccatggtggaggaggacctgcagcgtcggctggaggaattcgaaggagagcgagagcggttgcagagaatggccgattctgcggcgtctctagaacaacagctcgaacaagtcaagctgaccctgctgcaaagggaccagcagctcgaggcccttcagcaggagcacctggacctaatgaagcagctcactctgacccaagaagccctccagagcagagaacagagtttagacgcactgcagacacattatgacgagttacaggcccggctgggagagttacagggcgaggccgcttccagagaagataccatttgcctgctgcagaacgagaagatcattttggaagcagctcttcaggccgccaagagtgggaaagaggagctcgaccgaggggctcggcggcttgaagagggtacagaggagacgagcgaaacgttagagaaactgagggaggagttggccatcaaaagcggacaggtggagcatctgcagcaagagaccgccgcattgaaaaagcagatgcagaagatcaaggaacagtttcttcaacagaaagtaatggtcgaggcctatagacgggatgcgacctctaaggaccagttgatttctgagcttaaagcgacacggaagcggctggactcggagctgaaagagcttcgccaggagctaatgcaggtccatggcgagaagaggacggctgaggccgaactgtctcgactccatcgagaagtcgctcaggtgagacagcacatggccgatctggagggacacttgcagagtgcccagaaagaaagagacgaaatggagacacacctgcagagtctgcagtttgataaagagcagatggtggccgtgacagaagctaacgaggcgctgaaaaaacagatagaagagctgcagcaggaagctaggaaagccataactgaacagaagcaaaagatgaggcgcctgggctccgacttgacttctgcgcagaaagagatgaaaactaagcacaaggcatatgagaacgccgttggcattctgagtcgtcgtctccaggaagccttggcagctaaagaagccgccgatgccgagctcgggcaattgagggcacaaggcggctcatccgattcctccttagcactccacgagcgaattcaggccttagaggccgaattacaggccgtcagtcattccaagaccctcctagaaaaagagctccaggaagttattgctctcaccagccaagagcttgaagaatcaagagaaaaggttttggagctagaggacgagttgcaggagagtaggggtttccggaaaaagatcaagaggctggaagagtcaaacaaaaagcttgcactggaattggaacacgaaaaagggaagctgacaggactaggtcagagtaacgccgccctgcgggaacataacagcatcttagaaacagctctggctaaacgcgaagctgatctggtacagctgaacctgcaagtgcaggctgtgttacagcgcaaggaagaagaggatcgccagatgaagcacctcgttcaggcgctacaggcctcacttgaaaaagagaaggagaaagtgaattcgcttaaagagcaagttgccgccgccaaagtcgaggcgggccacaatagacgccactttaaagccgcatcgctagaactgtcagaagttaaaaaagagctgcaggccaaggagcacttagttcaaaaattgcaagcagaagcagatgatttgcagatccgcgaaggtaagcatagccaggaaatcgcccagtttcaggcggagttagccgaagcccgcgcgcaactccagctgctccaaaagcagctcgacgaacagctgtcaaagcagccagtgggaaaccaggagatggagaacttgaaatgggaggttgaccagaaagagcgagagattcagagcttgaagcaacagctggatctcacagaacagcagggaaggaaagaattggagggactccagcaactgctgcaaaacgtcaagtctgaactggagatggctcaagaagatctcagcatgacacagaaggataagtttatgctgcaggctaaggtgtcagagctgaaaaataatatgaagaccctgcttcagcagaatcaacagttgaagctggatcttcgaagaggcgcagcaaaaacgcgcaaggagcccaaaggcgaggcttcttctagtaacccagcaactcccataaagattccagattgccctgtgccagcttccctcctggaagaactgttacgtccccctccagcagtaagcaaggagccacttaagaacctaaactcctgcctccagcagctcaagcaggagatggacagcctacagagacagatggaggaacacgcccttaccgtgcacgagtcgcttagcagttggactccactggagccagctactgcatcgcccgttcctcccggaggtcacgccggaccccggggtgatccccagcgccatagtcagagccgggcgagcaaagagggtcccggcgagtag

SEQ ID NO: 118953 - DNA, 4173 bp, synthetic construct
  misc_feature 1..4173: note = Description of Artificial Sequence: Synthetic coding sequence
  source 1..4173: mol_type = other DNA
atggacggagccagcgcagagcaagatggcctgcaggaagacaggtcgcatagcgggccctcgtctctgcctgaggcccctctgaagccacccggtccgctggtgccccctgaccagcaagataaagtccagtgtgcagaggttaacagagcatcaacagagggcgagagtcctgacggccccggccagggcggattatgccaaaatgggccgacgcctccattcccagatccaccttcaagcctcgatcccactaccagccccgtgggccctgatgccagtcccggagtggccggattccatgacaacctccggaaatcccaggggacctctgccgagggctcagtccggaaagaagccctgcagtccctaaggctcagtcttcctatgcaagaaacacaactttgtagcacagacagtccgctgccgttggaaaaagaggagcaggtaaggctgcaggctagaaagtggcttgaagagcagctcaagcaatatcgcgtaaagcggcagcaagagcggagctcacagccagccacaaaaactcgactctttagcacattggatccagagctgatgttaaaccctgaaaatcttcctagggcaagcacactagctatgacaaaagagtattcatttttgcgcacaagtgtcccaaggggtccaaaagttgggagcctcggacttccagcacatcccagggagaagaagacctcaaagagtagtaagatcaggagcctcgccgattataggaccgaagattccaatgcaggcaactccggtggcaatgtccccgccccggactcgaccaaagggtcactgaaacagaataggtcatcggccgcttccgtggtctccgagatctcgctctcccccgacacagacgatcgattagagaatacttctctggcgggcgacagtgtgtcagaagtcgatggcaacgattctgactccagcagttacagcagcgcttcgacaagggggacgtatggcatcctgtccaagacagttgggacccaggataccccctacatggtcaatgggcaggaaatacccgccgacactctgggccaatttcccagtattaaagacgtcctccaggccgctgctgccgaacaccaggatcaaggacaggaagtgaacggggaggtacggagtagacgggactctatttgttccagtgtttccttggagtcttccgctgccgagacccaggaggagatgcttcaggtgttgaaggagaaaatgcggcttgagggccaactggaagccctgagcctggaggcctcacaagctcttaaagagaaagcagagctccaggcgcagctggctgcgctctccactaagctccaagcccaggtggaatgcagccattcctcccagcagcggcaggatagtttgtcctcagaggtggacaccctcaaacagtcttgttgggaccttgagcgcgcaatgaccgatttgcagaatatgctggaagccaagaatgcgtcgctggcctcgagtaataacgacctgcaggtagcagaggagcagtatcaacggctaatggccaaagtggaggatatgcaaaggagcatgctctccaaagacaacactgtacacgatctgcgtcaacagatgaccgcacttcagtcccagctccagcaagtccaactggagcgcacaacactgacctcgaagcttaaggctagtcaagccgagatttcaagcctccaatcagtgagacagtggtaccagcaacaacttgctctcgcccaggaggcccgggtgcgtctgcagggcgaaatggcccacattcaggtagggcagatgactcaggccggcctcctggaacatctcaaactcgagaacgtttccctttctcaacaactcactgagactcagcataggtccatgaaagaaaaggggcgcattgcggcccagctgcagggtatcgaggctgacatgctggatcaggaggccgccttcatgcaaatccaggaggctaagaccatggtggaggaagacctgcagcgtagattggaggagtttgaaggggagcgagagagactccagagaatggctgacagcgccgcttccttagagcaacagctggaacaggtaaaattgaccctgctccagcgcgatcagcagctggaggcattgcagcaggagcacctggatctgatgaaacagctgacactgacgcaagaggcactgcagagtagagagcagagcctcgatgccctgcagacacactacgacgaattgcaggcgcgactgggcgagctacaaggcgaagcagctagccgggaagacaccatctgcctgcttcagaatgaaaaaataatcctggaagccgcactccaagccgccaaatctggcaaagaagaattagaccgtggcgcgcgcaggttggaagagggtactgaggagacgagtgagactctggagaagctacgggaagaattggcaatcaagtctggacaggtggagcatctgcaacaagaaacggccgccctgaagaagcagatgcagaagattaaggagcagttcctgcagcagaaggtcatggtcgaggcttatagacgggacgccacctcaaaggatcagctgatctctgaactcaaagccacacgaaagcgccttgactctgaactcaaggagttaaggcaggaactcatgcaggtccacggagagaagaggacggcggaggccgagctaagtcgcctccatcgcgaagtggcccaggtcaggcagcacatggcagatttggaaggccatctccaaagcgcccagaaggaaagagatgagatggaaacacacctgcaaagcctgcagttcgataaagagcagatggtggctgttacagaagctaatgaggctctcaagaaacagattgaagagctccaacaggaggccaggaaagcgattacagagcagaagcagaagatgagacgccttggcagtgatctgactagtgctcagaaagaaatgaaaaccaagcacaaggcctacgagaatgcagtaggaatcctcagtcggcggctgcaggaagccctggccgccaaggaagcggcagacgctgaacttggacaactccgggcacagggagggagttccgattccagcctcgcgctgcatgagaggatccaagctctggaggccgagctgcaagctgtgagccatagcaaaacactgctcgaaaaagagttacaggaagtcatcgccctgacgagccaggaactcgaggagagcagagaaaaggtgttggaacttgaggatgagttgcaggaatcccgcggcttcagaaagaagatcaaacgcctcgaagaatctaataagaaactggccctggagctggaacacgaaaaagggaagctaacaggactgggacaatcaaacgccgcccttcgagagcacaactctattctggagactgcccttgcgaagcgcgaggcagatctcgtccagctgaacctgcaggtgcaggctgtgctgcagaggaaagaagaggaagacaggcagatgaagcacctcgtccaggccttgcaagccagtctcgagaaagaaaaagagaaagtgaatagtttgaaggaacaggtggccgctgcaaaggtggaagcgggccacaacaggcggcactttaaggccgcctccctggaactgagcgaggtgaaaaaggaactgcaggcaaaggagcacttagtgcagaagctccaggccgaggccgacgatctccaaattagggaaggaaaacactcacaagagattgcacagttccaagccgaactggcagaagctagagcacagcttcagctcctccagaagcagcttgacgagcagctgagcaagcagcccgtcggaaatcaggagatggagaacttgaaatgggaagtggatcagaaagaacgcgagattcagtccctgaaacagcagctcgatcttacggaacagcaggggagaaaggaactcgaggggcttcaacagctgctgcagaatgtgaaatctgagctggagatggcacaggaggatctctccatgacgcagaaggacaaattcatgctacaggcaaaagtaagtgagttgaaaaataatatgaaaactctccttcagcagaatcagcagctgaaactcgatctgagacgcggagcggccaagactgtgctcagacccgcatcccttccaggttag

SEQ ID NO: 118954 - DNA, 3405 bp, synthetic construct
  misc_feature 1..3405: note = Description of Artificial Sequence: Synthetic coding sequence
  source 1..3405: mol_type = other DNA
atggacggcgcctctgccgagcaagacggtttacaagaggaccggtcgcactctgggccatcctctcttccagaggcacctctgaagccccccgggccactggttccaccagatcagcaggacaaagtccagtgtgcagaggtgaatcgtgcctcgactgaaggagaaagcccagacgggccaggacaggggggactctgtcagaacgggccgacgccaccttttcccgatcctccaagttcactggaccccactacatcaccagtgggacccgatgcgtcccctggcgtggcagggtttcacgacaacctgcgaaagagtcagggtaccagcgcagaagggtctgtgcgtaaggaggcccttcagtcgctcagattgtccctgcccatgcaggaaactcagctgtgctccacagatagccccctccccttagagaaggaggagcaagttcgcctgcaagctagaaagtggctggaagaacaattgaagcaataccgcgtgaagcggcagcaggagcgatcttctcagcccgccactaagacacggctcttttccacacttgatccagagctcatgctcaaccccgagaacctgccacgggcctccacactagctatgaccaaggagtattcattcctgcggacctccgtgccccggggacctaaagtgggtagtctggggttacccgcccatccgagagaaaagaaaacctccaagagcagcaagatccgtagcctcgccgattacaggaccgaagacagcaatgctggcaactctggagggaatgttcctgctcctgacagcaccaagggctctctgaagcagaacaggagcagcgccgccagcgtcgtatccgaaatatcgctatcccctgataccgatgacagactggaaaatactagcctggcaggcgattcagtcagcgaagttgatggtaatgactctgatagcagttcctacagctcagcatcaacgcgcgggacctatgggatcctttccaagaccgtagggacccaggataccccttacatggtcaatggccaagaaatacctgccgatacactgggacagtttccatccatcaaagacgttctccaggccgcagccgccgagcatcaggaccaaggtcaggaagtgaacggcgaagtgaggtccaggcgcgactccatctgctcatctgtttctctcgaaagtagtgcagcagaaacccaagaagagatgcttcaggtcctgaaagaaaagatgcgtttggagggccaactggaagctctgagtctggaggcttcccaagccctgaaagagaaagcggagctgcaagcacagctggctgccctgtccaccaaactccaggctcaggtcgagtgtagccatagttctcaacagaggcaagactcactgtccagcgaagttgacacgctgaaacagtcgtgctgggatctggagcgggctatgaccgatctccaaaacatgctcgaggctaaaaacgcgtcgctcgcatcctctaataacgacctccaagtcgccgaggagcagtatcagcggctgatggccaaggttgaagacatgcagcgcagcatgttgtcaaaggacaataccgtgcatgacctacggcagcagatgaccgcactgcaatctcagctccagcaggtgcagctggagaggactactttgacctcaaaattgaaggccagccaggcggaaatcagcagtctgcagagcgtccgtcaatggtatcaacagcagctggctctggctcaggaagccagagtccggctccagggcgagatggcccacatacaggtgggtcagatgactcaggcagggctgctggagcatctgaaactagagaatgtgagtctgtcccaacagcttaccgagacccaacacagatctatgaaagaaaagggccgcatagccgcacagctccaagggatcgaggccgacatgttggatcaggaggctgcattcatgcaaatccaggaagcgaaaaccatggtggaggaagacctacaacgacggctggaagagtttgaaggggaacgtgaaagactgcagaggatggccgatagtgccgcaagccttgaacagcagttggagcaagtcaaactgacactgctccagcgggatcagcaactggaggctctgcagcaggaacacttggatctcatgaagcagctcacactgacgcaggaagctctacagtcacgcgaacagtccctggacgccctgcagacacattatgatgaactgcaagctcgcttgggtgagctgcagggggaagcggcatcgcgggaagatacgatctgtctgctgcagaatgaaaaaattattctggaggcagcactgcaggctgctaagagcggaaaggaggaactggacagaggcgcaagaagacttgaggagggcaccgaagaaacatctgagacgctggaaaaactaagagaagagctggccatcaagagcgggcaggtggagcacttgcaacaggagacagccgcactcaagaagcagatgcaaaaaatcaaggagcaattcctacagcagaaagttatggtggaggcttatagacgggacgcaacatctaaggatcaattaatctcagagttgaaagccaccaggaagcggcttgactctgagctgaaggagctgaggcaagagctaatgcaggtccatggggaaaaacgcaccgcagaggctgaactctctcgccttcatcgggaggtggcacaagtacggcaacatatggcagacttggaaggccacctgcagtctgctcagaaggaacgagacgagatggagacccacctgcaaagcctccagttcgacaaagaacagatggttgctgtcactgaggccaatgaagcactgaagaaacagatcgaggagctccagcaggaggccaggaaggccataacagaacagaagcagaagatgcggagactgggtagtgacctgacctccgctcagaaggagatgaagacaaaacacaaagcatatgagaacgcagtgggaatcctgagtaggagactgcaggaagctttagctgctaaggaagctgcggacgcagaactgggtcagctccgggctcagggaggcagttcagacagtagcctggctctgcatgagcgaattcaggcgctggaggccgaactccaagctgttagtcacagtaagactttactcgaaaaggaacttcaggaagtgattgcactgactagccaggaacttgaggagtcccgggaaaaggtgttggagctagaagatgaggtccgccccggtcacttgctttggagacagcggggggccgggcacgtctcaccagggcatgccgccacaagggagactcgacggactaagctgcaccgggtgccatctgtcgctacctttggagtggctacgttttag

SEQ ID NO: 118955 - DNA, 6693 bp, synthetic construct
  misc_feature 1..6693: note = Description of Artificial Sequence: Synthetic coding sequence
  source 1..6693: mol_type = other DNA
atgtttaagaagttgaagcagaagatcagcgaggaacagcagcagctgcagcaggccttggcccctgcccaagctagctccaacagcagcacccctactcggatgcgatcccggacctcttcgttcaccgagcagctggacgagggaacacccaacagggaaagtggggacactcagtcctttgctcagaagctacaactgagagtcccatcagtggagagcctgtttagatctccgatcaaggagtctctgtttcggtccagctccaaggaatcccttgtgcgaaccagttcacgcgagagcctgaacaggttggatctcgacagttcaactgctagcttcgacccacctagtgatatggattcagaggctgaagatttggttgggaattctgattctctgaataaagaacagctgatccagagattacggcgcatggagagaagcctcagctcgtatcgcggcaaatattccgagctcgtcacggcgtatcaaatgttacagcgtgagaaaaagaaactacagggaattctgagtcaatctcaagacaagtctctgcgccgtattgctgaacttagggaggaactccagatggaccagcaggccaagaaacacttgcaggaagaatttgatgccagcttggaggagaaagaccagtatatttcggtcctgcagacacaggtgtccctccttaagcagagattacgcaatggcccgatgaacgtagatgtccttaagccccttccccagttggaacctcaggccgaggtctttacaaaagaggagaatcctgagtctgatggcgagccagttgttgaggacggaacctccgtgaaaacgctggagacactgcagcagcgtgtcaagaggcaggagaacttacttaagcgctgtaaagagacaatacagtctcacaaagagcagtgcacccttttaacgtccgagaaggaagccctgcaggagcagctggatgagcgtttgcaggaactggagaaaatcaaggaccttcacatggccgagaagaccaagttaattactcaattgcgtgatgcgaaaaacttgatcgaacagttggaacaggacaaaggcatggtcatcgctgaaacaaagagacaaatgcatgaaactttggaaatgaaggaagaagaaatcgcccagctcaggtcccggatcaaacaaatgacaacccagggcgaggagttgagagagcagaaggaaaagtcggagcgggctgcttttgaggagctggaaaaagccctatccacagcccagaaaaccgaggaggcccgacgaaaactaaaggccgaaatggatgagcagataaaaaccatcgaaaaaacatctgaagaggagcgaatctcccttcagcaggaactgtcccgtgtgaagcaggaggtggttgatgtgatgaaaaaaagcagcgaggagcaaattgcgaagctgcagaaattgcatgagaaggagctggctcgaaaggagcaggagctgactaaaaagctccaaaccagggaaagagagttccaagagcagatgaaggtagctttagagaaatcccagagcgagtacctgaaaatctcccaggagaaggagcagcaggagtcactggcgctcgaggaactcgaactccagaagaaggccattctcactgaaagcgaaaataaactgcgtgatctgcaacaagaggcagagacttatagaactaggatactggagctggagtccagcctagaaaagtcactgcaggagaacaagaaccagagcaaagatctggccgtgcatctggaagccgaaaagaataagcataacaaggaaattaccgtcatggtggaaaaacacaaaaccgaactagagagcttaaagcaccaacaagacgctctatggaccgaaaagctgcaggttctgaaacagcagtaccagaccgagatggagaaactgcgtgagaagtgtgagcaggaaaaggagacacttttaaaagacaaggagatcatctttcaagcccacatcgaggaaatgaatgaaaagaccctcgaaaagctggacgtaaagcagacggaattggagagcttgtctagcgagttgagtgaggtcctcaaggcgcgccacaaacttgaggaagaactgtcggtgctgaaggatcagacagacaaaatgaaacaggagttggaggctaaaatggacgagcaaaagaaccaccaccagcagcaggtggattccatcattaaggagcatgaggtcagcatccaacgtaccgagaaggcacttaaggatcagatcaatcagcttgagctcctgctcaaggaaagagacaaacatctgaaggaacaccaagcccacgttgaaaatttggaggcagatattaagcgcagcgaaggtgagctgcagcaggcttctgcaaagctggacgtgtttcagtcttaccagtcggcaacacacgaacagaccaaggcatacgaagagcagttggcccaactccaacagaaactcctggacctggaaaccgaaaggatcctgcttaccaagcaggtcgccgaggtggaagctcaaaagaaggatgtctgtacagagctggacgcacataagattcaggtgcaggatttgatgcagcagttggaaaagcaaaattccgaaatggagcagaaagtgaagtcgctgacccaggtctatgaatctaagcttgaagacggaaataaggagcaggagcagaccaagcagatacttgtcgagaaagagaatatgatcctgcaaatgcgcgaaggccaaaagaaagagattgagattctgacccaaaagctgagcgccaaagaagattccattcatatattgaatgaagagtacgaaacaaagtttaagaaccaagaaaagaagatggagaaggttaaacagaaagccaaggagatgcaggaaaccctcaaaaaaaaactgctagatcaggaagccaagttaaaaaaggaattggagaacacagcacttgagttaagccagaaggagaaacagttcaacgccaaaatgcttgaaatggcacaagccaatagcgccggtatttccgatgctgtttcacgacttgaaacaaatcagaaagagcagatcgagtcgttaacggaagtgcacagaagggaactgaatgacgtgatcagcatttgggagaagaaacttaaccagcaggctgaggagctacaagagatacatgagattcagctgcaagagaaggagcaagaggtggccgaactgaagcagaaaattttattattcggatgtgaaaaagaagagatgaataaagaaatcacatggctaaaagaggaaggcgttaagcaggataccaccctcaatgagttacaggaacagctgaaacaaaaaagcgctcatgtgaactcacttgcccaggatgagaccaaactgaaggcacacttggagaagcttgaggtcgacctcaacaaatctctcaaggagaatacttttttgcaggaacagttggttgagctcaagatgctggccgaagaggataaaagaaaagtgagcgaacttacctccaagctgaaaacaacggatgaggagttccagtccctgaagtcatcccacgaaaagagcaacaaaagcctcgaggacaagagcttggaattcaagaagttgagcgaagaactggccatccagttagacatctgctgcaagaagaccgaggccctgctggaagctaagaccaacgaactcataaacatttcatccagcaaaacgaatgccatcttatcaagaatcagccattgtcagcatcggaccacaaaggtgaaggaggctctgctcatcaagacgtgtactgtgtccgagctggaagcccagctgcggcagctgacagaagagcagaacaccctgaacatcagctttcagcaagccactcatcaattggaggagaaagaaaaccaaatcaaatcgatgaaggcagacattgagtctcttgtaactgagaaggaagcactacagaaagaagggggcaatcaacagcaggccgcttctgagaaggagtcctgtattacccagctcaagaaggaactgtctgagaacatcaacgccgttactctgatgaaggaggagctgaaggaaaaaaaagtcgaaattagctctctctctaagcagctgaccgacctcaacgtgcagctccagaactccattagtctgtcagaaaaggaggctgccatatcttctctgcgcaagcagtacgacgaggaaaagtgtgagttactcgatcaggttcaggacctgagtttcaaagtcgatacacttagtaaagagaaaatttcggccctggagcaggtggacgattggtctaataaattttcagagtggaaaaagaaggcccagtcaagatttacacagcaccagaatacagtcaaagagctgcagatacagctcgagctgaaatccaaagaggcctacgaaaaggacgaacaaattaatcttctgaaggaagaattggaccagcaaaacaaaaggttcgattgcctgaagggcgaaatggaggatgacaagagcaaaatggagaagaaggagtcaaacctggaaaccgaattgaaatcacagactgctcgcatcatggagttggaggaccacataacgcagaagaccatagaaattgagagcctgaatgaggttctaaaaaattataaccaacagaaggacattgagcataaagaacttgtgcaaaagctgcaacacttccaggagcttggagaggagaaggataatagagttaaggaggccgaagagaaaatccttaccctggagaatcaggtttattcaatgaaagccgagctggaaacgaaaaaaaaggagctcgagcacgtcaacttgtcagtcaagtcaaaggaggaagaactgaaggcgctagaagatcgactcgagagcgaatccgccgctaagctcgctgagcttaaaagaaaggctgagcagaagatagccgccattaagaaacagctgctgagtcagatggaggagaaagaagagcagtataaaaagggcaccgaatcccacctaagcgagttgaataccaaattacaagaaagagagcgcgaggtccatatcctagaggagaagctgaagtcggtcgagtctagccaaagtgagaccctcatcgtaccacgaagtgctaagaatgtggcagcttatacggagcaggaggaggctgatagccaaggctgtgtccagaaaacctatgaggaaaaaatctccgtcctccagcggaacttaactgaaaaagagaagctgctgcagcgcgtgggacaggaaaaagaagagactgtgagctcccactttgagatgcggtgtcagtatcaggagcgtctgatcaagctcgagcacgccgaggctaagcagcacgaggatcagagcatgataggacatctgcaggaagaattggaggagaagaacaagaagtattcacttatcgtggcccagcacgttgagaaggagggaggtaagaacaacattcaggccaagcagaatctcgagaatgtgttcgacgacgtccagaaaacattgcaggagaaagagctcacatgtcagatcctcgagcagaagattaaggagcttgatagttgcctggttagacagaaggaagtccatagggtcgaaatggaggagctcacttcaaagtatgagaaactccaagcactgcagcagatggacggacgcaataaacctacagaactcctggaagagaataccgaagaaaagtctaagagtcaccttgtccagcctaaattgcttagcaacatggaggcacagcacaacgacctggaatttaaattggctggagccgagcgcgagaaacagaagcttgggaaggagatagtcagactccagaaggaccttcggatgttgagaaaggaacaccagcaggagctggagattctgaagaaggagtatgaccaggaacgggaggaaaagatcaaacaagagcaggaggacctggaactgaaacataactccacgcttaaacagctaatgcgggagttcaacacacagttggcccagaaggagcaggaattagagatgacaatcaaggagacgataaacaaggcacaagaggtggaagccgaactgctggagtctcaccaggaagaaacgaaccagcttctcaagaagattgccgagaaggacgacgatctgaaacgaaccgccaagagatacgaggagatcttagacgcacgtgaggaagaaatgacggccaaggtgcgggacctacagacacagctggaagagctccagaagaagtaccaacagaagctagaacaggaggagaatcctggaaacgacaacgtaactattatggagctccagacccagctagcccagaagactactctcatctctgatagcaaactcaaagagcaagagtttcgagagcagattcacaacctggaggacagattgaaaaaatacgagaaaaacgtttacgcaacaaccgtaggtaccccatataagggaggcaatttatatcacactgacgtgagcctctttggagagccaacagaatttgagtatctgcggaaggtattgttcgagtatatgatggggcgcgagacaaagacgatggctaaggtgatcactacagtcctgaagtttcctgacgatcagactcagaagatccttgagagggaggacgcgagactgatgttcacatccccacggtccggtattttttag

SEQ ID NO: 118956 - DNA, 6732 bp, synthetic construct
  misc_feature 1..6732: note = Description of Artificial Sequence: Synthetic coding sequence
  source 1..6732: mol_type = other DNA
atgttcaaaaagctgaagcagaagatttcagaagaacagcagcagctgcagcaggccctcgcacctgcacaggcttccagtaattccagcacgcctaccaggatgaggagccggacgtccagcttcaccgaacagctggatgagggaacaccgaatcgcgagaacgcttctacacatgcaagcaaatctcccgattcagttaatggcagcgaacccagcataccccagagcggtgatactcagagcttcgctcagaagctgcaactgcgagttcccagcgtcgagagcctgttcagatcaccgatcaaggaatccctgtttcgcagcagttctaaggagtctttggtgagaacatcctcccgcgagtctctgaaccgtttagatttagacagctctaccgcctctttcgatccaccttccgatatggattccgaagcagaagatttggtcggaaacagcgactctctgaacaaggagcagttaatccaaaggctcagacggatggaaagatctctctcttcttaccggggcaagtatagcgagttagtgacagcttaccaaatgctgcaaagggagaagaaaaagctgcaggggatattaagtcagtcgcaagacaagagcttgaggcgaatcgcggagctgcgggaggagttgcaaatggatcagcaggcaaaaaagcatctgcaagaggagtttgatgccagcctggaagaaaaagatcagtacatcagcgtgctccagacccaggttagccttcttaagcagaggctaaggaatggacctatgaatgtggacgtgctgaagccactccctcagttggagcctcaagccgaggtgttcaccaaagaggagaatcccgagagcgacggcgagcctgttgttgaagacggcacgtctgtgaagacgttagagaccctccagcaacgagttaagcggcaggaaaacctactaaagagatgtaaagagacgatccagtcacacaaagagcagtgtacgctgctcacctctgaaaaggaagctttacaggagcaattggacgagaggctgcaggaactggaaaagatcaaagacctgcacatggccgaaaagactaaactgatcacccagctgagagacgccaaaaacctgatcgagcagctggaacaggataaggggatggtcatcgcggagacgaagaggcagatgcacgaaactctggaaatgaaggaggaagagatcgcacagctgcggtcaaggattaagcagatgaccacccagggggaggaattgagggagcagaaggagaagtccgagcgggctgcttttgaggagctggagaaggccctgtcaaccgctcagaaaaccgaggaggcccgcaggaaactgaaggccgaaatggacgaacagattaagacaatagagaagacatcggaggaggaacgtatctctctgcagcaggagctgtcacgcgtgaaacaggaggtggtcgacgtgatgaaaaagtccagtgaagagcaaattgccaaattgcagaagttgcatgaaaaagaactagccaggaaagaacaggagttaactaaaaagctgcagaccagggagcgggaatttcaagaacaaatgaaggtagcccttgaaaagtcccagtcggaataccttaaaatatctcaggagaaggagcaacaggagtccctagctctcgaggagcttgagttgcagaagaaagcaatccttacggagagtgagaacaagctccgggatctgcagcaggaggcagagacttaccgcaccaggatactggagttagaaagctctctggagaaatcgctgcaagaaaataagaatcagagcaaggatctcgccgtacacctagaggctgaaaagaacaagcataataaggagatcaccgtgatggtggaaaaacacaagactgaactcgaatcactgaaacaccagcaggatgccctgtggactgagaaactgcaggtgctgaagcagcagtaccagacggaaatggaaaagcttcgcgagaagtgtgagcaggagaaagaaacactgttgaaggataaagaaataattttccaggcccacattgaagagatgaacgagaagaccctggagaagctggacgtgaaacagaccgaacttgaatctctgagcagtgaactgtccgaagttctgaaggctagacacaaactcgaagaagaactgtcagtgttaaaggaccaaaccgacaagatgaaacaggaactcgaggctaaaatggatgaacagaaaaaccaccaccagcagcaagtggactccatcattaaagagcatgaagtgagtattcaaagaaccgaaaaggccctgaaggatcaaatcaaccaactggagctgctgctgaaggagagagacaaacatttaaaggaacaccaggcccacgtggagaaccttgaagctgacatcaaacgcagcgagggcgaactccagcaagcttctgctaagctggatgtcttccaatcataccagtcggcgacacacgaacagacaaaagcctacgaggagcagctggcacaattacagcagaagctattggacctggagacggagcgaatcctgctaacaaagcaggtagccgaggtagaagctcaaaaaaaggacgtgtgcaccgaattggacgcccataaaatccaggtccaggacctaatgcagcaacttgagaaacagaattcagaaatggagcagaaagttaaatctctgacccaggtgtatgagagcaaacttgaagacggtaataaagagcaagagcagaccaagcagattttagtggagaaagagaatatgatccttcaaatgagagaggggcagaaaaaggagatcgaaatactaacacagaagctgagcgccaaagaggattcaatacacattttgaacgaggagtacgaaaccaaattcaagaaccaggaaaagaagatggaaaaagtaaagcaaaaagccaaagagatgcaggaaaccctgaagaagaagctgctcgaccaggaagcaaagctcaagaaagagttggaaaatactgctcttgagctgtcccagaaggagaagcagtttaacgctaaaatgctggagatggctcaggccaacagtgccggtatttccgacgccgtatcgcggctggaaaccaatcagaaagagcagatcgaatctctgactgaggtgcatcggcgggagcttaatgatgtcatcagcatctgggagaaaaagttgaaccagcaggctgaggagctccaggagatccatgaaatccaattacaagagaaagaacaggaagtggccgagctgaaacagaaaatcctcttattcggctgtgagaaggaagagatgaacaaagagattacatggttgaaagaggagggggtcaaacaggataccaccttgaacgaactccaagaacagctcaaacaaaaatcagctcacgtgaactccttagcccaggatgagaccaaactcaaggcccacctagagaagctcgaagtggatctgaataagagcttgaaagaaaacacttttctccaggagcaactggtggagctgaagatgctggcagaggaagacaaaagaaaagtttccgagttaacatcaaagctgaaaaccactgatgaggagttccaatccctgaagagctcccacgagaagtccaataagtcacttgaagacaagtccctcgagttcaaaaaattatcagaggaactggccatccaattagatatctgctgcaaaaaaaccgaggcactactggaagctaaaacaaacgaactcatcaacatcagcagtagcaaaaccaatgctatcctgtcaaggatctcccactgccaacataggaccaccaaagtcaaggaggctctacttatcaaaacttgtactgtgagtgagctggaggcccagctccgtcagttgacagaagaacagaatactctgaacatctcttttcagcaggcaactcaccagctggaagaaaaagaaaatcagattaagagtatgaaagccgacattgaatcactcgttactgagaaagaggctttgcagaaggaagggggaaaccagcaacaggctgcgagcgaaaaagaatcttgtatcacacagctgaaaaaggaactttccgaaaacatcaacgccgtgacacttatgaaggaggaactcaaggagaaaaaggtcgagatcagctcactctccaaacagttgaccgacctaaacgttcagctgcaaaactcaatttcgctgagcgagaaagaggcggcaatttcctcgctgcgtaaacagtacgatgaagaaaagtgtgagctactcgatcaggttcaggacctttcattcaaagtggataccctgtccaaggagaagataagtgctctggagcaggtggatgactggtccaacaagttctcggaatggaagaaaaaagcccagtctcgattcacgcaacatcagaataccgtgaaagagctgcagatccaactagagctgaagtccaaggaggcctacgagaaggacgaacagatcaatctcctcaaggaggaactggatcaacagaacaagcgatttgattgtcttaaaggagaaatggaggacgacaagtccaaaatggagaagaaagagtccaacctggaaacggaactgaaaagccaaaccgcaagaatcatggaactcgaagatcatatcacgcagaagacaatagagatcgaatctctgaatgaggtcctcaagaattacaaccagcagaaggacatcgagcataaggaacttgtgcagaaattacaacacttccaggagctaggggaagagaaggataatcgcgtcaaagaagccgaagaaaagatcctgacattggagaatcaggtgtacagtatgaaagccgaactcgagaccaagaaaaaggagttggaacacgtgaatcttagcgtgaagagcaaagaagaggaattaaaggctctggaggatcgcctagagagcgaatcagcagcaaagctggctgaacttaagaggaaagctgagcaaaagatcgccgcaattaaaaaacaactactgagccagatggaagagaaggaggagcagtataagaaagggacagagagccatttgtctgaactcaacaccaaattgcaggaaagggaaagggaagtacacatactagaggaaaagctgaaaagcgtcgagtccagtcaatccgaaacgctgatcgttcctcgatccgcgaaaaacgtcgccgcatataccgagcaggaggaagccgactcacagggctgcgtgcagaaaacatatgaagagaagatcagcgtgctgcagcgcaaccttaccgaaaaagaaaagctattgcaacgggtgggccaggaaaaggaagaaactgtgtcttcccactttgagatgcggtgccaataccaggagcggctgatcaaactggaacacgccgaggccaagcagcatgaggaccagagcatgatcgggcacctgcaggaggagctggaggagaaaaacaagaagtatagcctcattgtcgcccagcacgtagagaaggaaggcggcaagaataatattcaagccaaacagaatctggaaaacgtgttcgacgacgtccaaaaaaccctgcaggagaaagaattgacctgccagatcttggaacaaaagataaaggagttggatagttgtctcgtgcgacaaaaagaagtgcaccgggtggagatggaagagctgaccagtaagtatgagaaactgcaggcactgcagcagatggacggtcggaacaaacccacagagctgctggaggagaacaccgaggagaagagtaaatcccacctcgtccaacctaaactactgtctaatatggaggcccagcacaacgacctagaattcaagcttgccggtgccgagcgagagaagcagaagctggggaaggaaatcgttcggctccagaaagatttgcgtatgctcagaaaggagcaccagcaagagctggagattctgaagaaggagtacgaccaggagcgagaagagaagataaagcaggaacaagaagacttggaattgaagcataactcgactttaaagcagcttatgagggaatttaatactcagttggctcagaaagagcaggaactcgagatgacgataaaggaaacaattaataaagcccaggaagtcgaagctgagcttctggagtcccaccaggaagagactaatcagctcctgaagaagatcgccgagaaagacgacgatttaaagcgaaccgctaagagatacgaggagattctggacgcacgcgaggaggagatgacggcaaaagtgcgcgacctccagacccagcttgaggagctgcaaaagaaataccagcagaagctggagcaggaggagaacccaggcaatgataatacacagctggcgcagaaaacaacattaatctctgatagcaagctgaaagagcaggagttccgggagcagatccacaacttggaagaccgcctgaaaaaatacgaaaaaaatgtctacgccaccacggtgggaacaccatacaaggggggaaacctttaccacactgatgtttctctttttggggagcctactgaatttgagtatctaagaaaggtactgttcgagtacatgatgggaagggagaccaagacaatggccaaggtgattaccacggtgcttaaattcccggacgaccagacgcagaaaattctcgagagagaggatgctagactgatgtcgtggctgcgcagtagcagctag

SEQ ID NO: 118957 - DNA, 2196 bp, synthetic construct
  misc_feature 1..2196: note = Description of Artificial Sequence: Synthetic coding sequence
  source 1..2196: mol_type = other DNA
atgtcgtggtttgtggatttagcagggaaagctgaggaccttctgaatcgggtagatcagggagccgccaccgctctttctcggaaggacaatgcctcgaacatatatagtaaaaatactgactacactgagttacatcaacagaacacagacctaatttatcagaccggcccaaagtcaacatatattagcagcgctgccgataacatcaggaatcagaaagcaaccattctggctggaaccgccaacgtgaaggtgggaagccggactcctgttgaggcgtcacacccagtggagaatgcttctgttccacgcccctcctctcacttcgttcggcgcaaaaaatcagagccagacgacgaactgctctttgattttctgaactcatctcagaaggagcctaccgggcgcgtagagatcaggaaagagaagggcaagacaccagttttccagtcatcccagacttctagcgtctcctctgtcaacccaagcgtgaccactataaagactatcgaggaaaactcatttgggagtcagacacacgaggctgcttctaattctgacagttcccacgagggccaagaagagagctccaaagagaacgtatcctctaacgccgcttgtcccgatcacacacccacccccaacgatgacggcaagagtcacgagctgtctaatctgagactggagaaccagctgcttcgcaacgaggtacagtctctgaatcaggagatggcttctctgttacagcgatcaaaagaaactcaggaagagcttaacaaggcacgggcccgcgttgaaaaatggaacgccgatcactcaaaaagtgatcgcatgaccagaggccttcgcgcccaggtggacgatttaacagaggcggtcgccgcaaaagacagccagttagcagtgctcaaagttaggcttcaagaggcagatcagctgctaagcactagaaccgaagcactggaggcactgcagtccgaaaaatctaggatcatgcaagaccagagcgaaggcaactccttgcagaatcaggctctgcagaccttccaggaaagattgcacgaagctgacgcgacattaaaaagggaacaggagtcctataaacagatgcaatctgaattcgctgctagactgaataaggtggagatggagaggcagaacctcgctgaggctattactctggcggaaaggaaatattctgatgagaagaaaagggttgacgaattgcagcaacaggtaaaattatacaagttaaacctggagtcctctaagcaggaattgatcgattacaagcagaaggctacaaggatactgcagtcgaaagaaaaactgatcaactccctgaaggagggcagcggctttgagggactcgattccagcaccgcgtcttctatggagctggaagagctgaggcacgagaaagaaatgcagagagaggagatccaaaagctgatggggcagattcaccagttaagatcggaactgcaagacatggaagcacagcaggtcaacgaagcagagtccgcgagagaacaactgcaggatctgcatgaccaaatcgccggccagaaggcctctaaacaggaactggaaacagagctggagagattgaaacaagaatttcactacatagaggaagacctgtaccgaaccaagaatactctacagagtcgtatcaaggatagagacgaagagatccagaagcttcgcaaccagctgacgaataagacccttagtaactcttcacagtcagaactggagaacagattacaccaactcaccgaaaccttaatccagaagcaaacaatgctggagtcgctgtccactgaaaaaaattccctggtgttccagctagagcggctggaacagcagatgaactcagccagtggctcaagctccaacggctcctcaattaacatgtctggaattgataacggcgaagggacccggctgagaaacgtccccgtcctgtttaacgacactgaaactaatctggctggcatgtatggaaaggtccgcaaggctgcctcatcaatcgaccagtttagtatcaggcttggaatcttcctcaggaggtacccaattgccagagttttcgtgatcatctacatggccttgctgcatctctgggtcatgatcgtgctgctgacatacaccccagagatgcatcatgatcagccatacggcaaatag

SEQ ID NO: 118958 - DNA, 2076 bp, synthetic construct
  misc_feature 1..2076: note = Description of Artificial Sequence: Synthetic coding sequence
  source 1..2076: mol_type = other DNA
atgtcctggttcgtcgatctcgccggtaaggctgaggatctactaaacagagttgatcagggggctgccactgcattaagtaggaaggacaatgcaagcaacatctatagtaagaataccgactatacagaactccaccagcaaaatacggatctgatttatcagacaggcccaaaatccacctacatttcatctgctgccgataatatcagaaaccagaaggcaaccattctggccggtactgccaacgtgaaagtagggagtcggactccggtcgaggcttctcacccagtcgagaacgcaagcgttcctcgccccagctctcatttcgttagacggaaaaaaagcgagccagatgacgagctcttattcgactttctcaactcttcccaaaaggagccaacggggcgggtggaaatcagaaaggaaaaaggtaaaacaccagtgttccagtcctctcaaacctcatccgtgtcatctgtcaaccctagtgtgaccactatcaagactattgaggagaattcttttggctcccagacgcacgaggccgccagcaacagcgactcaagccatgaagggcaggaagagtcctctaaggagaacgttagctcgaatgcggcctgccctgaccacacccctactcctaatgatgatgggaagagccacgaattaagtaaccttagactggagaatcaactgctcaggaacgaagttcagtccctgaatcaagaaatggcctcactcctccaacgatcaaaggagacacaggaggaattgaataaagccagggctcgcgtcgaaaagtggaacgccgaccacagtaaaagtgatcggatgacccgaggactgagggcccaagtggacgacctcaccgaggccgtcgccgctaaagactctcagctagccgtgctcaaagtgcgactccaggaggcggaccaattgctttccacaaggacggaagccctggaggccctccaaagcgaaaaatcccggatcatgcaggatcagagcgagggaaactctctgcagaatcaggcccttcagacgtttcaggaacgcttgcacgaagctgacgcaactttaaagagggagcaggagagctacaagcaaatgcaaagcgaatttgccgccaggttaaacaaagtggaaatggaaaggcagaatctggccgaggccatcactttggccgagaggaaatacagcgacgaaaaaaagagggtggacgagctgcagcagcaggtgaaactttacaaattaaacctggagagttctaagcaggaacttatcgattacaagcagaaggctacacgcattctccagagcaaggaaaagctgataaactcactgaaagaggggtctggattcgaggggctcgactctagcactgcctcaagtatggagctggaagaactccggcacgaaaaggagatgcaaagagaagagatccagaagcttatgggacagatccaccagctcaggtccgagttgcaggacatggaagcccagcaggtcaacgaggccgagagcgctagagagcagttacaagatttgcatgaccagattgcaggccaaaaagccagtaaacaggaactcgagacagagctggaacgactgaagcaagagttccactacatcgaagaggatctgtaccggacaaaaaataccctgcaatccaggatcaaagatcgggatgaagagatccagaagctcagaaaccagttgacaaataagaccctgagtaactcaagtcagagtgagcttgaaaacagattgcaccagcttacagagaccttaatccaaaagcagacaatgctagagagtctcagtacagagaagaattctctcgtcttccagttagaacggcttgagcagcagatgaactccgctagcggaagttcatcgaatgggtccagcattaacatgtcaggtattgataatggagaaggcacaagactgcgtaacgttccagtcctgttcaacgatacagagacaaacctggctggcatgtatggtaaggtacggaaggccgccagttccattgaccaattccggttatgtttcaccagcggctcctag

SEQ ID NO: 118959 - DNA, 1923 bp, synthetic construct
  misc_feature 1..1923: note = Description of Artificial Sequence: Synthetic coding sequence
  source 1..1923: mol_type = other DNA
atgtcctggttcgttgatctcgccggaaaggccgaagacctcctaaatcgtgtcgaccagggggccgctactgccctgtcaagaaaggacaatgccagtaatatctacagcaagaacaccgattataccgagctccaccagcagaataccgatttgatctaccagacgggacctaaaagtacatatatctcttcagccgctgataacatacggaaccaaaaagccactattaagacaattgaggagaactcattcgggagtcagacacatgaagctgcctcgaactcagacagttcccacgaaggtcaagaggaaagctcaaaggaaaatgtctcatcgaacgctgcctgcccagatcatactccgaccccaaacgatgatggcaagtcccacgagctgagcaatttaaggcttgagaatcagctgctgagaaatgaggtgcaatcattgaaccaagaaatggcctcgctcctccaaagaagcaaggaaactcaggaagagctgaacaaggcccgagctagggtggagaagtggaatgcagatcatagtaagagcgacaggatgacacgtggcctccgcgcacaagtagatgatcttacggaggctgttgctgccaaggatagtcagttggccgttcttaaagtgcgccttcaggaagcagaccagctcctatctactcgcacggaagcactcgaggccctccaaagtgagaaatcaagaattatgcaggatcaatctgagggcaattcactccagaatcaggccctccaaacctttcaggaacggcttcacgaagccgatgcgactttaaagagagaacaggagagctataagcagatgcagtcagagttcgcggcacggctcaacaaggtggagatggagcgccagaacttagccgaggcgattaccttggctgagaggaaatattctgacgaaaagaagagggtcgacgaacttcagcagcaggtcaaactgtataaacttaatttagaatcgtcgaagcaggaacttatagactacaaacagaaagccacaagaattctgcaaagcaaggagaaactgattaacagcctgaaagagggctctggcttcgaaggacttgacagctctaccgctagctctatggaactggaggagctgcgtcatgagaaggaaatgcaacgggaggagatacagaagctcatgggtcagatccaccaacttagaagtgaacttcaggatatggaggctcagcaggtaaatgaagctgagagcgcacgtgaacagctccaagatctgcacgaccagattgctggccagaaagccagcaagcaggagttagaaacagaactcgagcgtctgaagcaggagttccattatattgaagaggacttgtataggaccaagaacacactgcagagtaggatcaaagatagagatgaagagatacaaaagctgcgcaatcagctgacgaataagacgttatccaattcctctcagtccgaattggagaaccgcctccatcagctgaccgagactctcattcagaagcagaccatgttggagtccctgagtacggagaagaatagtctggtctttcaactcgagaggcttgagcagcaaatgaattcggcatctggttcttccagtaacgggtcctcgataaatatgtccgggattgacaatggggaggggacacgcctcagaaacgtgccggtgctatttaacgacaccgagactaacctggccggcatgtatggtaaggtcaggaaggcagcgtctagcatcgaccagttcagcatcaggttaggtatcttcctgagaaggtatcccatcgcacgggtgtttgtgattatctatatggctctcctgcatttgtgggtgatgatagttctgctcacatacactccagagatgcaccatgaccaaccgtatggaaaatag

SEQ ID NO: 118960 - DNA, 504 bp, synthetic construct
  misc_feature 1..504: note = Description of Artificial Sequence: Synthetic coding sequence
  source 1..504: mol_type = other DNA
atggccaccgaggtacacaatctgcaagagctcaggcgaagcgcctcactcgccactaaagtgttcatccagagggactattccgacggcaccatttgccagttccagacgaaatttccaccagagctcgactcacggatcgagaggcaactctttgaggaaactgtgaaaactctgaacggcttctatgccgaggccgaaaagattggggggagctcttacttggaaggctgcctggcctgtgctaccgcgtactttatctttctctgtatggagacacactatgaaaaggtgctgaagaagataagtaggtacatccaggagcagaatgaaaaaatattcgccccccgcggtctccttcttacagatccggtggaaagaggaatgcgcgttatcgagatatctatctacgaggatagatgctcatccggcagcagttcctctggttcgagcagcggctcagggagtagttccggtggcggagggggagctggtgcacgctag

SEQ ID NO: 118961 - DNA, 1812 bp, synthetic construct
  misc_feature 1..1812: note = Description of Artificial Sequence: Synthetic coding sequence
  source 1..1812: mol_type = other DNA
atggccgaagaaaccggacagtccaaattggctgctgcgaaaaagaaatttaaagagtactggcagcggaataggcctggtgttccggccgccgctaagcgcaacaccaaggctaacggcagcagccccgaaaccgccgcgagtggcggctgtcatagttctgaggcttcatctagcgcctcgagctctctgcacgctaggcagtccccttgtcaagaacaggctgctgtcctaaattccagatccatcaaaatttcacgacttaatgacaccattaagtccctgaagcagcagaaaaagcaggttgagcaccagctggaggaggagaaaaaagccaataatgagaaacagaaagctgaacgcgaactcgaggggcaaattcagagactgaataccgaaaagaagaaactaaataccgacctttaccacatgaaacactccttaaggtacttcgaggaagaatcaaaggacctggcagggcggcttcaacgatcatctcagaggattggcgaactagagtggtcactctgcgccgtggccgccacacagaagaagaagcccgacggtttcagcagccggtctaaggctctgctgaaacgacaactggaacagtcaatccgggagcagattctgctgaagggccacgtcacccaactcaaagaatctttgaaggaggtgcagttggaaagggaccagtatgccgaacaaatcaagggggaaagagcccaatggcaacagcggatgcgaaaaatgtctcaagaagtgtgtaccctgaaggaggagaagaagcacgacactcaccgcgtcgaagagctcgagcgctccctctctaggctgaaaaaccaaatggccgagcctcttcctcccgacgcccccgccgtgtcaagcgaggtggaactgcaggacctgcgtaaggagctcgagagggtcgccggcgaattacaggctcaggtagagaataatcagtgcatcagcctgctcaataggggccagaaggagcgcttgcgggagcaggaggaacggttgcaggaacagcaggagaggctgagggaacgtgaaaaaaggctgcaacagttagcagaacctcagagcgacttggaggagctgaaacacgagaataaatccgccctccagctggagcagcaagtgaaggagctgcaagaaaaactcggacaggtgatggagacgctaaccagtgcagagaaagagccagaagccgccgttcctgcgtccggcacaggtggcgagagcagcggtctgatggatttgctcgaggaaaaggcagatctccgagagcatgtggaaaaacttgaacttggctttatacagtaccgcagagagaggtgccatcagaaggtacataggctgctgaccgagccaggggactccgccaaggacgcctcgcccggaggcggacaccaccaagcggggccagggcagggcggagaagagggtgaagctgccggcgccgcaggcgacggtgttgctgcttgcggttcttacagcgagggtcatggtaagtttctggccgctgccaggaacccggctgccgagcccagtccaggtgcccccgctcctcaggaactaggggctgctgacaaacatggcgatctctgtgaagcatctctgacaaactctgtggaacctgctcagggcgaagctcgcgagggctcctcgcaggacaacccgaccgcacagccggtcctgcagcttttaggcgagatgcaggaccaccaagaacatcccggactaggatctaattgttgcgtgccttgcttttgttgggcatggctgccgcggaggcggaggtag

SEQ ID NO: 118962 - DNA, 1485 bp, synthetic construct
  misc_feature 1..1485: note = Description of Artificial Sequence: Synthetic coding sequence
  source 1..1485: mol_type = other DNA
gaaaagaaggcaaataacgagaagcagaaggcagagcgtgagttggaagggcaaatccagcgcctgaataccgaaaaaaaaaaactgaatactgatctatatcatatgaagcacagcttgaggtacttcgaggaagagagtaaagatctcgcaggtcgacttcagaggtcttcccagaggataggtgaactggagtggtccttgtgtgccgtggcggctactcagaagaaaaagcctgacggcttttcaagccgctccaaggctctgctcaaaagacaacttgaacagtccattcgggagcagattcttctgaaaggccatgtgacacagttgaaggaaagtctgaaagaagtgcagctcgagcgtgaccagtacgcagaacagattaaaggagagagggctcaatggcaacagcgaatgcgcaagatgagccaagaagtttgcactttgaaagaggagaagaagcacgatacccaccgagtcgaagagctagagagaagcttgtcccgcctcaaaaatcagatggctgagccactgccccctgatgcccctgccgtgtcctcagaagtagagctacaagatctaaggaaagagctcgagcgtgtggctggcgagctgcaggcccaagtcgagaataaccaatgtatcagtttgttaaaccggggccagaaggagagactgcgggagcaggaagagaggctacaggaacagcaggaaaggctcagagagcgagagaagcgattacagcagcttgcagagccacagagcgaccttgaggagcttcacgagaataaaagcgctctgcaactggaacaacaggtgaaagaactacaagaaaaactcgggcaggttatggagactctgacaagcgccgagaaggaaccagaagctgccgtcccagcctccggcaccggcggggaaagcagcggcctgatggatctgctggaagagaaagcggatttgcgagagcatgtggaaaagctcgaactgggctttattcagtatcggcgtgaacgctgccaccagaaggtccacaggctgctgaccgagcctggagactcagcgaaggatgcctccccaggcgggggccatcaccaggctggtcccggccagggcggcgaagaaggggaagccgcaggcgctgccggagatggcgtggctgcttgtggctcatactcggagggacacggaaaatttttggccgccgccagaaatcccgctgccgagccctctcctggagcacctgcacctcaggaacttggcgccgctgataagcatggagatctgtgtgaagcttccctaaccaattccgtcgagcctgctcagggagaggcacgcgaagggtcaagtcaggataacccaaccgcccagcctgttctccagctgctcggggaaatgcaagatcaccaggagcaccctgggctgggcagcaattgctgtgtgccgtgtttctgctgggcttggctgcctcgacgacgccgctag

SEQ ID NO: 118963 - DNA, 1812 bp, synthetic construct
  misc_feature 1..1812: note = Description of Artificial Sequence: Synthetic coding sequence
  source 1..1812: mol_type = other DNA
atggccgaagaaactggccaaagtaaacttgctgccgccaagaaaaagtttaaggaatattggcagcgaaataggcctggagtccctgctgctgcaaagcgaaacacgaaagctaacggctcttcacctgagactgcagcatctggaggctgtcattcaagcgaagcatcttcctcagcctcgagctctctgcacgccaggcagtccccctgtcaagaacaggcagcagtgctgaactcccggagcataaagatcagtcgcttaaacgacaccattaaatcgctgaagcagcagaagaaacaggtggaacaccagcttgaggaagagaagaaggccaataacgagaagcaaaaagccgagcgggagcttgaaggacagattcagaggttaaacaccgaaaaaaagaagctcaacaccgatctctatcacatgaaacacagcctccggtacttcgaagaagagtcgaaggacctcgccggtagactgcagcggtcctctcagaggatcggggaactggaatggtccttgtgtgccgtggccgccactcagaagaagaagcctgacggatttagttccagaagcaaggcactcctgaagagacagctcgaacagagcatcagagagcagatactgctcaaagggcatgtcacccagctgaaggagtccctcaaggaagtccagctggagagagatcagtacgccgagcagataaagggagagagggcgcaatggcagcagcggatgcgtaagatgtcccaggaggtctgcacgctgaaggaagagaaaaagcacgatactcatagggtcgaggagttggaacgtagcctgtcacggctcaagaaccaaatggccgagccgctcccccccgacgcacccgccgtttcctctgaagttgagcttcaggatctacggaaggaattggagcgggttgccggggagctgcaggctcaagttgaaaacaatcagtgcatcagtctactgaatcggggccagaaggagcgactccgagagcaagaagaaaggctacaggaacagcaggagcgccttagggaacgggagaagcgactccaacagctggccgagcctcaatcagaccttgaggagctgaagcatgagaataaaagcgctctacagctggagcagcaggtgaaggagctccaagaaaagttaggccaggtgatggagacactgaccagtgcagagaaggaacccgaggccgccgtccctgccagcggcaccgggggcgagtcctccggcctgatggacctgctggaggaaaaggcagaccttcgtgagcacgtggaaaaactggagttgggatttattcagtatcgcagggagcggtgtcaccagaaggtgcaccgcctgctgactgagcccggagattccgctaaagacgccagtccgggaggcggacatcatcaggctgggccaggccaggggggcgaggaaggcgaggcagctggtgcggcaggagatggcgtggcagcatgcggatcatatagcgagggccacggtaagttcttggcagctgcacgtaatcctgctgccgagccatctccaggagcccccgccccacaggaacttggcgctgctgacaaacatggcgacctgtgtgaggcctcactcactaatagcgtggaaccagcacagggggaggcacgcgaaggttcctcccaagacaaccccactgcccagccagtcttacagctgctgggcgagatgcaggatcatcaagaacacccaggcttgggaagcaattgttgcgtgccgtgcttttgctgggcgtggctgccccggaggagacggtag

SEQ ID NO: 118964 - DNA, 1902 bp, synthetic construct
  misc_feature 1..1902: note = Description of Artificial Sequence: Synthetic coding sequence
  source 1..1902: mol_type = other DNA
atgttacccgtcgatggcgaggagcggaagtccgaagggtccgatacagaaggcgataggacctcgccttgcgccggccctacatctagcgctacactgaaagatctggaagtcggcggttctggttggcgttgcagcgaccccgctggacagcccagtaatctgttgccccagagggggttgggtgcacccttgcctgctgaaacagcgcatacacagccctcacctaacgatcgcagcctttatttgtcgcccaagtccagctccgccagtagttcccttcatgctcgacagagcccatgtcaggaacaggcagcggtcctgaatagccggagcatcaaaatcagccggctcaacgacacgattaagtcgctgaagcagcaaaagaaacaggtggaacatcaactggaagaagaaaagaaggcaaataacgagaagcagaaagcagagagggaactcgaaggccagatccaacgcctcaacactgagaaaaaaaagctcaacaccgatctttatcacatgaagcactccctgaggtatttcgaggaggagagcaaagacttagcgggacgccttcaacgctctagccaacgaatcggggaactggagtggtccctgtgcgccgtggccgccacacagaagaagaaaccagatggattttcatctcgttcaaaggccctgctgaaaagacagcttgagcagtccatccgcgaacagattttactgaagggccatgttacacagctgaaagagagcttaaaggaagtgcagttggagcgagaccagtacgccgagcaaatcaaaggagagcgcgcccagtggcagcaacgtatgcgcaaaatgtcccaggaggtgtgcaccctgaaggaagagaaaaagcatgacacccatagggtggaggaactggagagaagcttaagccggctcaagaaccagatggctgagccattacctccggacgcaccggcagtttccagcgaagtggaactgcaggacctgcggaaagagctggagagggtcgcaggggagctgcaggctcaggtcgaaaataatcaatgcataagtctgctgaaccgcggtcagaaagaacgcctacgggaacaggaagagagacttcaggagcagcaggagcgactccgcgaaagggaaaagcggcttcagcagctggccgaacctcagagcgatttagaggagctcaagcacgagaataagtcggcactgcagcttgagcagcaggtgaaagaattacaagagaagttgggccaagtaatggaaactctgacatcggcagagaaggagccagaggcagcagtgcctgcatctggcacgggtggcgagtcctctgggctcatggatttactcgaagagaaggctgatcttagggaacatgtcgagaagctggaactgggtttcatccagtacagaagggaacggtgccaccagaaggtccaccggctgctaacggaacccggcgacagcgccaaggacgcctccccgggcggcggccatcatcaagccgggccaggtcaaggtggggaggagggagaggctgccggggccgccggggacggagttgctgcttgtgggtcttactcagaaggtcacggtaagtttctcgcagccgctaggaacccagctgctgagccctctccgggagcccctgctccacaggagctcggagctgccgacaagcacggagatctttgcgaggcctctctcactaacagcgttgaaccagcgcagggcgaagcacgcgagggcagtagccaggataatccaactgctcagcctgtgctacagctgctgggggaaatgcaggatcaccaggaacatccaggattgggcagtaactgctgcgtgccttgtttttgctgggcttggttgcctaggcgccggcgctag

SEQ ID NO: 118965 - DNA, 9780 bp, synthetic construct
  misc_feature 1..9780: note = Description of Artificial Sequence: Synthetic coding sequence
  source 1..9780: mol_type = other DNA
atgctttctcggctaagtggcttggccaacgtggtcctccatgaactgagtggcgatgacgataccgatcagaacatgagagctccgctggatcctgaacttcaccaagagtcagatatggaattcaataataccacgcaggaggatgtccaggaacggctagcctacgcggagcaactggtggtcgaattgaaggatattattcggcagaaagacgtccagctgcagcagaaagatgaagccttacaggaagagcgaaaggcagccgacaataagatcaaaaaactcaagctgcatgccaaagcaaaattgacaagcttaaataagtatatagaagagatgaaggcacaaggtggtacagtcctcccgacagagccccagagtgaagaacagttgtcaaaacatgataaatcctctaccgaagaagaaatggagattgagaaaattaaacataagctgcaggaaaaggaagagttgatatcaactctacaggctcagctgacacaagcacaggcagagcagcctgctcagagtagtactgaaatggaagagtttgtcatgatgaagcagcagctgcaggagaaggaggaattcatctctacactccaggcgcagctatctcagacacaggctgaacaggccgctcagcaggttgtcagggaaaaggatgcgaggtttgagacacaggttaggctgcacgaggatgaactcctccagctagttacccaggctgacgtagagactgaaatgcagcaaaagctgagggtgctgcaacggaaattagaagagcacgaagaatccctcgtgggcagagcccaggtagtggatttactccaacaagagttaactgctgccgaacagaggaatcagatcctgagccagcaactgcagcagatggaggcggaacacaatacgctgcgtaacaccgtggagacagaacgcgaagaatctaaaatcctccttgagaagatggagctggaggtcgctgaacgcaaactgtcattccataatctgcaggaggaaatgcatcatctgctcgaacagttcgaacaggctggacaagcacaggctgagctggagtctcgatactcagctctggaacagaagcacaaagcggagatggaagagaaaacctcacacattctttctctgcagaagacaggacaagaactgcagtcagcctgtgacgcccttaaagatcagaattcgaaactactccaagacaaaaacgaacaggccgttcagtctgcgcaaactatccaacaacttgaggaccaactgcagcaaaagagcaaggagatctcccagttccttaaccgactccctctgcaacagcacgagaccgcctcacagacctcattcccagacgtgtataacgagggaacccaggctgtcactgaggagaacattgcttccttgcagaagcgggtcgtagaactggaaaatgaaaagggtgccctcttattgtctagcatcgagttggaagagctaaaggctgagaatgagaagctgtcctcacagatcaccctgctcgaggcccagaaccgcactggtgaggcggatagggaagtaagcgaaatcagcatagtagacatcgccaacaagcgcagctcctcagcggaagaatcaggtcaagatgtcttggaaaatacctttagccaaaaacacaaggagttgagcgtgctgctgctggagatgaaggaggcccaagaagagattgcatttctgaaactacagttgcaaggcaagagggcagaggaggctgaccacgaagtcttggatcagaaggaaatgaagcagatggaaggggaggggattgcccccataaagatgaaagtctttctcgaggacacagggcaggattttcccttgatgccaaacgaggaatcaagcctgcccgcagtcgagaaggagcaggccagcacagaacaccaatcacgcactagtgaggaaatctccctgaatgacgccggcgtggagctaaagagcaccaagcaggacggcgataagtcactttcagctgtgccagacatcggacagtgtcatcaggacgaactggagcggctcaagagtcaaatcctagaactggagttgaactttcataaagcacaggagatttacgagaagaaccttgacgaaaaagccaaggagataagtaatctcaaccagctcatagaagagttcaagaagaatgccgataataacagttctgcattcacagccctctccgaggaacgtgaccagctactgtcacaggtgaaagagctctctatggtgacagagctacgggcacaggtcaagcaacttgaaatgaatctcgcagaagcggaaagacagcgccggttggattatgaatcacaaaccgctcacgacaacctgttgaccgaacagattcacagtttaagtatcgaagccaaaagtaaagacgttaaaattgaggtgctgcagaatgagctggacgatgtccagctccagttctctgaacagagtactttgattcgatccctccagagtcagctacagaataaggaatccgaggtcctcgagggggccgagcgcgtgagacacatctcatcaaaggtggaagaattatcacaagccctgtctcaaaaagagctggagattaccaagatggatcagcttctgctcgagaaaaagcgggacgtagaaacactgcaacagacgatcgaagagaaggaccaacaagttaccgagatcagttttagcatgacggagaaaatggtgcagctgaatgaagaaaagtttagcctcggggtggagatcaaaaccctgaaggaacagctgaatctgttatctagggcagaggaagccaagaaagagcaggttgaggaggataacgaggtcagcagcggactgaaacaaaactatgatgaaatgtctccagccggccagatcagcaaagaagagctccagcacgagttcgaccttctgaaaaaggaaaatgagcagaggaagcgcaagctgcaggcggctctcattaacagaaaggagcttctccagcgcgtgtctcgcctcgaggaagaactcgctaatcttaaagacgaatctaagaaggagatcccactgtctgaaacagagcggggagaagtcgaggaggataaggagaacaaggaatattccgagaagtgcgtcacctccaagtgccaggagattgaaatatacctcaaacagactataagcgaaaaggaggtggagctgcagcatataaggaaggatctagaggagaagctggcagcagaagagcagtttcaggccctggtgaagcaaatgaatcagacgctccaggataagacgaaccaaatagacctgcttcaggcagaaatctcagaaaaccaggcaataattcaaaaactcataacatcaaacaccgacgcaagcgacggcgactccgtcgccttggtgaaagagacagttgtaattagccctccctgtacaggatcttccgagcactggaagcctgagctggaggagaaaatcctggctctggagaaggagaaggaacagttacagaaaaagctgcaggaagctttgacatcccggaaggcgatccttaaaaaggcacaggagaaagaacggcatttgagggaggagctaaagcagcagaaggacgattataaccgcctacaggagcagttcgatgaacagtcaaaggaaaatgagaatatcggcgatcagttaaggcaactccaaatccaggtgagagagagcatcgatggaaaactgcccagcaccgatcagcaggaatcttgctcatcaacccccgggctcgaagaacctctgtttaaagccaccgaacagcatcacacccagcctgtgttagagtctaatttgtgcccggactggccttcccactcagaggacgcatcagcactgcaaggggggacatctgtggcccagattaaagcccagttgaaggaaatcgaggcggagaaagttgagctggaactcaaggtctcctccacgacctcagagctcaccaagaagagcgaagaggtgttccagctccaagagcagattaataaacaaggactggagatcgaatcgctgaaaacggtgagtcacgaagccgaggtccatgccgagtcacttcagcagaagcttgaatctagccaactgcagatcgctggccttgagcacctcagggaactgcaacccaaactagacgaactccaaaagctcatcagtaagaaagaagaagatgtcagttacctgagcggccagctatcagagaaagaagctgcgttgactaaaattcagacggagattatcgagcaggaagacctgatcaaggcactgcatacacagctggaaatgcaagccaaggaacatgacgagaggatcaagcagcttcaggtggaattatgtgagatgaagcagaaacccgaggagatcggcgaagagtctcgcgcaaaacaacagatccaaaggaagctgcaggcggccctgatctcacggaaggaggctctgaaggagaacaagtctctgcaggaggaattgagcctggcgcgaggaacgattgagcgcctcacaaaaagtctggcagacgttgagagccaggtctctgcccagaataaggagaaagataccgtgctgggccgcctcgcattgctacaagaggaacgagacaagctcattaccgagatggatcggtccttgttggagaatcaatccctgtcttccagctgtgagagcttaaaactggcgttggaaggtctgaccgaggataaggagaaactggttaaggagattgaatcactgaagtcttcgaagatagccgaaagtacagaatggcaggaaaagcataaagagttgcagaaagagtacgagatcctcttgcaaagctacgagaacgtaagcaacgaggccgagcggattcagcatgtggtggaagccgttcgtcaagaaaaacaggaactgtacggaaagctccgcagtaccgaggcaaataagaaagagactgagaaacagctgcaggaagccgaacaggagatggaggagatgaaagaaaagatgaggaaattcgccaagtctaaacagcaaaagatcctcgagctggaagaggaaaatgaccggctgagagccgaggttcaccctgctggcgatactgcaaaggagtgcatggagactctgcttagcagcaacgctagcatgaaggaagagttggaacgggtgaagatggagtacgagacccttagcaagaagttccagagcctcatgtctgagaaagactccctgagcgaagaggtccaagacttaaagcaccagatcgaggggaacgtaagtaagcaggcgaatttagaggccacagaaaagcacgacaatcagacgaacgtaaccgaagagggcacccagagtatcccgggagagactgaagagcaagacagcttatctatgagcacacgccccacctgtagcgagagcgtgccctctgctaagagtgctaatcctgccgtttccaaagattttagtagccacgatgaaattaataattacctccagcaaatcgatcagctcaaagagaggatcgcaggtctggaggaagagaaacagaaaaacaaggaattctcccaaaccctggaaaacgagaagaataccctgctgagtcagatttccactaaggatggtgaactcaaaatgctccaggaggaagtgactaaaatgaacttactcaaccagcagatccaggaggaactttctcgggtcacaaaactgaaggaaaccgctgaggaggagaaagacgatctggaggaacgattgatgaaccagttagcagagctcaatggaagcatcggtaactattgtcaagatgtgaccgatgcccagattaagaatgagctattggagagcgaaatgaagaacctaaaaaagtgcgtcagcgagttagaggaggaaaagcagcagctggtgaaagaaaaaacaaaggtcgaaagcgaaattcggaaggaatacctggaaaaaatccagggggcccagaaggagcctgggaataaatctcatgctaaggagctgcaagaacttctgaaggagaagcagcaggaggtcaagcagctgcagaaagactgcattagatatcaagagaagatcagtgcactcgagcgcacagtgaaagccctggaattcgtgcagacggagtcacagaaagatttagagatcactaaagagaacttggcacaggcagtggagcacaggaaaaaagcccaggcggagttggcgagttttaaggtgctcctggacgacacccaaagtgaagccgcccgtgtgctcgctgataaccttaagctcaagaaagagctgcaaagcaataaggaatccgtgaagtcccaaatgaagcagaaagatgaggacttagaacgaaggttagagcaggccgaggagaagcatttgaaagagaagaaaaacatgcaggaaaagctggacgcgctcaggagggagaaagtccatctggaagagaccatcggcgaaattcaagttactctcaacaagaaagataaagaggtgcaacagttgcaggagaatctggattcgacagtcacccagctggctgccttcaccaaatccatgagttcccttcaggatgaccgagacagggtgatcgacgaggctaaaaagtgggaaaggaagttcagtgatgccattcagtccaaagaagaggagattcgcctgaaggaagataattgctccgtgcttaaagaccaactgcggcagatgtcaatacatatggaagaactcaaaataaatatctctcgcttggagcacgacaaacagatctgggagagcaaagcacagacagaggttcagctccagcagaaagtttgcgacacattgcagggagagaacaaagaactcctgtctcaactcgaggaaactcggcacctttatcattcctcccagaatgaactggctaagctggaaagcgagctcaagtcattgaaagaccaactgacagacctgtctaattccctcgagaaatgcaaggagcagaaggggaatcttgaaggcatcataaggcagcaggaggccgacatccagaactctaagttttcctatgagcagctcgagaccgatcttcaggcatctagggaacttacatcccgtctgcacgaggagatcaacatgaaagagcaaaagattattagcctcttgtcgggaaaggaggaggcaatccaggtcgcaattgctgaactgagacaacagcacgacaaggagatcaaagagctggaaaacttactatcccaggaagaggaggaaaatattgtgctggaggaggaaaacaagaaggcagttgataaaactaaccagctgatggaaacattaaagacaatcaagaaggaaaacatccagcagaaagcccagctggatagtttcgtgaaatctatgtctagcctgcagaatgacagggataggattgtgggagactaccaacagttggaggagcggcatctgtccatcatcctcgaaaaggatcagctcatacaggaggccgctgcagagaacaacaaactgaaggaggagattagaggtctccgatcacacatggatgatcttaacagcgaaaatgctaagctcgacgccgaactgattcagtatcgagaggacctcaaccaggtgatcacgattaaggattcccagcaaaagcagctgttggaggtgcaactccaacaaaataaagaacttgaaaacaagtacgccaagctcgaagaaaagttgaaggagtcagaagaagcgaatgaagacctacgtagaagcttcaacgctctgcaggaggagaagcaggacttatccaaggagatcgagtctctgaaagtttctatttcgcagctcacccggcaggtgacagcgctccaggaagaaggcactctcggcctatatcacgcacagctcaaggtgaaagaagaagaggtacatcgtttatcggccttgtttagctcctcccagaagagaattgccgaactggaagaggaactggtatgcgtacagaaagaggcagccaagaaggtgggcgagatcgaagataaattgaagaaggagctgaaacacctccatcacgacgcaggcattatgagaaacgaaactgagacagctgaggaaagggtagctgaactggctcgagacttggtggagatggagcagaagctacttatggtgactaaggagaacaaggggctgaccgcgcagattcagagttttggtcgtagcatgtcttccttacagaattcacgggaccacgccaatgaggaactggatgagctcaagcgtaagtacgatgcatctctgaaagagctcgcgcaactgaaggaacaggggcttctgaacagagagagggacgcgctgctgtctgagaccgcattctccatgaactctaccgaagaaaactcactcagtcatctggaaaagctgaaccagcaactgctgtccaaagacgaacagcttctgcatctctcttcacagctcgaggactcttataaccaggtccagtccttttccaaggccatggcttccctacagaatgagcgcgaccatttatggaatgaactggagaagttccgtaaatccgaagagggaaaacagagatccgccgctcagcctagcacatctccagccgaggtacaaagcctgaagaaggctatgagtagcctgcagaacgaccgagatcgactattgaaggagcttaagaaccttcaacaacagtacctgcagattaatcaagagatcaccgaattacaccctctgaaggcacagctccaggagtatcaggacaaaaccaaggcattccaaattatgcaggaggaattgcgccaggaaaacttatcctggcaacacgaactgcaccagctacgaatggagaaatcctcctgggaaatccatgagaggagaatgaaagaacagtacttgatggctatcagtgacaaggaccaacagttaagtcacctccagaatctgattagagagctgcgaagttcgtcgagtcaaactcagccactgaaggtgcagtaccaacgtcaagcctctcccgagacatcagcgtcaccagatggtagccagaacttggtgtatgagacagagctgctaagaacacaattaaatgacagcctgaaagaaattcatcagaaagaactacgcatccagcagctgaacagcaatttctcacaactgctcgaagaaaagaatacactctctattcagctgtgtgacaccagccaaagtctccgtgagaatcagcagcattacggcgacctgctgaatcactgcgccgtactcgaaaagcaagtgcaggaactccaggccggacccctgaatatagacgtggctcctggtgctccccaggagaaaaacggcgtgcaccggaagtccgatcccgaagaattgagggaacctcagcagtcattctcagaagcccaacagcagttgtgtaatacaaggcaggaagtcaatgaactgagaaaactgctagaggaagaacgagatcagcgcgtggctgctgagaacgccctgtctgtggcagaggagcagatccgacgcttagagcatagcgagtgggacagctctcgcactcctattatcggttcttgtggcactcaagaacaagccctgctcattgatttgaccagcaattcttgtcgacgcactcgttccggcgtcgggtggaaacgcgtgttaagatccctatgccattccagaacccgtgtcccattgttggcagccatctacttcctcatgattcacgtgctgctcattctgtgcttcacaggacacctctag

SEQ ID NO: 118966 - DNA, 2919 bp, synthetic construct
  misc_feature 1..2919: note = Description of Artificial Sequence: Synthetic coding sequence
  source 1..2919: mol_type = other DNA
atgaaagcccaaggcggtacggtgttgccaactgagcctcagagcgaagagcagctttcgaaacatgacaaatcgtctaccgaggaagagatggaaatcgagaaaatcaaacataagctgcaggagaaggaggagctcattagcacgctgcaagcgcagctgacgcaagcacaggccgaacagcctgcccagaaactgcgcgttctccaaagaaagttggaagagcacgaggaaagcctggtcggacgcgcccaggtggtggatcttctgcagcaggaactcacggctgccgagcagcgaaaccagatcctgtcccagcaactgcagcagatggaagcagagcataatactctgcgcaacacggtagagaccgaaagggaagagtctaagatcctgctggagaagatggagctagaggtggcggaacggaaactgtccttccataatcttcaggaggagatgcaccacctgcttgagcagttcgaacaggctgggcaggctcaggcagagttggagtcacggtattccgccctggaacagaagcacaaggctgaaatggaggagaagacctcccacatcctgtctctgcagaagacaggacaagaacttcagtccgcttgcgacgctctgaaggaccagaatagtaagctactccaagacaagaatgagcaggctgtccagtccgcacagaccattcagcaactcgaggaccagctacagcagaaatccaaggagatctcccagttcctgaacaggctgcccctgcagcagcatgagaccgcttcccaaacaagttttcccgatgtatataatgagggcacgcaggccgtcactgaagaaaatatcgccagccttcaaaaacgggtggttgaactggaaaacgagaagggtgcactgctcctttcctccattgagctggaggagctcaaggccgaaaatgagaagctgtcctctcaaataacactgctagaagcccagaatcgtaccggcgaagcggaccgggaagtgagcgagatcagcattgttgacattgcaaacaaacggagttctagtgctgaggaaagtggtcaggacgtactagaaaacactttttcccagaagcataaagaactcagtgttttgctgctggagatgaaagaagcacaggaggagattgccttcctgaaacttcagctgcaaggcaagcgcgccgaagaggccgatcatgaagtgttagaccagaaagaaatgaagcaaatggagggcgaggggattgcccccataaaaatgaaggtgtttctggaggacaccggacaggattttccccttatgcccaacgaggaatcctcgctgcctgcggtcgagaaagaacaggcatcgactgaacaccagtctaggaccagcgaagagatttcgctgaacgatgccggggtggaactgaaaagtaccaagcaggatggagataaatcactatccgctgttcccgatattggacagtgtcatcaagacgagctcgagagattgaagtctcagatcctggagctcgagctgaacttccataaagctcaggaaatctatgaaaagaatttggacgaaaaagccaaagaaataagtaatctgaatcagttgatcgaagaattcaaaaagaacgctgacaacaatagttccgctttcaccgccttatcagaagagcgggaccagctgctgagtcaggtgaaagaactcagtatggtcactgagctccgggctcaagtaaaacaattggagatgaatcttgcagaggctgaacgacagcgtcgcttggactacgagtcacaaaccgcacacgataatctattgaccgagcagattcactctcttagcattgaagccaagtctaaggacgtgaaaattgaagtcctgcaaaacgaactggacgacgtccaattacagttctccgagcagagcactctgatcaggagtctccaaagtcagctccagaacaaggaatccgaagtgctagagggggctgaacgagttcggcatatctctagtaaggtcgaggaactgagtcaggcacttagccaaaaggaacttgaaatcactaagatggatcagctgctcttagagaagaaaagggatgtggagacactgcagcagacgatcgaagaaaaggatcagcaggtaacggaaatttccttctctatgactgagaagatggttcagctgaacgaagagaagtttagcctcggcgttgagattaagacactgaaagaacagctgaacctactgagccgggccgaggaggctaaaaaagagcaggtcgaggaagataatgaggtaagctcagggctcaagcagaactacgatgaaatgagccctgccggtcagatttccaaagaggagctacagcatgagtttgatctgttaaaaaaggaaaacgagcagagaaaacgcaagctgcaggcagccttgattaatcgcaaggaactcctgcagagggtctcgagattggaagaggagctagctaaccttaaagacgaaagtaagaaagagattccccttagcgaaacggaacgcggtgaagtggaggaggataaggagaacaaggagtactccgagaagtgtgtaaccagcaaatgccaggagattgaaatctaccttaagcaaaccatctccgagaaagaggtggaattgcagcacatacgcaaagatttggaggaaaagctggccgcagaggagcagttccaggcactcgtcaaacagatgaatcagaccctccaggataaaacaaatcagattgacctcctccaggccgagatatctgagaatcaagctataattcagaaactcatcacctcaaacacggatgcaagcgatggtgactctgtggctctggttaaggagacagttgtgatttcgcccccatgtacaggctcctctgagcactggaagccatag

SEQ ID NO: 118967 - DNA, 126 bp, synthetic construct
  misc_feature 1..126: note = Description of Artificial Sequence: Synthetic coding sequence
  source 1..126: mol_type = other DNA
atgcttagtcgcctgagcggcctggcgaatgtagtcctgcatgaacttagcggggacgacgacacagatcagaacatgcgcgccccactcgatccggaactccatcaggagtcagatatggagtag

SEQ ID NO: 118968 - DNA, 4923 bp, synthetic construct
  misc_feature 1..4923: note = Description of Artificial Sequence: Synthetic coding sequence
  source 1..4923: mol_type = other DNA
atgctctcaaggctcagcgggcttgccaatgtggtgctacatgagctgagcggggacgatgacacagaccagaatatgcgagctcctttggaccctgaactacatcaggaatctgatatggagtttaataatactacccaagaggacgttcaagagaggctggcttatgctgagcagttagtggtcgagctcaaagacattattcggcagaaagatgtccagctccagcagaaggatgaggcactgcaggaagagcggaaagcagcggataataaaatcaaaaaattaaaactccacgcaaaagccaaactgacctccttgaacaaatacatcgaagaaatgaaggcacagggcgggaccgtactgccaacagaaccacagtccgaagaacagctgtcaaagcacgataagtccagcactgaggaagaaatggagattgaaaaaataaaacacaagttacaagaaaaggaagaattaattagcacactgcaggctcagctgacacaggctcaggccgagcagcccgctcaatcttctactgagatggaggaattcgttatgatgaagcagcagctacaggagaaggaagagttcatctctacactgcaggcacagcttagtcagacccaagcagaacaggccgctcagaaactgagagtgctgcagagaaagttggaggaacatgaagaaagtctcgtaggcagggcacaggtggtcgatctcctgcagcaggagctgactgcggccgagcaaaggaaccagattctgtcccaacaactccagcaaatggaggcagaacataacactctgaggaacaccgtggagactgaacgcgaggaaagtaagatactgctggaaaaaatggagctcgaggtggccgaaagaaaattgagctttcataacctacaggaggaaatgcaccacctgttggaacaattcgagcaagctggccaagcccaggcagagctggagtcccggtatagtgcacttgagcagaaacacaaggccgagatggaagagaagacctcacatatcctgtccctgcagaaaactggacaggaactgcaaagcgcttgtgacgccctgaaagaccagaattcaaagctgctgcaagacaagaacgagcaggccgtgcagagcgcacaaactatacagcagcttgaagaccagctgcaacagaagtctaaggaaatttcacaattcctgaataggctgcccctccaacagcacgagaccgcttctcaaacatccttcccagatgtgtataatgagggcactcaggctgttactgaggaaaacatcgcaagcctgcaaaaacgcgtagtggagctggaaaatgaaaagggtgccttgttgctcagcagcatcgaacttgaagagctcaaagcagaaaatgagaagctctcctctcagattaccctgcttgaggcccagaaccggaccggggaagcggaccgagaggtgtccgaaatctccattgttgatatcgccaacaaaagatcttcgagcgctgaggagagtggccaagatgtactcgaaaacaccttcagtcaaaaacataaggaacttagcgttttgctcctggaaatgaaggaagcacaggaggagatcgcttttttgaagctgcaactacagggaaagagagccgaagaggctgatcacgaagtgctggaccagaaggagatgaagcagatggagggcgagggaatcgctccaattaaaatgaaggtcttcctggaggacaccggccaggactttcccctgatgccaaacgaggaatcgtcactgcctgcagtggagaaggaacaagcctcaactgaacatcaaagtcgcacaagtgaggagatttccctgaatgatgccggtgtggaactgaaatccactaaacaagatggcgacaagtctcttagcgcagtgcctgacatcggacagtgccaccaggacgagctagaaagactcaagtctcagattctggagttggagctgaattttcacaaggcacaggagatatacgagaagaacctagacgagaaggccaaagagatctccaacctaaatcagctcattgaggaatttaaaaagaacgctgataataactccagcgcctttactgccctgtcagaagagagggaccagctgctctcacaggtgaaggagctgagcatggtaactgagctgagggcccaggtcaagcagttggagatgaatcttgcagaggctgaacgtcaaagaaggctggattacgaatctcagacagcccatgataatttgctgactgagcagatccacagtctctctatcgaagctaaatccaaagacgttaaaatcgaagtgctccagaatgagcttgatgacgtccagctgcagttttcggagcagtctaccctgatacggtctcttcagagccaactccagaacaaagaatcagaggtgctggagggtgcggagagagttcgacacatcagtagcaaggtcgaggagctgagccaggccttgtcgcagaaggaactggaaatcacgaagatggatcagctactcctcgagaaaaaaagagacgtggagacgttgcagcagactattgaggagaaggaccagcaagtcacagaaatatcgttctctatgacagagaagatggtacagctgaacgaggaaaaattttccctgggcgtcgagatcaaaactctgaaagaacagctgaatctcctgtcacgggctgaagaggcaaagaaagagcaggttgaagaagataacgaagttagtagcgggctcaaacagaactacgacgagatgtccccagccggacagatcagtaaagaggagctgcaacatgaatttgacctgctaaaaaaagagaacgagcaacggaaacgcaagcttcaggccgccctgattaaccgaaaggagctgctgcagcgcgtcagtaggctggaggaggagctcgcaaaccttaaggacgaatcaaaaaaggagattcccttaagcgagactgagcgaggagaagtcgaagaagacaaggagaataaggaatattctgagaagtgtgtaacctcaaagtgccaggaaattgagatctacctgaagcagaccatctccgaaaaagaagtagaacttcagcacatacgaaaagacctggaggagaaactcgctgccgaggaacaatttcaggcactagtcaagcagatgaaccagacattgcaggacaaaacaaatcagatagatctgcttcaggctgaaatcagcgagaaccaggctatcattcaaaaattgatcactagcaatactgatgcatctgatggagattccgtggcacttgtgaaagagacggtagtgatttccccgccttgtactgggtcttctgaacactggaagcccgaacttgaagagaagatactcgccctcgaaaaagagaaggagcaattgcagaagaaactccaagaggccttgactagccgaaaagccatccttaaaaaagcccaggagaaggaacgtcatttaagagaagagttgaaacagcaaaaagatgactacaacagactgcaggagcagtttgacgagcagagcaaagagaacgagaatatcggagaccagctgaggcagcttcagattcaagtgcgtgagtcgatcgatggtaaactgccctccacagaccagcaggaatcctgttctagcactccagggctcgaggagccgttgtttaaagcgaccgaacagcaccatacacagccagtgctggagtccaatttatgtcccgactggccttctcattcagaagacgcctcagctctgcaaggcggcacatctgtggcacagattaaggcccagttaaaagagatagaagcggagaaggtggaactcgagcttaaggtgtcctctactaccagcgagttaactaaaaaatcggaggaggtttttcaactccaggaacagataaataagcagggcctggagatcgaaagtctgaaaacggtgtcccatgaggccgaggtccacgcagagtctctgcagcaaaagttagaatcatcacagctgcagatcgcggggctcgaacaccttagagaactgcagcccaagctggacgaattgcagaaactaatttctaagaaagaggaggatgtctcatacctctctggccagttgtcagagaaggaagcagcactcaccaagattcagaccgagattatagagcaggaagacctgatcaaggctctgcatacacagctggagatgcaagcaaaagagcacgacgagagaatcaagcaactgcaggtcgaactgtgcgagatgaaacagaaacccgaggaaattggagaggaaagtagggcgaaacaacagattcagagaaagctccaagccgcactgatctcgaggaaagaggcacttaaggagaataagagtctacaagaagaactgtctctcgctcggggcacgattgaaagactgacgaagtctttggccgacgtcgaaagtcaagtgagtgcccagaacaaggaaaaagatactgtgcttgggagattggcactgcttcaggaagaaagggacaagctgatcacagagatggatcggagccttctcgagaaccagtctttatcatcttcatgtgagtcactgaaacttgcactggaaggcctgacagaggacaaagaaaagctggtgaaggagattgaaagtctcaagtcctctaaaattgccgaatctactgaatggcaggagaagcataaagaactccaaaaggaatatgagattctcctgcagtcttacgagaacgtctcaaatgaggccgaacgtattcagcacgtagttgaggccgtgaggcaggaaaagcaggaactctacgggaaactgaggagcactgaggccaataaaaaggaaacagagaaacagttacaggaggccgaacaggagatggaagagatgaaggaatag

SEQ ID NO: 118969 - DNA, 9810 bp, synthetic construct
  misc_feature 1..9810: note = Description of Artificial Sequence: Synthetic coding sequence
  source 1..9810: mol_type = other DNA
atgcttagtaggttgtccgggctcgccaacgtggtcttgcatgagctaagcggcgatgacgacaccgatcagaacatgagagccccactggatccggaactgcatcaggagagtgacatggaattcaataacacaacccaggaagacgtacaggaaaggctggcttatgcagagcagttggtggtggaactcaaggacatcattcgacagaaggacgtacagctgcaacaaaaggatgaagccttgcaagaggaacggaaagctgcggataataaaatcaagaaacttaagcttcacgctaaagccaagctgaccagtctgaataagtatatagaggaaatgaaggcacagggcggaaccgtgttgcccacagagccccaatccgaagagcaactctctaaacacgataaatcttctactgaagaagaaatggaaatagaaaaaattaagcataaacttcaagaaaaggaggaactgatctctacccttcaggcgcagctcactcaggctcaggcagagcagcctgctcagagtagtaccgagatggaagaatttgtgatgatgaagcagcagcttcaggagaaagaggaattcatcagcactctccaggcacagttgagccagacacaggcagaacaggctgcacagttgtcgtcaatgcagcaagtcgtcagggagaaggacgcacggtttgagactcaggtcaggctgcacgaagatgagcttcttcagctggtaacacaagccgacgtagaaaccgaaatgcagcagaagcttagagttctgcagcgcaaactggaagagcatgaagaaagtttagttggcagggctcaggtagtggatttgctccaacaggaactgactgctgccgagcagcggaaccagatccttagccagcagctgcagcagatggaagcagaacacaacaccctgcgcaataccgtggagaccgagcgggaggaatcaaaaatactcctggaaaagatggagcttgaagttgctgagcgtaaactcagcttccataatctgcaggaggagatgcaccacttgctggaacagtttgagcaagctggacaggcgcaggcggagctggaaagccggtattcggcactggagcagaagcacaaggctgaaatggaggagaaaacctcgcacatactgtccctgcagaagacaggccaggaattacagagcgcctgtgatgctctcaaagaccaaaactcaaagctgctgcaagacaagaatgagcaggccgtccagtctgcacagaccatccagcagctcgaggaccaactgcagcagaaatccaaggagatcagccagtttctaaatcgtttgcccctgcaacagcacgagaccgctagtcagacctcctttcccgacgtatacaacgagggcacccaagctgtgaccgaagagaatatcgcaagtttgcagaaacgggttgtggagttggagaacgaaaaaggcgcactgttgctttcctctatcgagctagaggagctcaaagcggagaacgaaaagctatccagccagataacccttctggaggcacagaatcgaaccggtgaggccgacagggaggtatccgagatctcaatcgtcgacattgctaacaaacggagtagttcagccgaagagtcaggtcaggacgttttagaaaacacattcagtcaaaagcacaaggaactgtctgtgctattgctggagatgaaagaggctcaggaagagatcgcctttctaaaactacagttgcagggaaagcgcgctgaagaagccgaccacgaagtgctggaccagaaggagatgaagcaaatggaaggggagggcatcgcgccaatcaagatgaaagtattcctggaggataccggtcaggatttccctctaatgccgaacgaggagagctccctgccagctgtagagaaagaacaggcatcaacggagcaccaatccaggactagcgaggaaatctcactcaacgatgcgggtgtggagctgaagtctaccaaacaagatggggacaaatccctcagtgctgtgcctgacatcgggcagtgccaccaggacgaactggaacggttgaagagtcagatactggagttggagctgaacttccataaggctcaagaaatctacgaaaaaaatttggacgagaaggctaaggaaatcagtaatcttaatcagctcattgaggagttcaagaagaacgccgacaacaattcaagcgcgttcaccgctctgagtgaagagcgcgaccagctcctctctcaagtcaaggagctgagtatggtgactgagcttcgtgctcaggtgaagcagctggagatgaacttagctgaagccgaacggcaaagacggttggactatgagtcacagactgcccacgacaacctgctcaccgagcagattcattccttgtccatagaggcaaagagcaaggacgtcaaaattgaagtgctccaaaacgaactagacgatgtacagttgcagtttagcgagcaatcaacattaattaggagcctgcagagtcagttacaaaataaagagagtgaggttttggaaggcgcagagcgagtcaggcacatctctagtaaggttgaggaactgagccaagcattgtcgcaaaaagaattggagatcacaaagatggaccagttgctcctcgaaaagaaaagagacgtagagacgctgcagcagaccatcgaagagaaagaccagcaagtgacagagattagttttagcatgactgagaaaatggtacaactcaacgaggagaaattttccctaggggtggagattaagactctgaaggagcagctgaacttactgtctcgcgccgaggaggccaaaaaggagcaagtggaggaggataatgaggtgagttcaggtttgaagcagaattacgacgagatgtcgcccgcgggccagatttcaaaagaggaactccagcacgaatttgatctgttgaaaaaagaaaatgaacaacggaagcgcaagttgcaggctgcccttataaaccgcaaggaactgcttcaacgcgtcagcagactagaagaagaattggcaaacctcaaagatgaatcaaagaaagagattcctttaagcgagaccgagaggggcgaggtcgaggaagataaggagaataaggagtactccgagaagtgcgtgacatccaaatgccaggaaatagaaatctatttgaaacagacaatctctgagaaggaagtggaattgcagcacatccggaaggacctggaggagaaacttgcagcagaggagcagtttcaggctctggtgaagcaaatgaatcaaaccctccaggataagaccaaccagatcgacctcctccaggctgaaattagcgagaaccaggcaatcattcagaagctgattacttccaatacagatgcctctgacggcgacagcgtggcccttgtcaaggaaaccgttgtgatttcacctccctgcacgggctcgagtgagcactggaagcctgaactcgaggagaaaattttagccctcgagaaggaaaaagagcaattgcagaaaaagctgcaggaagccctgacaagccggaaggccatcctcaaaaaggcacaggagaaggaacggcacttgagagaggaattgaaacagcagaaagacgactacaacagactacaggagcagttcgacgaacagagcaaggaaaatgagaatatcggcgaccagcttagacagttacagatccaggtcagagagtccatcgatggtaagctacctagcacggatcagcaggagagttgtagctctactccaggactcgaggaacctctattcaaagcaactgagcagcatcatacacaaccagtgctggagagtaacctgtgccccgattggcccagccatagcgaggacgccagtgccctgcaagggggcacctctgtcgcccagatcaaggcacaactaaaggagattgaggcagaaaaagttgaattggaacttaaagtcagttcaacgacctctgagctgaccaaaaaatcggaagaggtgttccagctccaggaacaaataaacaagcaaggtttagaaatcgagagtctgaaaactgtatctcacgaggcagaagtgcatgcagagagccttcagcagaaactcgagagctcccaactccagattgctggtctagaacacctgagagaactgcaacctaaactcgacgagctgcagaaactgatctccaagaaggaagaagacgtatcctacctgagcggccagcttagcgaaaaagaagctgcactgacaaagattcagacagaaataattgaacaggaggatctgatcaaggccctgcacacccagctggaaatgcaggcaaaagagcatgatgaaagaatcaaacagctccaggtggaactttgcgagatgaaacagaaacctgaagagatcggtgaggaatctagggcgaagcaacaaatccaacgcaagcttcaggccgcgctgataagccgaaaagaggccctgaaagagaataagagccttcaggaagaactgtctctcgcgcgaggaacgatcgaaagattgaccaaaagccttgctgacgtcgagtctcaggtctccgcacaaaacaaggagaaggatactgttttggggcgcctcgcgctcttacaggaggagcgtgataagctaattactgagatggacagaagccttttagagaaccagagcttgtcgtcgagctgcgagtccctgaagcttgcactagagggacttacagaggacaaagagaagctcgtgaaggagatcgagtccctgaagtctagcaaaatcgcggagtccacggaatggcaagagaagcataaagagttacaaaaggagtatgaaatcttactgcagtcatatgagaacgtttctaatgaagccgaacgtatacaacacgtggtggaagcagtgcggcaggaaaaacaagaactctatgggaagcttcggagcaccgaagctaataaaaaagagaccgagaaacaactgcaggaggccgaacaagagatggaggaaatgaaagaaaaaatgcgcaaattcgcaaaatcgaagcaacagaagatactagaacttgaagaggagaacgatagactccgcgccgaagttcaccctgccggtgatacagctaaagagtgcatggagacactgctctcaagcaacgccagcatgaaggaagagctggagcgggtcaaaatggaatacgaaaccctgtccaaaaagtttcagtctctcatgagcgagaaggattccctttctgaagaggtccaggatctaaagcatcagatagagggcaacgtcagcaagcaagctaatctcgaagctacagagaaacatgacaaccagactaatgtgaccgaggaggggacacagtcaatacccggcgagactgaggagcaagacagcctctccatgtctacgcggcccacctgctccgagtctgtgccctcggctaaaagcgcaaacccggcagtaagcaaggacttcagctctcacgacgagattaacaactatctccagcaaatcgatcagcttaaagaacgaatcgccgggctggaagaggaaaagcagaaaaacaaagagtttagccagactctggagaacgaaaagaacaccctgctcagtcagatctctacgaaagacggggagcttaagatgcttcaggaagaggtgactaagatgaacctactaaaccagcagatccaggaggaattaagtagagtgactaagctcaaggagaccgctgaagaggagaaggatgacctggaggaaagactgatgaatcagcttgccgagctgaatggttcaatcggcaactactgccaggacgtgactgacgctcagatcaaaaatgagctccttgagtcagaaatgaagaacctgaagaaatgcgtgtcggagctagaggaagagaaacagcagctggtaaaggagaagacgaaagtggagagtgagatccgaaaggaatacttggagaagattcagggcgcgcaaaaggagccgggcaataagtcccacgccaaggaactccaggaacttctcaaggaaaaacaacaggaggtgaaacaactgcagaaggattgtatccggtaccaggagaagatctctgccctcgagcggaccgtgaaagccttggagttcgtccaaactgaatctcaaaaggatctggagataactaaggaaaatctggctcaggcggtggaacaccgaaagaaagcacaggctgagctggcctctttcaaagtgttgctggacgatacccagagcgaagcagccagagtgctggcagacaacttaaaactgaagaaagagctgcagagcaataaggagagtgttaagtcccagatgaagcagaaggatgaggacctcgagcggcggctagagcaggctgaagagaagcatctcaaagagaagaaaaatatgcaggagaaattggatgccctcagacgtgagaaggtccatctagaggaaacaatcggtgagatccaggtcaccctgaataagaaagacaaagaagtccagcagctgcaggaaaatcttgattcaactgtgacccagctcgcagcatttacaaaaagtatgtcctcactgcaagacgatagggaccgggtaatagacgaggcgaagaagtgggaacgcaaatttagtgacgctatccaatcaaaggaggaggagatacgactaaaggaggacaattgctcagtactgaaagatcagctgaggcaaatgagcatccatatggaggagctgaagataaatatctcgcgactggagcatgacaagcagatttgggagagtaaagcgcaaaccgaagtacagctccagcagaaagtgtgtgatacactgcagggggagaataaagagctgctgtctcaacttgaggagaccagacatttgtatcactcctcccagaacgaactagctaaacttgaaagtgagctgaaatccctaaaggatcagctcacagaccttagtaactccctggaaaagtgcaaagaacagaaaggaaacctggaaggaatcattaggcaacaagaagcagatatacagaattcgaaattttcctacgagcagctggagactgacctccaagcaagccgcgagctgacaagccggctccacgaagaaatcaatatgaaggaacagaagatcatctctttacttagcggcaaggaggaggcaattcaggtcgcaatcgctgagctgcggcagcagcacgataaagagattaaggagctagagaacctgctgtcacaagaggaggaagaaaatatcgtacttgaggaagagaacaaaaaggccgtagataagacaaatcagctcatggagactctgaaaactatcaaaaaggaaaatatccagcagaaggcccaactggattctttcgtcaagtccatgagtagcctgcagaatgaccgagaccgaatcgtgggagactaccagcagctcgaggagagacacctctcaattatcctggagaaagaccagctcattcaagaggctgccgctgaaaataacaagctgaaggaagaaattagaggtctccggtcccacatggacgatctgaatagcgagaatgccaaactggatgccgaactgattcagtatcgcgaggatctgaatcaggtaattacaatcaaggattctcaacaaaagcagttactggaggttcagcttcagcagaacaaggagctggagaataagtatgccaagctcgaggagaagcttaaggaaagcgaggaggccaacgaggacctcaggaggtctttcaacgcacttcaagaagaaaaacaggatttgagtaaggagatcgagtccctcaaagtgagcatttcgcaactcacgagacaggtgacagcccttcaggaagaaggtactctgggcttgtatcatgcccaactgaaggtgaaggaggaggaggtgcaccggctctctgctctgttttcaagttcccagaagcggattgcggagctagaggaggaattggtatgtgtgcaaaaggaggcagctaagaaagtgggcgaaatcgaggataagctcaagaaagagcttaagcacctgcaccacgacgcagggatcatgcgtaacgaaaccgagactgcagaagagcgggtggccgaactggctagagacctggttgagatggagcagaagctattaatggttaccaaggaaaacaaaggattgactgcccagatccagagctttgggcgctccatgagcagtctgcagaattcacgtgatcacgccaatgaggagcttgatgaactcaagcgaaaatatgacgccagcctgaaggaactggctcagcttaaagaacaagggttgttaaaccgggagcgggacgccctactctctgagactgccttcagtatgaacagtactgaggagaatagcctcagccaccttgagaagctcaaccagcagcttttgagcaaggacgagcagctgctgcacctgtcctctcagttagaagacagttataaccaggtccagagtttttccaaagctatggccagccttcagaatgagagggaccatctctggaatgaactggagaagtttaggaagtcagaagaggggaagcagagaagcgctgcccaaccaagcaccagccctgccgaggtacaatccctgaagaaagccatgtcaagtctccaaaacgaccgagatcggctgttaaaagagttgaaaaacctccagcagcaatacctacagattaatcaggagatcacagaacttcatcctctgaaggctcagttacaggaatatcaggataagactaaggctttccagatcatgcaagaggagttaagacaggaaaatctctcttggcagcacgaactgcatcagctgcggatggaaaagtcaagttgggagatccatgaacggcggatgaaagagcaatatctaatggcgatttctgacaaggaccaacaactatcacacctccaaaatttaataagggagctccgatcctcgagtagtcagacccagccactgaaggtgcaataccagcgacaggctagtcctgagacttcagcttcccccgacggatcccagaatctcgtgtatgagacggaactcctccgcacccaactcaacgactccctaaaggagattcaccagaaagaattacggatccaacaacttaattccaacttcagtcagctgttagaggagaaaaacacgttgtctatacagctgtgtgacaccagccagtctcttcgagagaaccaacagcactacggggatctgctgaatcattgtgctgtgttggaaaagcaggtccaggagctacaagctgtttcaaaggagaagggtccgctgaatatagacgtcgcccccggggccccccaagagaagaacggcgttcacagaaagtctgaccccgaagaactgagagaaccccagcaatcttttagtgaggctcagcagcagctttgtaacacaaggcaagaggtgaatgaattaagaaagcttctagaggaggagagagatcagagagtggccgcagagaatgccctttccgtggccgaggaacagattagacgcctggagcactcagagtgggatagcagcaggactcctatcatcggctcatgcggaacacaggagcaggccttgctcattgacttgactagcaactcctgtcgaaggaccaggagcggggtcggatggaaaagagttctcaggtctctgtgtcatagccggacgcgtgtgcctttgcttgcggcgatatactttctcatgatccacgtcctcctgatcttatgctttacgggtcacctgtag

SEQ ID NO: 118970 - DNA, 741 bp, synthetic construct
  misc_feature 1..741: note = Description of Artificial Sequence: Synthetic coding sequence
  source 1..741: mol_type = other DNA
atgtcgtgggccgcggtcctggcagttgcggccgctagattcggccacttttggggctgtcgctggcctggacctatggctcagggatgggctggattctcggaggaggaacttaggcgtctcaagcagaccaaggatccattcgagccccaacgtcgcctgccagctaaaaagtctaggcagcagctgcaaagggagaaggcactggtggagcaaagtcagaaattgggcctgcaagacggaagtacatctctgttgccagaacagcttttgtccgctcctaagcagcgggtcaatgtgcagaaacctcccttttcctctcctaccctcccttcgcacttcacactgacatctcctgttggagacggacagccacaaggaattgagtcccaaccgaaggagctgggactggaaaatagtcatgacggccacaataatgttgagattctgccacccaagccagactgcaaattggaaaaaaagaaggtggaactccaggagaagagccgctgggaagtactgcagcaagagcagagactaatggaagagaaaaacaaaagaaagaaagccctgttagctaaagcaatcgctgagcgatctaagagaacccaagccgaaacgatgaagcttaaacgaatccagaaagaactccaggcccttgacgatatggtcagtgccgatattgggatcttacgaaatcgcatcgaccaagcctcccttgattactcatatgctcgatag

SEQ ID NO: 118971 - DNA, 1185 bp, synthetic construct
  misc_feature 1..1185: note = Description of Artificial Sequence: Synthetic coding sequence
  source 1..1185: mol_type = other DNA
atgtcctgggccgcagtgctggcagtggcagccgctaggtttggccacttttggggttgtcggtggcctggacctatggctcagggctgggctgggttttctgaggaagagctccgacggctcaaacagactaaggacccatttgagccacaacgacgattgccagcaaaaaaatcacggcagcaactgcagagagaaaaggcactggttgagcaatcacaaaagctcggcctgcaagatgggagcacgtctctgctgcccgagcagctgctgagcgctccgaagcagcgcgtgaatgtgcagaagcccccattctcttccccgacgctaccatcacacttcactctaaccagcccagtgggagacggacagcctcagggtatagagtcccagcccaaggagctcggtctcgagaacagccatgacggacataacaacgtcgaaatcttacccccaaaacccgactgcaagcttgagaagaaaaaggtggaattgcaggaaaaaagtcggtgggaagtgctccagcaagaacagcgtctgatggaggagaaaaataagagaaagaaagcactactagctaaggccattgccgagcggagcaagagaacccaggctgaaacaatgaagttgaagcggatacaaaaagagctccaggccctggatgacatggtcagcgccgacatcggaatcctccggaatcgtatagatcaagcttcgctggattattcatatgcacgcaaacgattcgaccgagccgaagcagagtacattgcagcgaaactggacatccagaggaagacagaaatcaaggaacagcttaccgaacatctgtgtaccattattcaacagaacgaattgaggaaagctaagaaactggaagagctcatgcaacagttagatgttgaggcggatgaggagactctcgagctggaggtcgaggtggaacgtttactgcatgagcaagaggtggaaagtagacggcctgttgttagactggagcggccttttcaacccgctgaggaatctgtgactctggaattcgcgaaggaaaatcgcaaatgtcaggagcaagccgtgtctcctaaggttgatgaccagtgcggcaattcgtcctccattccttttttgagtcccaattgtcccaaccaggagggaaatgacatatctgcagccttggccacatag

SEQ ID NO: 118972 - DNA, 861 bp, synthetic construct
  misc_feature 1..861: note = Description of Artificial Sequence: Synthetic coding sequence
  source 1..861: mol_type = other DNA
  misc_feature 1..255: note = DNA
  misc_feature 256: note = RNA
  misc_feature 257..861: note = DNA
atgcctctggatgcaacgtggaatataactgtgcagtggctcgctgttgatatagcatgtaggaccctaatgttcctgaagctgatggctacatattccgccgccttcttgcctgtagtaattgggctagatcgacaggccgctgtcctgaatccgctgggatctcggtctggcgtacgaaaacttctgggtgccgcctggggattgagcttcttgctcgctttcccccaattgtttcttttccataccgtgcactgagccgggccagtaccatttactcagtgcgtgacaaaagggagcttcaaggcccagtggcaagaaacgacttacaacctattcacattctgctgtctatttctgcttccattgaccgccatggccatctgttactctcgtattgtcctctcagtgtccaggccccagacccggaaaggctcacacgcccccgccggggagttcgctctgcctcgatcctttgataattgtcccagggttcgattgcgcgcactgcgtctggccctgctgatccttctgacttttattctgtgctggactccatactacctgctcggtatgtggtactggttcagccctacgatgttaacagaggtgccgcccagcctatcacacatactttttctccttggcctgttgaacgccccattggacccactcttgtacggtgccttcacgctgggctgtcggagaggtcatcaggagttgtccattgacagctctaaggagggttccggcagaatgctccaagaagaaatacacgcatttcggcagctcgaagtgcaaaagacagtgacctcaagacgagccggggagaccaagggaatatccattacatccatttag

SEQ ID NO: 118973 - DNA, 879 bp, synthetic construct
  misc_feature 1..879: note = Description of Artificial Sequence: Synthetic coding sequence
  source 1..879: mol_type = other DNA
  misc_feature 1..273: note = DNA
  misc_feature 274: note = RNA
  misc_feature 275..879: note = DNA
atgagcgcaggtaatggtaccccctgggacgccacttggaatattaccgttcagtggctagcagtggacattgcctgccggacactgatgtttcttaagctgatggctacctattccgcagccttcctgcctgtagtgattgggctggataggcaggcagctgtccttaaccccttggggtcaagatcgggcgttaggaagttattgggcgccgcctggggtctctctttcttgctagcgtttcctcagctgttccttttccacaccgtgcactgagccggcccagtgcccttcactcagtgcgtgacaaaagggagcttcaaggcacagtggcaggaaaccacctataatctgttcaccttctgttgtctgttcctgctccctcttaccgcgatggctatatgctatagccggattgtgctatccgtttctcgaccccaaacgagaaagggtagccatgcacctgctggcgagttcgccttacctcgatccttcgataattgccctcgggtgcggctacgtgcccttcgtttggctctactcatcttgctcacatttattctatgttggactccatactacttgttaggcatgtggtactggttctcccccacaatgctcaccgaagtaccccccagtctgtctcacatcctcttcctgctcggtcttctcaacgcacctttagaccctctgctgtatggggcttttacactgggatgtcgcagaggacaccaggagctctccattgattcttcgaaggaaggatccggtcgaatgcttcaggaagagatccacgctttcaggcagctggaagtacagaagaccgtaacttcaaggagggcgggagaaacaaagggcatttctatcacctcgatctag

SEQ ID NO: 118974 - DNA, 363 bp, synthetic construct
  misc_feature 1..363: note = Description of Artificial Sequence: Synthetic coding sequence
  source 1..363: mol_type = other DNA
atggctagttctcggcggggcctcttactactcctgctgctgaccgctcacctgggcccatcagaagcccagcattggtctcacgggtggtatccaggtggaaaacgagcactctcatccgcacaagatcctcagaatgcactcaggccacccgggagagcattggacactgcggccggcagccccgtgcagaccgcacacggactaccttcagacgccttggcccctctcgatgattcgatgccctgggagggaaggacaacagctcagtggtccctgcatagaaagaggcacttggcccggacccttctgacagctgcccgagaaccacggccagctcccccatcatccaataaggtgtag

SEQ ID NO: 118975 - DNA, 342 bp, synthetic construct
  misc_feature 1..342: note = Description of Artificial Sequence: Synthetic coding sequence
  source 1..342: mol_type = other DNA
atggcttctagtcgcaggggtttgctgctcctgttgcttctgaccgctcatttgggaccttcagaagcccagcactggagccatggctggtacccgggcggcaaaagggcattgagcagcgcccaagacccccagaacgccttacgtccccccgccgggagtccagtgcaaacagcacatggcctgccctctgacgccctggcccctcttgatgatagcatgccctgggaagggaggaccactgcacagtggtcattgcaccgcaaaaggcacctggccaggaccttgcttacagccgccagggagccacgacctgctccgcccagcagcaacaaagtctag

SEQ ID NO: 118976 - DNA, 339 bp, synthetic construct
  misc_feature 1..339: note = Description of Artificial Sequence: Synthetic coding sequence
  source 1..339: mol_type = other DNA
atggcaagcagccgtagagggttactcctgctcttgcttctcaccgcccaccttgggcctagcgaggcacagcactggagccatgggtggtacccgggcggcaagagggccctctcctcagcccaggatccacaaaatgcactaagaccccctggctcccctgttcagactgctcatggcttgccctctgatgcattggccccgctggacgattctatgccttgggagggtagaactactgcgcagtggagcctccatcgcaaacggcacctggccaggacactactcacggctgcccgggagccgaggcctgcgccgccatcctctaacaaagtttag

SEQ ID NO: 118977 - DNA, 339 bp, synthetic construct
  misc_feature 1..339: note = Description of Artificial Sequence: Synthetic coding sequence
  source 1..339: mol_type = other DNA
atggccagtagtagacgaggactgctgctgctgcttttgctgactgcacatctcgggccttccgaggcgcagcactggtcacatggctggtatcctggcggcaagagagctctatcttcagcccaggacccacaaaacgctttaagacctcctgggtccccggttcagacagcacacggcctgccttccgatgccctcgcacccctcgacgatagcatgccttgggagggaaggactaccgcacagtggagcctgcaccgaaagcgacatctggcccgcacacttcttacagctgcccgtgagccgcgcccagccccaccttcgagtaataaggtttag

SEQ ID NO: 118978 - DNA, 342 bp, synthetic construct
  misc_feature 1..342: note = Description of Artificial Sequence: Synthetic coding sequence
  source 1..342: mol_type = other DNA
atggccagttctaggcggggtttgctcctacttttgctactgaccgcacacctaggcccctccgaagctcagcattggagtcatggctggtatcccggtggcaaaagggccctgtcctccgcccaggaccctcaaaatgcactgaggccacccgccgggtcccccgtgcagaccgcccacggactgcctagtgatgcactggccccactggatgattctatgccttgggagggacggacaaccgcccagtggagcttgcaccgtaaacgtcatcttgcaagaactttgctgaccgctgccagagagcctcgccctgcccccccctccagcaataaagtttag

SEQ ID NO: 118979 - DNA, 945 bp, synthetic construct
  misc_feature 1..945: note = Description of Artificial Sequence: Synthetic coding sequence
  source 1..945: mol_type = other DNA
atgtacaaaatggaatactcatatcttaacagcagcgcctacgagagctgcatggcagggatggatacgtccagccttgcaagcgcttacgcggacttctcgtcatgctcacaggcgtcagggtttcagtataaccccatcagaacaactttcggcgcaacaagcggttgtccctccttgacacccggctcatgttcacttggcactctacgcgatcaccagtccagtccctacgcggctgtcccctacaagctattcaccgaccacggcggcttgaatgaaaagagaaagcaacgaaggattcgcacaacatttacctctgctcagttgaaggagctggagcgtgtattcgcggaaactcattatccagatatttatacccgggaagagttggctctcaagattgatctgacagaagctagagttcaagtgtggttccagaataggcgagcaaagtttaggaagcaagagagggcagccgctgccgcagcggcggcagcgaagaacgggtcgtccgggaaaaaaagcgactcatcaagagatgacgaatcaaaagaagccaagtccacagatccagactcaacaggtggaccaggccccaaccccaaccccactccgagctgtggtgctaatggaggcggtggtggagggccatccccagccggggctcctggagccgcaggccctggcggcccgggaggagaacccgggaaaggcggggccgcagctgccgccgctgctgcggccgccgccgcagccgcagcagccgctgctgccgcgggcgggctcgcggccgccggaggacctggacagggatgggcaccagggcctggtcctatcacatcgatccctgatagtctaggaggaccgttcgccagtgttctcagcagccttcagcgcccaaatggcgcaaaggctgctctggtcaagagcagcatgttttag

SEQ ID NO: 118980 - DNA, 750 bp, synthetic construct
  misc_feature 1..750: note = Description of Artificial Sequence: Synthetic coding sequence
  source 1..750: mol_type = other DNA
atggccaactccgcttcccccgaacagaatcagaaccactgcagcgcaataaacaattcaatccctctcatgcaaggcaaccttccaactctgacactgtcagggaagatccgagtgacagtcacgttttttctgttcctgctgtcagctactttcaacgccagtttcctcctcaaactccagaagtggactcagaaaaaggaaaaaggaaagaagctcagccgcatgaaactgctgctcaaacatcttaccctcgcaaatttactggaaaccctcattgtgatgccactggatggcatgtggaatattacggttcagtggtatgcgggagagctcctgtgcaaggtgctctcctatcttaaactgttctctatgtacgcgcccgccttcatgatggtggtgattagtctagatcgtagcttggctatcacccgtccattagcgttgaaatctaatagtaaggtggggcagtccatggtcggcctggcatggatactgagctccgtgtttgcaggccctcagctgccattgcaccatccttcgtttcatcatgcagacctgcagtgtaaaaaccatttgcacccagatacaggacccagcagcggaccaccaaggactaccacggagagtgtccaggagcagtacacaaaatcgacagccgaggatagtaaaaacgatggatgcatttgccactttatttattgcctgctggactctctcctgtgtccacggaatctggtactcgtctag

SEQ ID NO: 118981 - DNA, 2055 bp, synthetic construct
  misc_feature 1..2055: note = Description of Artificial Sequence: Synthetic coding sequence
  source 1..2055: mol_type = other DNA
atggaagagaacttgatcagtatgagagaggatcattcattccacgtgcgctaccggatggaggcatcttgcttggaactcgcactggagggcgagcgcctgtgcaagtctggggattgtagagccggcgttagcttcttcgaggccgccgtgcaagtaggcactgaggacttgaagacactctccgcaatctacagccagctgggtaatgcctacttctacctacacgactatgcaaaggcgctggagtatcaccaccatgacctgaccctcgctagaaccatcggtgatcagcttggcgaggcaaaggcttccggaaatctggggaataccctgaaagtgcttgggaatttcgacgaagctatcgtctgctgtcaacggcatttagacatctcacgcgagctaaatgacaaggttggcgaggccagggccctttacaatctgggaaatgtctaccacgccaaggggaagtccttcggttgtccaggacctcaggatgtaggcgaatttcctgaggaggtccgcgacgcactccaagcagcagtggatttctacgaagaaaacctgagcctggttaccgccttgggcgaccgcgctgcgcagggtagagccttcggcaacctgggcaacacgcattatctactcggcaattttcgagacgccgttatagcgcacgagcaaaggcttctcatagctaaggaatttggtgacaaagctgccgagagacgagcttatagcaatttgggcaacgcatacatctttctcggagagtttgaaacagcctctgaatattacaaaaagacattgttattggccagacagttgaaagaccgcgcagtggaggcgcagagttgctacagcctgggaaatacatatactcttctgcaggattacgaaaaagcaatagattaccatctgaaacacctcgcgattgcccaggagctcaacgacaggatcggcgagggccgtgcgtgctggagcctgggcaacgcgtacacagcattgggcaatcacgaccaggccatgcacttcgctgaaaagcaccttgagatctctcgggaggtaggtgacaagagcggagagctgactgctcggcttaacctgagtgacttgcagatggtgcttggattgtcttactctacgaataacagcataatgagtgaaaatacagaaatcgattctagcctcaatggggttaggccgaagttaggtcgaagacattcaatggagaacatggaattgatgaagctgacacccgaaaaggtgcagaactggaatagcgagatactggcgaaacaaaaacccctgattgccaagcccagcgcaaagctgctgtttgtcaaccgcctcaagggaaagaaatataagaccaatagctctacaaaagtgctccaggatgcttcaaattcaatcgaccacagaattccaaatagccaacgcaagatctccgccgataccatcggagacgaaggtttcttcgatctgctgtccaggtttcagtccaatcggatggacgatcaaagatgctgcctgcaggagaaaaactgtcacacagcttcaacaaccacctcttctaccccacctaagatgatgttgaaaacaagcagtgtgccagtagtgtcccccaacacagatgaatttttggatcttttagcatcatcacagtcacggagactagacgaccagcgcgcaagtttctctaatctgcccgggctgaggttaacacagaattcacagagcgtactttctcacttgatgacgaacgataataaagaagcagatgaagatttctttgacattctggtaaaatgtcagggatctcggctggatgatcaaaggtgcgcacctccaccggccacgacgaagggtcctacggtgcccgatgaggattttttcagcctgatattgaggtcacagggtaagagaatggacgagcaacgcgtcctgctccagagggaccaaaacagggatactgactttggtctcaaagattttctgcagaataacgcactgttggaatttaagaattccggaaagaagtccgccgatcattag

SEQ ID NO: 118982 - DNA, 2055 bp, synthetic construct
  misc_feature 1..2055: note = Description of Artificial Sequence: Synthetic coding sequence
  source 1..2055: mol_type = other DNA
atggaggagaacctcatctccatgagggaggatcattctttccatgtgcggtatcggatggaggccagttgtttggagctggcactagagggcgagcgcttgtgtaagtctggggactgcagagctggggtctctttcttcgaggctgccgtgcaggtaggtaccgaggatctgaagactctgagcgccatctactcccagctcggaaatgcctatttctacttgcatgactacgcaaaagctctcgagtaccaccaccatgatctgacattggcccggacgattggcgatcagttgggagaggccaaggcaagcggcaaccttgggaatacattaaaggtcctcggcaatttcgacgaagccatcgtgtgctgtcaacgtcacctggacatctctcgcgagctgaacgacaaggtcggagaggcccgggcactgtacaatctcggaaacgtctatcacgccaagggcaagtcttttggttgtcctggccctcaagatgtgggtgagttccctgaggaagtgagggatgcactccaagctgctgtggatttctacgaggagaacctgtctctagtcacggccctcggcgatagagccgcacagggtcgggcgtttggaaacctgggaaatactcactacctgctggggaacttccgcgatgccgttatcgctcacgaacagagactgctaatcgctaaggagtttggggataaggccgccgagaggagagcgtatagcaatctgggaaatgcatatatcttcctcggcgagtttgagaccgcatcagagtattataagaaaaccctgcttcttgccagacagttaaaagatcgagctgtcgaagcccagagctgctattcactggggaacacatacacgctgctgcaggactatgaaaaggccattgactaccacctcaagcatcttgcaattgcccaggagctcaatgaccggattggcgagggacgggcctgctggagcctgggtaacgcttacacggcactcggcaaccatgatcaagcgatgcatttcgccgaaaaacacctggagatctccagggaggttggagataaatccggagaactcaccgctagacttaatctgagcgacctccaaatggtgctgggcctgtcatattccacgaacaatagtatcatgagcgagaatacagaaatcgactcttcactcaacggggtgaggcccaagctgggcagaaggcattctatggaaaatatggagctcatgaagttgaccccggagaaagtacagaattggaatagcgaaatcctggccaaacagaagcccctgattgctaagccaagtgctaaattgctgtttgtgaatcgcttgaagggaaagaaatataagacgaacagcagcacaaaggtgctgcaggatgccagcaactctatcgaccaccgcattccaaactcccagcgaaagatcagcgctgataccattggcgatgaaggtttttttgatctgcttagtagattccagtctaacaggatggacgaccagagatgctgtttacaggaaaagaactgccacaccgcctcaactaccacctcttctactcccccgaagatgatgctgaaaacatctagtgttcctgtggtcagtcctaatactgacgagttcctcgaccttctggcatctagccagtctaggaggcttgacgaccagcgcgcttctttcagcaatctgccaggactgcgcttgactcaaaattcccagagtgttctgtcacatttaatgaccaacgacaacaaggaggccgatgaggatttttttgacatactagtgaagtgccaaggttcccggttagacgaccagcgatgcgctccacctcccgccacaacaaaaggaccaacagttccagatgaagatttcttcagcctgatcttacgcagccagggtaaacggatggacgagcagagagtgctgctgcagagagaccagaacagagatacggacttcggattgaaggactttctgcagaataatgcgctgctagaatttaagaacagcggtaaaaagagtgctgaccactag

SEQ ID NO: 118983 - DNA, 228 bp, synthetic construct
  misc_feature 1..228: note = Description of Artificial Sequence: Synthetic coding sequence
  source 1..228: mol_type = other DNA
atggaagaaaatctgatttctatgagggaggaccactcttttcacgtcagataccgtatggaggcctcttgcctcgagctggctttggaaggcgagaggctgtgcaagtctggagactgtcgggctggcgtgagcttcttcgaggccgctgtccaggttggcacagaagatttaaagacactctctgcgatttatagccaactggggaatgcttatttctatctatag

SEQ ID NO: 118984 - DNA, 642 bp, synthetic construct
  misc_feature 1..642: note = Description of Artificial Sequence: Synthetic coding sequence
  source 1..642: mol_type = other DNA
atggaagagaacctcataagcatgcgtgaagaccactcgtttcacgtaaggtacagaatggaagcctcatgcctagagctggcactggagggggaacggctctgcaaatcgggtgattgtagagcaggagtgagttttttcgaggcagcggtacaggtcggcaccgaggatcttaaaaccttgagcgctatatactctcaacttggaaatgcctacttctacctgcacgactacgccaaagcgttagagtatcatcatcacgacctcaccctcgcacgcactatcggcgaccaactgggggaagcaaaagcatccggcaatctcgggaatacactaaaggtccttggaaacttcgacgaagcaatagtgtgttgccagcggcaccttgacatatcacgagagctaaatgataaagtcggtgaagcaagagccctgtataatctgggcaatgtgtaccacgccaagggaaagtcgttcggatgtcctggcccccaggatgtgggggagttccctgaggaagtgcgcgacgctttgcaggctgccgtcgacttttacgaggagaacttatcattggtgacggcccttggcgacagggctgctcagggacgggcctttgggaatctaggaaatacacattattag

SEQ ID NO: 118985 - DNA, 159 bp, synthetic construct
  misc_feature 1..159: note = Description of Artificial Sequence: Synthetic coding sequence
  source 1..159: mol_type = other DNA
atggaagagaatcttatttccatgagggaggatcactcttttcatgttcggtatcgcatggaggcctcctgtttagagcttgctttggaaggggagcggctctgcaaatcaggggattgccgcgctggagtgtcgttctttgaggcagccgtgcagtag

SEQ ID NO: 118986 - DNA, 1290 bp, synthetic construct
  misc_feature 1..1290: note = Description of Artificial Sequence: Synthetic coding sequence
  source 1..1290: mol_type = other DNA
atggctagcctctgggaatccccccaacagtgtatcatcctcagccccctgtcaggatggtggttttccattgggatcagtattctgacaagcagcgccctggtactgaaaccccaaatgctgaaaggagaactccagaccagacccagccagcgcccctccagaaaggcctttagacgtaataactttgagtatacactcgaggctagcaagtcactgcgccagaagccaggagactctaccatgacatacctgaacaagggccagttctatcccattaccctaaaagaagtatcctcatctgaaggtattcaccacccaatttcaaaagtgagaagtgttattatggtcgtgttcgctgaagataagtcaagggaagaccaactgcgccactggaaatattggcatagtcggcagcacactgcgaagcagagatgtatcgacatcgcagattacaaagagagcttcaacaccattagtaacattgaggagatcgcctataacgccatctcatttacttgggatatcaatgacgaggcaaaggtctttattagcgtgaattgcctgtcaaccgactttagctcccaaaaaggagtgaaagggttgcctctgaacatacaggtggacacatacagctacaataaccgcagcaataagcctgtgcacagggcttactgccagattaaggttttttgcgataaaggcgccgagcgaaagattagggatgaggagcgcaagcaatccaagcgcaaggtctcagacgttaaggtgcccttgcttccctcgcataaaaggatggacatcacggtgttcaagccattcatcgacctcgacacccagcctgtgctgttcattcccgatgttcacttcgccaacctccagaggggaacacacgtgctaccaatagcctctgaggaactggagggcgagggatccgttctgaaacgaggaccctatggtacggaagatgactttgcggtgccccctagcactaagcttgccaggatcgaggaaccgaagagggtcctgttgtacgtcaggaaagaaagcgaagaagtctttgatgcccttatgttgaagacgccttctctgaaaggactgatggaagctatcagtgacaagtacgatgtgcctcatgataagattggaaagatcttcaagaagtgtaaaaagggtatactcgtcaacatggacgacaacatagtcaaacattactcaaacgaggataccttccagttacaaattgaggaggccggcggttcctataaactcactctgaccgaaatctag

SEQ ID NO: 118987 - DNA, 1857 bp, synthetic construct
  misc_feature 1..1857: note = Description of Artificial Sequence: Synthetic coding sequence
  source 1..1857: mol_type = other DNA
atgacgcaggagtacgacaacaaacggcctgtgctggttttacaaaacgaggcgttgtaccctcagcgtcgaagctatacctccgaggatgaagcttggaaatcttttctcgaaaacccgctgaccgccgccacgaaagctatgatgtctatcaacggggatgaggactcagccgccgctctcggattgctctacgactactataaagtgcccagagaacggcgctcttctacagccaaacccgaagtggagcatccagagcctgatcatagcaagcgcaatagcatccctatcgtcaccgagcagcctctcatcagtgccggcgagaaccgcgttcaagtcctgaagaatgtcccattcaacattgtgcttccccatgggaatcagcttgggatcgacaagagaggacacctgacagcccccgacacgaccgtcacggtttcgatagctaccatgcccacccattcaattaagactgaaacccagccacacggcttcgcagtcggaattccccccgcagtgtatcacccagagccaacggaacgcgtagtggtgttcgatagaaatttgaatacggatcagtttagttctggcgcccaagcccctaacgctcagagacgcacacccgattcaacgttttccgagacctttaaggagggcgtgcaggaagtgttcttcccaagtgatctgagcctgagaatgcctggcatgaatagcgaggactatgtgttcgactcagtgtccggaaataactttgagtataccttagaggcctctaagtccctacgacaaaagcctggggacagtaccatgacatacctgaataagggtcagttttatcccataacacttaaagaggtgtcctcctccgagggtatccaccatcctatatctaaagtgcgctccgtcatcatggtcgtgttcgcggaagataagagccgggaggaccagctcagacactggaagtattggcactcgagacagcacaccgccaagcagcgatgtatagacattgccgattacaaggaatccttcaacaccatatccaacatcgaggaaattgcgtacaatgcaatttctttcacatgggacattaacgacgaggccaaggtgtttatctcagtgaactgcctttctactgatttctcttcccagaagggcgtgaaaggtctgccactgaatatacaggtggacacttatagttataacaatcgcagtaacaagcctgttcaccgtgcatattgtcagattaaagtattctgcgataagggggccgagaggaagatcagggacgaggagaggaaacagtctaagcggaaagttagtgatgtgaaagtacccctgttgccttcacataaacgtatggatataactgtgttcaagccgttcatagatctggatactcaacctgtgttgtttatcccagatgtgcactttgctaatctgcagcgggggacccacgtgctgcctatcgcaagcgaggagcttgaaggcgagggatcggtgctgaaaagagggccatacggcacggaggacgacttcgccgtccctccgtcaacaaagctagcacgtatcgaggagcccaagcgtgtgcttctgtatgtgcggaaggagtcagaggaggtatttgatgccctgatgctgaaaaccccttcactgaagggacttatggaggcaatctcggacaagtacgacgtccctcacgacaaaatcggaaaaatcttcaaaaagtgtaaaaaggggatcttggttaatatggatgacaacatcgtgaaacattacagcaacgaggacaccttccagttgcagattgaggaggccgggggctcatacaagctgactctgacggaaatctag

SEQ ID NO: 118988 - DNA, 1857 bp, synthetic construct
  misc_feature 1..1857: note = Description of Artificial Sequence: Synthetic coding sequence
  source 1..1857: mol_type = other DNA
ttgccgaaggaggtcgagaacaagaggccggtactggtcctacagaacgaggcattatatccacaacggcgaagttatacatctgaagacgaggcatggaagtcatttcttgaaaatcctctgacagctgctacaaaggctatgatgtccatcaatggggatgaggactccgcagcagcgctcggactgctgtatgattattacaaagtccctagagagcgcagatcaagcactgccaagcccgaagtcgaacatccggaacctgaccacagcaagcgcaatagcattcccatcgttaccgaacagcctctgatttccgccggggaaaacagagtgcaggtgcttaaaaatgtgcctttcaacatcgtcctaccccatggaaatcagctgggcatcgataagcgaggacatttgacggccccggacactactgtgacggtctccattgcaaccatgcctactcattctatcaaaacagaaactcagccacacgggttcgccgtcggcattccccctgccgtgtaccatcccgagccaacggagagggtggtagtcttcgaccggaatctaaataccgaccagttttcctccggtgcccaggcgcctaatgcccagcgccggacgcctgatagtactttctccgaaacttttaaagagggcgttcaagaggtattttttccctctgatctgtccctacgaatgccaggaatgaattctgaagactatgtttttgactcggtctccggcaataactttgagtatacactggaagcatctaagtccttaagacaaaagcctggcgactccactatgacttacctgaacaaaggtcagttttatcctattacgttgaaggaggtgtcaagctccgaaggcatccaccaccccataagtaaggtgcggtctgttatcatggtggtgttcgcggaggataaatctcgggaagatcagctacgacattggaaatactggcacagccggcagcacacagctaagcagcggtgcatagatatcgctgattacaaggagtcattcaacacgatttccaatattgaagagatcgcgtataacgccattagcttcacctgggatataaatgacgaggctaaggttttcatctctgtgaattgcctgagcactgatttttcctctcagaaaggggtgaaagggctccccttaaacattcaggtcgacacttattcatacaacaatagatctaataaaccagtgcaccgtgcctattgccaaattaaggtcttttgcgataaaggggccgagaggaagatcagggacgaagaacggaagcagtctaagcgaaaagtgtctgatgtaaaagtgcccctgctccccagccacaagagaatggacatcaccgtgttcaagcctttcatagaccttgacacccagccagtgctcttcatccctgacgtacacttcgccaacctgcagaggggcacacacgtgctaccaatcgcctctgaagagcttgagggggaagggtccgtcctgaaacgaggtccttacggcaccgaggacgattttgccgtgcctcctagcacgaagctggcacggatcgaggagcctaaaagagtgctgctctacgtgagaaaggagtctgaagaggtattcgacgccctcatgttgaagacaccctccctgaaggggctgatggaagccatatccgataagtacgacgtcccccacgacaaaataggcaagatcttcaagaaatgtaaaaaggggattctagtcaatatggatgataacatcgtgaagcactattcgaacgaggacacattccagttgcaaatagaggaggccggtggctcttacaaactgacgctgaccgagatctag

SEQ ID NO: 118989 - DNA, 1878 bp, synthetic construct
  misc_feature 1..1878: note = Description of Artificial Sequence: Synthetic coding sequence
  source 1..1878: mol_type = other DNA
atgtcacaggaatcagacaataataaaaggcttgtggccttagtgccgatgccgtccgatccccctttcaacacaaggcgagcctatacatccgaagacgaagcctggaagagctacttggaaaatccgctcactgctgcaaccaaggctatgatgtccattaatggcgacgaagactccgctgcggcactgggtctgctatatgactactacaaggttcctcgcgataaacgactgctctctgtgtcaaaggcaagtgattcacaggaggatcaggaaaagcgaaattgtctggggacctctgaggcccaaagtaatctgtctggaggcgaaaaccgggtccaggttttaaagaccgtgcctgtcaaccttagcctgaaccaagatcatttggaaaactccaaaagggaacagtactcaatctccttccctgaatcaagcgctattatcccagtgtctggaatcactgtcgtcaaagccgaagactttacccccgtttttatggctcccccggtccattaccctcggggcgacggcgaggagcagcgcgtggtgatctttgaacagacacaatatgacgtgccaagcttggcaacccactcagcatacctcaaggacgaccagaggtctacccccgattcaacgtatagtgaaagctttaaggacgccgctaccgagaaatttcgctctgcatccgtaggtgcagaggagtatatgtacgaccagacatccagtggcacctttcagtatacccttgaggccaccaaatccctgcgtcagaagcaaggagagggccccatgacctatctgaacaagggacagttttatgccattactctgtcagagaccggcgataataaatgctttagacaccctatatccaaagtccggagcgtggtgatggtggtgtttagcgaagataagaacagagatgaacaactcaaatattggaaatactggcactcacgacagcacacagcaaagcaaagagtgctggatattgccgattataaggagtcatttaacaccatcggaaacattgaggaaatcgcctacaacgccgtgagtttcacctgggacgtgaacgaggaggcaaaaatttttattactgtgaattgcttatcaactgatttctctagccaaaaaggagtgaaaggccttccacttatgatccagatagacacctattcttacaataaccggtctaacaaacccatccacagagcatattgtcagatcaaagtgttttgtgataagggagctgaaaggaagataagagacgaagagaggaaacagaacaggaagaaaggcaagggccaagcctctcagacccagtgcaactcctcgtcagacggtaaattggcagccattcccctgcagaagaaatcagacatcacctatttcaaaacgatgcctgatttacattctcagcctgtgttgtttattccagatgtccattttgctaacctccagcgcacaggtcaggtctactacaacacagacgacgaacgcgagggaggcagcgttcttgtgaagaggatgttcagacccatggaggaggagtttgggcctgtgccaagtaaacagatgaaggaagaggggaccaagcgtgtcctgctctacgtaaggaaagagacagacgacgtgttcgacgccctcatgctaaagtcacctacggtcaagggactgatggaggcaataagtgagaagtacgggctgcccgtggaaaaaattgctaagctctataaaaaaagcaaaaaaggcatactggtcaatatggatgataatataatcgaacattattccaatgaggatacgtttattttgaacatggaatctatggtggaggggttcaaagtaactctgatggaaatttag

SEQ ID NO: 118990 - DNA, 1830 bp, synthetic construct
  misc_feature 1..1830: note = Description of Artificial Sequence: Synthetic coding sequence
  source 1..1830: mol_type = other DNA
atgccctcggacccccccttcaacacccgccgggcttacactagcgaggatgaggcttggaaaagttacctggaaaatcctctgaccgctgcgaccaaggctatgatgtcaatcaacggtgacgaggactccgctgccgctttgggtcttttgtatgactactataaggtcccaagggataaaagactactttccgtctctaaggcaagtgatagccaggaagatcaagaaaaacggaactgcctcgggacctccgaagcccaaagcaacctttctggcggcgaaaatagggtccaggtacttaagacagtgccagttaaccttagtcttaaccaggaccacctggaaaactccaagcgcgaacagtattctatttcattcccggagtccagcgccatcattccggtcagtggaattaccgtcgtgaaggcggaggactttacaccagtgtttatggcccctcccgtccattaccctcggggggacggggaggagcagagggtcgtaatttttgaacaaacccagtatgacgtgccttcattggcaactcacagcgcgtacctgaaagacgatcagcgttctacccccgactccacatacagtgagtcattcaaagacgctgctacggagaagttccgctcagcaagtgtcggggcggaggagtatatgtacgatcaaacttcttctggtacctttcaatatactttggaggccacaaaaagcctcaggcagaaacagggggagggaccgatgacctacttaaacaaagggcagttctatgccattacgctctcagagaccggagataataaatgctttcgacaccccatctcaaaggtgcggagtgtggtcatggtggtattttccgaggacaaaaatagggacgaacagctgaaatattggaagtattggcactctcggcagcacactgccaagcagagggtattagacatcgctgactataaagagtcatttaacactattgggaacatcgaggagattgcttataacgctgtctcttttacctgggacgttaatgaagaagcgaagatcttcataacagtgaactgcctgtctactgatttctcttctcagaaaggagtgaagggactgcctttaatgattcaaattgatacgtactcctataacaaccggagcaataagcccatccacagagcttactgccaaataaaggtgttttgcgacaagggtgctgaacgcaagatcagggacgaagagcgtaagcagaatcgcaaaaaggggaaggggcaggcctctcagacccaatgcaattcatcaagcgacgggaagctcgcagccatcccgttgcagaaaaagtctgacatcacgtacttcaaaaccatgcctgatctccactcgcaacctgtgttatttatcccagatgtgcatttcgccaacctccaacggactggtcaggtttattacaacacagatgacgaacgcgagggaggatctgtcttagtaaagcgcatgttcagacctatggaggaggagtttggacctgtccctagtaagcagatgaaggaggaaggtactaaacgcgtactgctgtatgtcagaaaggagacagatgatgtctttgacgccctgatgcttaagagtcctacggtgaagggcctgatggaggctatttcagagaagtacggtttgcccgttgagaagatcgctaagctctataagaaaagtaagaaaggtattttggtcaatatggacgataatatcattgagcattactccaacgaggacacattcattctcaacatggagagcatggtagaagggttcaaagtgactctcatggagatttag

SEQ ID NO: 118991 - DNA, 1878 bp, synthetic construct
  misc_feature 1..1878: note = Description of Artificial Sequence: Synthetic coding sequence
  source 1..1878: mol_type = other DNA
atgggtaaagatggaagatcaaataaacggctggttgccttggtgcctatgccctccgacccgccatttaatacccgacgcgcctatacaagtgaggatgaagcctggaagagctatctggagaatccattgacagccgcaactaaagcgatgatgtccatcaacggggatgaagactccgctgccgccctgggccttctatacgactattacaaggtacccagagacaaaaggctgttgtcggtgagcaaggcaagcgacagtcaggaagatcaagaaaagcgcaactgtctggggacttcagaggcccagtccaaccttagcggtggcgagaatagggtccaggtgcttaagaccgtgccagtgaatttgagccttaaccaggatcacctggaaaacagcaaaagggagcagtactctatcagtttccccgagtcatccgccatcattcctgtgtctggcataaccgtggtgaaggccgaggatttcacccccgtgttcatggcgccccccgtccactatccacgaggcgatggggaggagcagcgcgtggttatttttgagcagacacagtacgatgtgccttcactagccactcacagcgcatacctgaaggacgatcagcgaagtacccccgactcaacttatagtgagtcgttcaaggatgccgccactgagaagtttcgcagtgcctcagtgggcgccgaagagtatatgtatgaccagactagcagcggtacctttcaatacactctggaggccacgaagtccttgagacagaagcagggggaagggccgatgacctacctgaataaaggacagttttatgcgatcactctttcagagacaggtgacaacaagtgcttccggcatccaatatccaaggtccgaagcgtggtgatggtggtgttctccgaggataagaacagagacgaacagctaaagtattggaagtattggcattcccggcagcacaccgccaagcagagagtgttggacattgccgactataaggagtcttttaataccatcggaaacatcgaggagatcgcctataatgccgttagcttcacgtgggatgtgaacgaggaagcaaagattttcattactgtgaactgccttagcacagatttttcaagccagaaaggagttaagggcctgcctttgatgatccagatcgatacctattcctacaacaatcgatctaacaagcccatccatcgcgcatactgccaaataaaagttttctgtgacaagggagccgagcggaagatacgcgacgaggaaaggaaacaaaaccggaaaaagggaaagggccaggcttcacagacccaatgcaacagttcttctgatgggaagctggccgcgatccctctacaaaaaaagagtgatatcacctattttaagaccatgcccgatctccactcccagcctgtactgttcatccccgatgtgcactttgccaatttacagagaacaggccaggtgtattacaacacggacgacgagagagaggggggaagcgtcttggtgaaacgcatgtttagaccaatggaagaggaattcggccccgttcccagcaaacagatgaaggaagagggcaccaaaagggtgctgctgtatgtacgaaaggagacggacgatgtattcgatgcccttatgctgaagagtcctactgtcaagggactcatggaggcaattagtgaaaaatacgggctgcctgtggagaagatcgctaagctatacaagaagtctaagaaagggattctggtgaacatggacgacaacatcatcgagcactatagtaatgaagatacgttcatcctcaatatggagtccatggttgaaggattcaaggtgaccctgatggagatctag

SEQ ID NO: 118992 - DNA, 21 bp, synthetic construct
  misc_feature 1..21: note = Description of Artificial Sequence: Synthetic coding sequence
  source 1..21: mol_type = other DNA
atgtcccaggaatcggactag

SEQ ID NO: 118993 - DNA, 1737 bp, synthetic construct
  misc_feature 1..1737: note = Description of Artificial Sequence: Synthetic coding sequence
  source 1..1737: mol_type = other DNA
atgctccgccgcctggacaaaatcaggtttaggggccacaagagagatgactttcttgatctggcggagagcccaaacgcctcggacaccgagtgctccgatgaaataccgcttaaagttccgcggacgtcacctcgcgacagcgaagaactaagggacccagccggaccgggcacattaataatggcaactggcgtccaggactttaatagaactgagttcgatcgtctgaacgagatcaaaggtcacttggaaatcgcgttactggaaaagcactttttacaggaggagctgcgaaaacttagagaagagacaaacgccgaaatgttacgccaggagctggacagagagcggcagcggagaatggagcttgagcagaaagtgcaggaggtgctgaaagcaagaacagaagaacaaatggcacagcagccacccaagggtcaggcccaggcttctaacggtgccgaacggcgatcccagggcttgtcttctcgccttcagaagtggttctacgaaaggttcggcgagtacgtggaggatttcagatttcagcccgaagagaacaccgtcgaaacagaagaaccactttcagcacggaggctgaccgagaatatgcgtaggctgaagcgaggtgcaaagccagtaacaaacttcgtgaagaacctgagcgcattgtccgattggtactccgtttatactagtgccattgcattcacagtctacatgaacgcagtttggcacggatgggccattccactgttcctgttcctggctatccttcggcttagcctcaattacctgatcgcgagaggttggcgcattcagtggagcatcgtccccgaggtgtctgagcctgttgagccacccaaggaggacctgacagtaagtgagaaattccaactggtgttggatgtcgcgcagaaagcccagaacctgtttgggaaaatggctgatatcctagagaaaatcaaaaacctttttatgtgggtgcagcccgagattacccagaaactgtatgtggccctgtgggccgccttccttgccagctgcttcttcccctataggttagttggccttgcagttgggttatatgccggcattaagttcttcctcatcgacttcatctttaaaaggtgcccacgcctccgcgcaaagtatgatactccatacatcatctggcgatcactccctactgacccccaactcaaagagagatcctccgcggccgtgtcccgccggctccagacaaccagctctcgatcctatgtacccagcgcccctgctggattgggaaaggaagaagacgccggtaggttccattccaccaaaaaagggaacttccacgagatctttaacctcacagagaacgagcgcccccttgccgtttgcgagaatggatggcgctgttgcctcatcaatagggaccggaagatgcctacggattacattcgcaatggtgttctgtacgtcaccgagaattacttgtgtttcgagagcagtaagtccggatccagcaagcggaacaaagtgataaaactggtggatatcacggacatccagaagtacaaggtcttatctgtcctgccaggctcaggtatgggaattgcagtatcgacccccagtactcagaaaccactggtcttcggggccatggttcacagagacgaagcgtttgagacaattctgagccagtacataaagattacctccgcggcggcatccggaggagacagctag

SEQ ID NO: 118994 - DNA, 1737 bp, synthetic construct
  misc_feature 1..1737: note = Description of Artificial Sequence: Synthetic coding sequence
  source 1..1737: mol_type = other DNA
atgttgcgcagactggacaaaatccgcttcaggggccacaagcgagacgactttttggatcttgcggaaagcccaaatgcctctgacaccgagtgctctgatgaaatccctctaaaagttcctcgaacttctcctcgggattctgaagagcttcgcgacccagctggtcctggaacccttatcatggccacaggagtgcaagacttcaacagaacagagttcgatcgcctgaatgagatcaagggccatctcgagatcgctctgctcgaaaagcattttctccaagaagagctgcgcaagctccgagaggaaaccaacgcagaaatgctgaggcaggagctggaccgagaaagacagagacgtatggaactggagcagaaagttcaggaggtcctaaaagctcgaactgaagagcagatggcacagcaaccaccgaaagggcaagcccaggcatccaacggagcagaaagacggtctcagggcctctcctcacggctgcaaaaatggttttacgaacgcttcggcgagtatgtagaggactttcgattccaacctgaggagaacaccgttgaaacagaggaaccgctgtcagctcggcggctgacggagaatatgcgcagactgaagagaggggctaagccagtgactaactttgttaaaaacttgtccgcgttatctgattggtatagcgtctatacaagtgccatcgcctttaccgtgtacatgaatgctgtatggcatggatgggcaataccactgttcctgtttctagccattcttcgactctcactgaattatctcattgcgcgaggatggcgtatccagtggagtatcgtacccgaggtgagtgaaccagtggaaccacctaaggaggacttaacggtatccgagaagttccagctggtgctggatgttgcgcaaaaggcacagaacctatttggaaaaatggccgacattttagaaaagataaaaaatctatttatgtgggtgcagccggagatcacgcaaaaactgtatgtggccctgtgggccgccttcttggccagctgctttttcccttatcgtctcgtcggcctagccgtcgggctctacgcaggcattaaattcttcctaatagattttattttcaagaggtgcccgcgcctgagagccaagtacgatacaccctacattatatggcggtctcttcctaccgatcctcagctaaaggaacggagcagcgcggctgtgtcccggagactgcagacaaccagctcccgctcatacgtgcccagcgctcctgcagggttagggaaagaggaggatgccggaagatttcacagtacgaagaaaggaaattttcatgagattttcaatctgacagagaacgagaggccattggctgtgtgcgagaacggctggagatgttgcctgataaaccgagatcgcaaaatgcctacagattacatcagaaacggggtgctatatgtgacagaaaactacctctgtttcgaaagtagcaaatcgggtagttccaaacgaaataaagtgattaagctcgtcgatattaccgacatccaaaaatacaaggtgctcagcgtgctgcccggcagtggaatgggcatcgcagtatccactccaagcacacaaaagcctctcgtgttcggcgccatggtgcatcgcgatgaggcatttgaaaccattttatcccaatacataaagatcacatccgcagccgccagtggcggtgactcttag

SEQ ID NO: 118995 - DNA, 102 bp, synthetic construct
  misc_feature 1..102: note = Description of Artificial Sequence: Synthetic coding sequence
  source 1..102: mol_type = other DNA
atgctgaggcggctggacaagatccgattcagggggcacaagagggacgactttctcgaccttgctgagtcgcccaacgcctcagatacggagtgtagttag

SEQ ID NO: 118996 - DNA, 1782 bp, synthetic construct
  misc_feature 1..1782: note = Description of Artificial Sequence: Synthetic coding sequence
  source 1..1782: mol_type = other DNA
atgtggaccctagtatcgtgggtcgccttgactgctgggctcgtggcaggcactaggtgcccggatggccagttttgccccgtcgcctgctgtctcgatcctggcggggcgtcatattcgtgttgccgccctctcctagataagtggcccaccactctgtcccgccacttggggggcccctgccaggtggatgctcactgttccgccgggcatagttgcatctttacggtttcaggcaccagttcttgctgtcccttccccgaggcagtggcatgcggtgacggccaccactgttgcccacgcgggttccactgctccgccgatggcaggtcttgctttcaaaggagcggcaacaattcagttggggccattcagtgcccggactctcagtttgaatgccccgatttttcaacttgctgtgtcatggtggacggctcctggggatgttgtcccatgccgcaggcttcatgttgtgaggacagagtccattgttgcccgcacggcgccttttgtgatcttgtgcacaccagatgcataaccccgaccgggacccaccctttagccaaaaagctacccgctcagcggaccaatagagccgtggctctgagctccagtgtcatgtgtcccgatgcgcgcagcagatgtcctgatgggagtacctgttgtgagttgccaagcggtaaatacgggtgctgccctatgcctaatgcgacatgctgtagcgaccacctgcactgttgtcctcaggatactgtatgtgacctaatacagtctaaatgcttatctaaggagaacgctaccactgatctattgaccaagctgccagcccatacggtgggtgacgtgaaatgtgatatggaggtgagttgtccagacgggtacacttgttgtcgcctccaatccggggcttggggttgttgtccatttacacaggctgtctgttgtgaggaccacattcattgctgccctgcaggcttcacatgtgatacacagaaaggcacatgtgagcagggtcctcaccaggtcccatggatggaaaaggccccagctcacctttccttgcccgacccacaggccttgaagcgcgacgtgccctgcgacaacgtttctagttgcccttcctccgatacttgctgccaactgacttccggagaatggggctgttgtcccattccagaggccgtctgttgcagcgaccatcagcattgctgccctcagggctatacttgtgtcgctgaaggccagtgccaacgcggtagcgagatagtggcaggtctggagaaaatgccagcaaggcgcgcttccctgtcccacccgcgcgatattgggtgtgatcagcacacttcatgccccgttggccagacctgttgtccaagcctcggtggttcctgggcatgttgccagctcccccatgccgtttgttgcgaggaccggcaacattgctgtccagctggctatacttgcaacgtcaaggcacgctcatgcgaaaaggaggtggtctctgcccagcctgccactttcctggcccggtcaccacatgttggcgtgaaggacgtggagtgcggggaaggtcacttttgccacgataatcaaacttgctgcagggacaatcgtcaaggttgggcgtgctgcccatatcggcagggagtatgctgcgctgatcgacgacactgctgcccagctggattccgttgcgctgctcgcggtaccaagtgtctccggcgcgaggctccccggtgggacgcccctttacgcgatcccgccctgcgacaattgttatag

SEQ ID NO: 118997 - DNA, 1317 bp, synthetic construct
  misc_feature 1..1317: note = Description of Artificial Sequence: Synthetic coding sequence
  source 1..1317: mol_type = other DNA
atgtggacgcttgtaagctgggtcgcactgaccgcgggcctggtagccggtacgcggtgtccggacggacagttctgcccagtggcctgctgcctggatcctggaggcgctagctactcatgctgccgcccgttgctcgataaatggcctacgaccctttctcgacatctggggggaccatgtcaagtagatgctcactgctctgcgggacacagttgtatctttacagtatcaggaactagcagctgttgcccttttcccgaagctgtcgcatgcggcgacggtcatcactgctgtcctcggggctttcattgctctgcagatgggagaagttgctttcagagaagcggtaacaactcggtcggagccatccagtgcccagacagccagttcgagtgcccggacttttcaacgtgctgtgttatggtagacggcagttgggggtgctgccctatgcctcaagccagttgctgcgaagatcgtgtccattgctgtccccacggagccttctgcgatctggtccacacaaggtgtattacccccacagggacacatccacttgctaaaaagctcccggcccagcgaaccaatagggcagttgctctgtcttcctcggtgatgtgccccgatgcccgttcccggtgtcccgacggatcaacctgctgcgagcttccaagtggcaagtacggatgctgccccatgccaaacgctacttgctgctccgaccacctgcactgctgtccacaagacaccgtgtgcgacctcatccagtctaagtgcctgagtaaagagaacgcaaccacagatctgcttacgaaactgcccgcacatactgtgggggatgttaagtgtgatatggaggtctcatgcccagacggttatacctgctgtcggctgcagtcaggggcctgggggtgttgtccattcacccaggccgtatgctgcgaagatcatatccactgttgtcctgccgggtttacttgtgatacacagaagggaacttgcgagcaagggccccaccaggtgccatggatggagaaggcgccagcccacttgtcactccccgacccccaggcccttaaacgggacgttccttgtgacaatgtgagcagctgtccctccagtgacacttgttgtagggataaccggcagggttgggcctgttgcccgtatcggcaaggggtttgttgcgctgaccgacgccattgctgtcctgccggtttccggtgcgcggcccgaggcactaagtgtcttcgacgggaagcccccaggtgggatgcaccactgcgtgatcccgctctgcgccagttactgtag

SEQ ID NO: 118998 - DNA, 1242 bp, synthetic construct
  misc_feature 1..1242: note = Description of Artificial Sequence: Synthetic coding sequence
  source 1..1242: mol_type = other DNA
atggctatcaccgctgcacacggtgcctcaactgccgtgcagactggagaccccgctagcaaggatcaggtgactacgccttgggtgccaagctcagctcttattgtgagctccaatgctcgcactagccctagggccgttctgtggagcatggcaccgggcggggcagctccctgtcctagacttcccgccgtgaaaacaggttgtactgccgtgtgtgatttgatccaaagcaaatgccttagtaaggagaatgccaccactgacctccttaccaaactacccgctcacactgtgggggatgtcaaatgcgacatggaggtgtcttgcccagatggttatacctgctgtcggctgcagtcgggagcctggggctgttgcccttttacccaggccgtgtgctgcgaggatcacattcactgttgtcccgctgggttcacgtgcgatacccagaaggggacgtgtgagcaggggcctcatcaggttccatggatggaaaaggccccagctcatctgagcttgccagatccacaagcccttaagagagacgttccttgtgataatgtgagcagctgtccaagcagtgatacgtgttgtcagcttaccagtggggagtggggatgctgtccgatccccgaggctgtttgttgctcagaccaccagcattgctgtccgcagggatacacgtgcgtggccgagggccaatgccagcgagggtcagaaattgtagccggtttagaaaagatgccagctcgcagagccagcctctcccacccgcgggatattgggtgcgatcagcacacatcctgtccggtcggacagacctgttgccccagcttaggaggcagctgggcttgctgccagctgcctcacgccgtttgctgcgaggatcggcagcattgctgtccggcaggatacacctgtaacgttaaagctcgcagttgcgagaaagaagtggtgtccgcccagccggccacctttcttgcccgctctccacacgtaggagtgaaggatgtggagtgcggagaaggccatttttgccacgataaccagacctgctgcagagacaatcgccagggctgggcctgttgcccatatcgccagggcgtctgctgcgctgatcgacgccactgttgtcccgcaggcttcagatgcgcagcacgtggaacgaagtgcttacggagagaggcccctcggtgggacgccccactgcgtgatccggccctgcggcagcttctttag

SEQ ID NO: 118999 - DNA, 789 bp, synthetic construct
  misc_feature 1..789: note = Description of Artificial Sequence: Synthetic coding sequence
  source 1..789: mol_type = other DNA
atgcgtaattcctaccgctttctcgcctcctcgttgtcagtcgttgtgagcctgcttctgattccagaggatgtctgcgaaaagataataggcgggaatgaagtcacaccccactcaaggccttacatggtgctgttgtccctagatagaaagactatttgtgccggcgccttaatcgccaaggactgggtgctcacggccgcccattgcaatctgaacaagcggtcccaggtcatactgggggcccattcaataaccagagaggagcctacaaagcagattatgctggtgaagaaggagttcccttacccatgttatgaccccgctacgcgcgaaggcgacttaaagctgctgcagcttatggaaaaggccaaaatcaacaaatatgtcacaatccttcacttgccgaagaaaggcgatgatgtgaaacccgggactatgtgccaggtggcgggatggggtaggacccataactcggcatcatggagtgacactcttcgtgaggttaatattacaattatagatagaaaggtttgcaacgatagaaatcattacaacttcaacccagtgattgggatgaatatggtatgtgctggcagtctccggggcggccgggactcatgcaacggtgactcaggatccccactcctgtgcgagggcgtgttccggggagtcactagctttggcttggagaataagtgtggcgatcctcggggtcccggggtgtacatcctcctgtccaaaaaacatctcaactggattattatgaccataaagggggcagtttag

SEQ ID NO: 119000 - DNA, 741 bp, synthetic construct
  misc_feature 1..741: note = Description of Artificial Sequence: Synthetic coding sequence
  source 1..741: mol_type = other DNA
atgcaaccctttctcctgcttctggccttcctgctgacacccggagctggcacagaagaaataatcggaggtcatgaggctaagccacattctcgaccctacatggcgttcgtgcagttcctacaggaaaaatctaggaaacggtgcggaggtatcctggtgaggaaagattttgtcttgaccgccgcacattgccagggctcctcgatcaatgtcactttaggtgcccataacattaaggagcaggagagaacacaacaattcattccggtgaaacgaccaattccccacccagcatacaatccaaaaaatttcagcaacgacattatgctgctgcagctggaacggaaagctaaatggaccaccgccgttagacctctgagactgccaagcagtaaggcccaggtgaagcccggtcagctgtgcagtgttgctggatggggttacgtgtccatgtccactctcgctacaaccctccaggaggtgctgctgactgtacagaaagactgccaatgcgaacgactgtttcacggaaattactcgagagctacggagatctgtgtgggtgatcccaaaaaaacacaaacgggcttcaaaggtgatagtggaggaccactcgtgtgtaaggatgtcgcccaggggatcttatcttatggtaacaagaaaggcactccaccaggggtgtacattaaagtgagccatttcttaccgtggattaaaaggaccatgaaacgtctgtag

SEQ ID NO: 119001 - DNA, 459 bp, synthetic construct
  misc_feature 1..459: note = Description of Artificial Sequence: Synthetic coding sequence
  source 1..459: mol_type = other DNA
atgcagcccattctgctgctgctggcctttttactactcccacgtgcggaccaactggaaaggaaagctaagcgaacaagagctgtgcagccactcagactgccatcaaacaaagctcaggtcaaaccaggtcagacctgttctgtggcgggatggggccagaccgcacccctgggtaaacacagtcatacacttcaggaagtaaagatgaccgtccaggaagataggaagtgtgagagtgacttacgtcactactacgatagcacaattgagctctgtgtcggcgatcccgaaattaaaaaaacctccttcaagggtgacagcgggggcccgctggtttgcaacaaggtcgcacagggtatcgtatcctatggacgcaataatggcatgccccccagagcttgcacgaaagtaagtagcttcgtccattggataaagaaaaccatgaagagatattag

SEQ ID NO: 119002 - DNA, 609 bp, synthetic construct
  misc_feature 1..609: note = Description of Artificial Sequence: Synthetic coding sequence
  source 1..609: mol_type = other DNA
atgcaaccgatcctgctgctgctggcatttctcttactaccccgggcagacgctggagagatcattggaggacatgaggcaaaacctcacagtcgcccttacatggcttacctgatgatctgggaccagaagagtcttaagcggtgcggaggcttccttatcagagatgacttcgtgcttactgcggcccactgttgggggaggctcgaaagaaaagccaagcgcactcgggcagtgcagcccttgcgtctcccctccaacaaagcccaagtgaagcccgggcagacatgcagtgtggctggatggggtcagacggctcccctgggcaagcacagccatacgctccaggaggtcaaaatgacggtccaggaagacagaaaatgtgagtctgacctgagacactattatgacagcactatcgaactgtgcgtcggagatcctgagattaagaagacctctttcaagggcgacagtgggggaccactcgtatgtaacaaagtggcccaggggattgtgtcctatggtcggaataatggtatgcctcctagagcatgcacaaaggtaagctcgttcgtacattggatcaagaaaaccatgaagaggtactag

SEQ ID NO: 119003 - DNA, 846 bp, synthetic construct
  misc_feature 1..846: note = Description of Artificial Sequence: Synthetic coding sequence
  source 1..846: mol_type = other DNA
atgaagtccttgagtctcctacacctgttcccactgcctcgggccaaacgtgagcagggcggaaataactcgagcagcaaccagggttccctgcccgagaagatgcaacccatacttctgttattagcctttctgcttctaccaagggccgacgctggcgaaattataggtggccacgaggccaaacctcatagccgtccatacatggcttatctcatgatctgggaccaaaagtctttgaagaggtgcgggggttttctcattagggacgattttgtgttaacggccgcccattgctggggttcaagtattaacgtgacacttggcgcacataacatcaaggaacaggaacctacccagcaattcatccctgttaaaaggcctatcccccatcccgcctataaccccaaaaacttcagcaatgacataatgttgctgcagttagaacgaaaggctaaacgaacccgcgctgtccagccattgcgactaccctcaaataaggcgcaggtgaaaccagggcagacctgttccgtggcgggttggggccagacagctcctctgggcaagcatagccacaccctccaggaggtaaagatgactgtccaggaggaccgcaaatgcgaatctgatttacgtcattattacgacagtactatcgaattgtgcgtcggagaccccgaaatcaaaaaaacttcattcaaaggcgacagtgggggccccctggtatgcaacaaggttgcgcagggcatcgtttcttacggccggaacaacggcatgcctccaagagcatgtacaaaggttagctcatttgtgcactggattaagaagaccatgaagaggtattag

SEQ ID NO: 119004 - DNA, 708 bp, synthetic construct
  misc_feature 1..708: note = Description of Artificial Sequence: Synthetic coding sequence
  source 1..708: mol_type = other DNA
atgcagacatttcctagcggcgagattattggaggccacgaagccaaaccccattccaggccatacatggcctacttgatgatctgggatcagaaatctttaaagagatgtggaggatttctgataagggacgacttcgtgctgaccgctgcacactgctggggctcttccattaacgtgacactaggggctcataatattaaagagcaagaaccaactcagcagttcatcccggtgaagcgacctattccccacccagcctacaatcccaagaactttagtaacgatatcatgctgttacagctggagaggaaggccaaacgcacgagagctgtgcaacctcttaggctaccaagcaataaggcccaggtgaagccgggtcagacctgtagcgtggccggctggggccagacagcccccttgggcaagcatagccataccctgcaggaagtcaagatgaccgtacaggaagatagaaagtgcgaatctgacctgaggcactattatgatagcactattgagctatgcgtgggagacccagaaataaaaaaaaccagctttaagggggactctggtggtcctctggtgtgtaacaaagtagcccaaggcattgttagttacgggcgcaataatggcatgcctcctagagcttgtaccaaagtcagcagtttcgtgcattggatcaagaagactatgaagcggtattag

SEQ ID NO: 119005 - DNA, 483 bp, synthetic construct
  misc_feature 1..483: note = Description of Artificial Sequence: Synthetic coding sequence
  source 1..483: mol_type = other DNA
atgcagcccttcctccttctgttggcatttttactgacacccggagccggcaccgaggagattataggtggccacgaggctaagcctcattctcgaccttacatggccttcgtgcaatttctacaggaaaaatcccgaaagagatgtggagggatactcgttaggaaggattttgtgcttacggctgcccattgtcagggtagctccatcaacgtgacgctgggagctcataacataaaagagcaggagcggacccagcaatttataccggtcaagaggcctatcccacaccctgcgtacaatcctaagaattttagcaatgacataatgctgttacagggggactcggggggtcctctcgtatgtaaagacgtcgcccaaggcatcttaagctatggtaacaaaaaaggcacccctcctggcgtgtatatcaaagtttctcatttccttccatggattaaacggactatgaagcgcctttag

SEQ ID NO: 119006 - DNA, 768 bp, synthetic construct
  misc_feature 1..768: note = Description of Artificial Sequence: Synthetic coding sequence
  source 1..768: mol_type = other DNA
atgcaacccctattgttgctgctggccttcctcctgcccaccggggccgaggctggagagattattgggggtagggagagccggccgcattctcgcccatacatggcctatctccagatccagagtcccgccgggcagagtagatgcggagggttcctcgtgagagaagatttcgtcctgactgccgcacattgctggggttccaatatcaacgttacgctgggtgctcataatattcaacgcagggagaacacgcagcagcacattacagcccggcgcgctatccggcacccccagtataaccaacgcaccattcagaatgacatcatgctccttcagctctcccggcgggtccgccgcaatcggaacgtaaatccagtcgcccttccaagggcacaggagggactccgacctggtaccctgtgtactgtcgctggttggggacgtgtgagtatgcgccgcggcacagatactctgagagaggtgcagctccgcgtccaacgcgacaggcagtgtctgcgcatatttggttcttatgatcccaggcgccagatctgcgtgggtgacaggagggaacgcaaagccgcctttaaaggagatagcggaggccctctgctgtgcaacaacgtggcccacggtattgtttcctacgggaagtcctccggtgtgcctcctgaagtcttcaccagggtcagtagcttcttaccgtggattagaactacgatgcggtccttcaaacttctggaccagatggaaacgcccctctag

SEQ ID NO: 119007 - DNA, 348 bp, synthetic construct
  misc_feature 1..348: note = Description of Artificial Sequence: Synthetic coding sequence
  source 1..348: mol_type = other DNA
atgcagccctttttattgctcctggccttcttgctcacaccaggtgccggtactgaagaaatcattggaggccatgaggccaaaccccatagcaggccatacatggcctttgtacaatttcttcaggagaaaagtagaaagcggtgcggcggtatcctcgtccggaaagattttgttctgacagcagcacattgccaaggacggggggacagtgggggaccgctcgtgtgcaaggacgtggcgcagggaatcttgagttacggcaacaagaaaggtaccccacccggcgtgtatataaaggtctcccactttctcccatggatcaaaagaactatgaaacggctatag

SEQ ID NO: 119008 - DNA, 774 bp, synthetic construct
  misc_feature 1..774: note = Description of Artificial Sequence: Synthetic coding sequence
  source 1..774: mol_type = other DNA
atggaagcctgtgtgagcagccttctcgttcttgccttaggggcattatccgtcgggtcatcattcggcacccagatcatagggggccgggaagtaatcccacactccagaccgtatatggccagtctgcagcggaacggttctcacctgtgcggaggagtcttggtgcatcctaagtgggtgttaacggccgctcactgcctggcccaacggatggcacagctgcgactggtgctgggcctgcacacccttgactctcccgggttgacgtttcatatcaaggctgcaattcaacatcccaggtacaaacccgtacctgccctggagaacgatcttgcattgttgcagctggatggaaaggtgaagccctctcgcactatccggcccctggccctaccgtccaaaaggcaggtcgtcgccgctggcacccgctgcagcatggctggatggggcttgactcaccagggtggtcgtctgagccgagtgttgagagaactggacctccaggtattagatacccgcatgtgcaacaactctaggttttggaacggtagcctcagtcccagcatggtatgtcttgctgcagactccaaggatcaagcgccatgcaaaggcgacagcggagggccgttggtgtgcggtaaaggccgcgtgctagctcgcgtgctgtcctttagctcccgggtttgcacggacatcttcaagccacccgttgctacagccgtcgcgccatacgtttcttggatcagaaaggtgacaggaaggtctgcctag

SEQ ID NO: 119009 - DNA, 3108 bp, synthetic construct
  misc_feature 1..3108: note = Description of Artificial Sequence: Synthetic coding sequence
  source 1..3108: mol_type = other DNA
atggccgcagaaactctaaacttcggacctgagtggctgcgagcgttaagtggaggcggctcagtcgcgtcaccaccgccatcgcctgccatgccgaagtacaagctggcggattaccgatacggcagggaagagatgttggctctgtacgtgaaagagaacaaagtccccgaggaactgcaggataaggagttcgctgccgtgcttcaagacgagcctctccagcctttagctctggaacctcttacagaggaggagcaacgcaattttagtctgagcgtgaatagtgtggccgtcctgagactgatgggcaaaggggcaggcccacccctcgcaggaacctccaggggcaggggcagcacacggtctagaggccggggcagaggggatagctgtttctatcagaggagtatcgaagagggcgacggcgccttcggccgcagtcctagggagatccagcggagccaatcgtgggatgacagaggtgagaggcgctttgaaaagagcgcgcgtagggacggagcccggtgcggattcgaggagggcggagcaggcccaagaaaggagcacgctaggagcgacagtgagaattggcgttcacttcgggaggaacaagaagaggaggaggagggaagttggcgtctgggggcaggcccccgccgagacggagatcgatggaggagtgcgtcccctgacgggggtccgagatccgctgggtggagagaacacggcgagaggcggcggaaattcgagttcgacttgcggggtgacagggggggatgtggagaggaggagggccgcggtggaggtggcagctcccatctcagacgctgccgggcacctgaggggtttgaggaagataaagatggccttcccgagtggtgcctggatgacgaggatgaagagatgggtacattcgacgctagtggtgctttcctcccactgaagaaaggtcccaaagagccaatacccgaagagcaagaacttgattttcaggggctggaggaagaagaggagccaagcgaaggactcgaagaagagggacccgaagctggggggaaagaactcacacccctgccaccccaagaggagaagtccagctcgcccagcccattgcccactctcggccctctgtggggaacgaatggagatggcgacgagaccgcagaaaaagagccaccagctgcggaggatgatatccgaggtattcagctgtctccgggagtaggatccagcgccgggccccctggagatctggaggatgacgagggactaaagcacctgcagcaggaggctgagaagctggtggcctccctgcaagacagctcactggaggaggagcagtttaccgcagcaatgcaaacccagggtctgcgtcatagcgcggccgccacagcgctgccgctgtcacacggggctgcaagaaagtggttctataaggacccccaaggggaaattcaggggccatttaccacacaggagatggccgaatggtttcaggcagggtacttcagtatgtccttactggttaagagggggtgtgacgagggcttccagcccctcggggaagtgatcaaaatgtggggcagagtgcccttcgcacccggcccaagcccgcctcctttacttgggaacatggaccaagagagactcaagaagcagcaagagctggctgctgcagctctgtatcagcagctgcagcaccagcaattcctgcagctggttagtagtcgccaacttcctcaatgtgctttgagggagaaggctgccctgggcgacctgacaccccctccccctcccccccctcagcagcagcagcaacagcttaccgcctttctgcaacagctgcaagccctgaagcccccacggggtggagatcagaaccttcttcctacaatgagcaggtcattgtctgtgcctgactctggccggctgtgggacgtccacacttctgcctctagccagtccggcggggaggctagtctgtgggacatcccgattaatagctcaacacaggggccaatcctggaacagctgcagctgcaacacaagttccaggaacggcgcgaagtcgagctgagggccaagcgcgaagaggaggagaggaagaggagagaggagaagcgccggcagcaacagcaagaagagcagaagcgaaggcaagaagaggaggaactctttcgacggaaacacgtgcggcagcaggagctgctactgaaactccttcagcagcaacaggccgttccagttcccccagcaccctcctctcctcccccgctgtgggcaggcctcgccaagcaaggcttgagcatgaagactttgctggaattacagttggaaggagagcggcagctgcacaagcaaccaccaccaagagagccagccagggcccaagctcccaaccatagagtccagcttggcgggctcggcaccgcccccctcaatcagtgggtaagcgaagctggccctctgtggggaggaccagataaaagcggtggcggctcttccggactgggcctgtgggaagatacgccaaagtccggcggctcattggtcaggggcttaggcctgaaaaatagccggtccagcccgtcactgagcgattcgtattctcaccttagcggcagaccgatacgtaagaaaaccgaggaggaggagaagctacttaaacttcttcaaggaattcctcggccccaagatggatttacacaatggtgcgagcagatgctgcatactctgtccgcgactggctccctggatgttcccatggcggtcgcaatcctgaaggaggttgaatctccttatgacgtacatgactatatccgaagctgtctgggcgataccctggaggccaaagagtttgccaaacagttccttgagagacgggccaagcagaaggcttcacaacaacggcaacaacagcaagaggcttggctatcatccgccagcctgcaaaccgcttttcaggccaatcacagcactaagctgggccctggcgaaggcagtaaagccaagaggagagcactcatgttacatagcgaccctagtatactcggatattcactccacggaagcagtggcgaaattgagtctgtggatgactattag

SEQ ID NO: 119010 - DNA, 2265 bp, synthetic construct
  misc_feature 1..2265: note = Description of Artificial Sequence: Synthetic coding sequence
  source 1..2265: mol_type = other DNA
agttcctttccttcaccgagactcccacaggttttccatcgacttgacgatgaagatgaagagatgggaacattcgatgcatctggggcttttctccctcttaagaaaggacctaaggagccaattcccgaggagcaagagctcgattttcagggtctggaggaagaggaagaaccgtcagagggactggaggaagaagggcctgaagccgggggaaaggaactcacgccgctccctccccaggaagagaaaagctctagccccagcccgctgccaactctggggcctctttggggaaccaatggggatggggacgaaactgctgaaaaagaacccccagctgcagaggatgatattcgcggcatccagctgagcccgggcgtgggctccagcgcaggcccaccaggagaccttgaggatgacgaaggcctcaagcacctgcagcaggaggccgagaagctcgtcgcctctctgcaggatagcagtcttgaggaagaacagttcactgctgccatgcaaactcagggcctgcggcactcggccgcagctactgcactgccgttgagccatggggctgcgcggaaatggttctacaaagatcctcagggggaaatacaggggccttttacaacacaagaaatggccgagtggtttcaggcaggctactttagcatgagtctactggttaaaaggggttgcgatgaaggctttcaacccctgggcgaggtgattaaaatgtgggggagagtcccatttgcaccaggaccatccccacccccattgctcggaaacatggaccaggaacgacttaagaagcagcaggagctcgccgccgccgcgctctaccaacagctccagcaccagcaattcctccagctggtgagttcccgacaactacctcagtgcgcccttcgcgagaaagcagccttgggagatctgacacctcctccgccaccacccccacagcaacagcagcaacaactcacagcgtttctgcagcagctccaggcccttaagccaccacgggggggggaccagaatttgctgcctacgatgagtaggagcctgagcgtgcctgatagtggaagactgtgggacgtgcacacatcagccagcagccaaagcggtggtgaggcgtccttgtgggatattcccatcaactcttccacccaaggcccaatcctggaacagctgcaactgcagcacaaatttcaggagcgacgggaggtggagctgagggcaaaaagggaggaagaagagaggaagcggagggaagaaaagcgccgccagcaacagcaggaagagcaaaagagaagacaggaagaagaagagctttttcgccggaaacacgtgaggcagcaggagctcctgctgaaattactgcaacagcagcaggcagtgcccgtgccccccgcgcccagctcacctccacctctgtgggcagggctggctaaacaaggcctgagtatgaaaactctcctcgagctgcaattggaaggtgaaagacaacttcacaaacagcccccacctcgagaaccagccagagctcaggccccaaaccatagagtccagctggggggcttaggcactgctcctctcaaccaatgggtttcagaggctggccccctctggggtggtcccgataaaagcggcggaggaagctcaggattgggactgtgggaggatacaccgaagagcggaggcagcctcgtgagagggctagggctcaagaacagcaggtctagtccctctctgtccgattcttacagtcatctgagcggaagacccatacgcaaaaagaccgaggaggaagaaaaacttctcaaactgttacaggggatacctcgtcctcaagacggtttcacccaatggtgcgaacagatgctacacacactgtccgctaccggtagcctggatgtacctatggcagtagcaatcttaaaggaagtggagtcaccgtacgacgtgcacgattatatcaggtcttgcctgggcgacacattagaagccaaagagtttgcaaaacagtttctggagaggagggctaaacagaaagcatcccagcagcggcaacagcagcaggaggcctggttatctagcgcctcccttcagactgcctttcaagcgaatcattcgaccaagctcggaccgggggagggctctaaagccaagaggagggcgttaatgctccacagcgacccctctattctcgggtacagtctgcacgggtccagcggtgaaattgaatccgtggatgactactag

SEQ ID NO: 119011 - DNA, 3900 bp, synthetic construct
  misc_feature 1..3900: note = Description of Artificial Sequence: Synthetic coding sequence
  source 1..3900: mol_type = other DNA
atggccgcagaaactcaaacactgaattttggccccgaatggctgcgcgctctctcgtccggtggatccattacaagcccccctttgagtccggccctgcccaaatataaactcgccgactaccgctacggcagggaggaaatgcttgccctttttctcaaggataataaaatcccttccgatcttcttgacaaggagttcctccccatccttcaggaggaacccttaccccccctggccttggtaccctttaccgaagaggaacagcgcaatttctcaatgagtgtgaattcagcagccgtcttgcgtttgacgggcaggggaggcgggggcactgtagtgggggcccccagggggcgtagctcttcaagaggaaggggaaggggcagaggcgaatgtggattttaccagaggagttttgacgaagtggagggcgtgttcgggcgcgggggggggcgtgaaatgcatcgctcccagtcctgggaggagcggggcgatcggaggttcgagaagccgggaagaaaggatgtgggaagacccaacttcgaggaaggagggccaaccagtgtaggccggaaacacgaatttatcagatctgagagcgaaaactggcgaatatttcgggaagagcagaacggggaagatgaggacggaggatggcgcttagccgggagccggcgagatggtgagagatggcgccctcatagcccggatggtcccaggtccgctggttggagggagcacatggagcgtcgacggagatttgagttcgatttcagagacagggatgatgagagagggtaccgccgcgtacgctctggttcaggctcgatagacgacgatcgggattccttaccggaatggtgtctcgaagacgcagaggaagaaatgggtactttcgattcatctggtgcattcctgtccctgaagaaagttcagaaagaaccaatcccggaggagcaggaaatggacttcagacctgttgatgagggtgaggagtgtagcgactcagaggggagccacaatgaggaggccaaagagcctgataaaacgaataagaaggaaggggaaaaaacggaccgcgtcggagtagaggcatcagaggagacaccccagactagctcatcatccgctaggccgggtacaccatctgaccatcagagccaggaagcatcacagtttgagcgtaaggatgagcccaaaaccgaacagacagaaaaggccgaggaagagacaagaatggagaactccctgcccgctaaggtgccaagcagaggcgatgagatggtggcggatgtacagcaaccccttagccagattcctagcgacacagccagcccgcttctcattctcccccctcccgtgcctaacccatcgcctacgttaagacccgtcgaaacaccggtggtgggtgccccgggtatgggttctgtcagcacagagcccgatgacgaggagggtctgaaacatctcgagcaacaggctgagaaaatggtggcgtaccttcaggatagtgccctggatgatgaacggctcgcttcaaaattgcaggaacatcgcgccaagggcgtgtccatccccctcatgcacgaagccatgcagaaatggtactacaaagacccacaaggcgaaatccagggcccctttaataaccaggagatggccgagtggttccaggcaggttacttcacaatgagtttgctcgtgaagagggcttgtgatgaatccttccagcccctgggagatatcatgaaaatgtggggccgagtgccatttagtcccggccctgcaccacctccacatatgggagagctcgaccaggaaagattgacgcggcagcaggaactaactgccctttaccaaatgcaacacctccaataccaacaatttctgatccagcaacagtacgcccaggtgctggcgcagcagcagaaggcagccctgagttcacagcagcagcagcagcttgccctgctgctgcaacagtttcaaaccctgaaaatgcggatcagcgaccagaatattatcccctccgtgaccagatcagtctcggtcccagacacgggatctatctgggaattacaacctaccgccagccaacctacagtatgggagggcggatccgtgtgggatctacctttagacaccaccactcccggaccagccttagaacagctgcagcagttagaaaaagcaaaggctgccaaactcgaacaggagcgtcgcgaagccgagatgagggctaagcgcgaggaggaggaacgaaagcgtcaggaggaactcagacgccagcaagaagaaatacttaggagacaacaagaggaggagcgtaagaggcgtgaagaggaagaactggccaggcggaagcaggaggaagctttgagacgtcagcgggagcaagaaattgccctccggagacagcgcgaggaggaagagagacagcaacaggaagaggcccttagaaggcttgaggagaggcgtagggaagaagaggaaagaagaaaacaagaggaacttcttcgcaagcaggaggaggaagcagcaaagtgggcacgggaggaggaagaggctcagcgacggctggaagaaaatcgtctgcgaatggaggaagaagccgcacgtctccgccacgaggaagaagaacgcaaacgcaaagagctagaggtacagcgccagaaggaactgatgagacaaaggcagcagcagcaggaggccctgagacgcctccagcaacagcaacagcaacagcaattggctcagatgaagcttccatctagctctacctgggggcagcagagcaacactaccgcttgccagtctcaggcgaccctgtctctcgctgagatccagaaactggaggaagaaagggagagacagttaagagaggaacagcgtcgccagcaaagggagttaatgaaagccctccaacagcagcagcagcagcagcagcagaagctctccggatgggggaacgtgtcaaagccaagcggtaccactaagtcactgcttgaaatccagcaggaggaggctaggcaaatgcaaaaacagcagcagcagcaacagcagcaccagcagccaaatagggccagaaataacacccacagtaacctgcacaccagcatcgggaacagcgtctgggggtctattaacactggccctccgaatcagtgggccagcgacctggtgtcaagtatatggtctaatgcggacactaagaactcgaacatgggattctgggacgatgctgtgaaagaggtcggaccaaggaacagcactaataaaaacaaaaacaacgccagtcttagtaagagcgtaggcgtgtccaaccgccagaacaagaaggtggaagaagaggagaagttactgaagctgtttcaaggggtgaacaaggctcaagacggatttacccagtggtgcgagcaaatgctgcacgccctgaacaccgccaacaaccttgatgtccccacattcgtgagtttcctgaaggaggtcgagagcccatatgaggtgcacgactatatacgtgcctatcttggagacaccagcgaggcaaaagaatttgccaagcaatttttggaacggagagccaagcagaaggccaaccagcagcgtcagcaacaacaattgccacagcagcaacaacagcaaccacctcaacaacccccacaacagcctcagcagcaggattcagtttgggggatgaaccactcaacactgcattcagtctttcagaccaaccagtctaacaaccagcaaagcaatttcgaagccgtgcaatctggaaagaagaagaaaaagcagaaaatggtgagggcggaccctagcctgctgggttttagcgtcaatgcatctagcgagcgccttaacatgggtgaaattgagacacttgatgattactag

SEQ ID NO: 119012 - DNA, 3966 bp, synthetic construct
  misc_feature 1..3966: note = Description of Artificial Sequence: Synthetic coding sequence
  source 1..3966: mol_type = other DNA
atggcggccgagacacaaaccctgaacttcgggccagagtggcttagggccctcagcagtggtggctccatcacgagcccacccctgagccccgcccttcctaagtataaactggccgactacagatacgggagggaggaaatgctggccctgtttctaaaagacaacaaaatcccctccgaccttctcgataaggaattcctccccatcctgcaagaggaacctctgccacctttggccctggtgccatttacagaggaggagcagagaaacttctccatgagtgtcaatagtgccgccgtactgcgcttaaccgggaggggcggcgggggaaccgtagtgggagccccaagggggcgaagctcctcacgtgggagaggacgtggccgcggggaatgcggattttatcagagatcttttgatgaggttgaaggcgtcttcgggagggggggcgggagggagatgcatcgcagccagagctgggaggagagaggggacaggaggtttgaaaagcccgggcgtaaagacgtcgggaagaagaacggttattattgcatgtatagccctgtcctgctgctgggccagcctctttgccaaggtaggcccaacttcgaggaaggcgggcctacgagcgtggggcgcaaacacgaattcatccgaagtgagtcggagaattggagaatctttcgagaagagcagaacggagaggacgaggatggcggctggcgtctagccgggagccggcgagacggcgagaggtggcgccctcacagtcccgatggaccgaggtccgctgggtggagggaacacatggaacggaggaggcggttcgaatttgatttccgggaccgcgatgacgagcgaggataccggagagtgcggtcaggctccgggtctattgacgatgaccgagatagtctcccggaatggtgcttagaagacgctgaagaggaaatgggtacctttgacagctctggcgccttcctgtctctgaagaaggtgcaaaaggaaccaattccagaagaacaagaaatggattttcgcccagttgatgaaggagaagaatgctccgatagcgagggttctcataatgaggaggctaaagagcctgacaagacaaacaaaaaggagggcgagaagactgaccgcgtgggcgtcgaagcctccgaggagacaccacaaacttcgtcttcatcagctcgccctggcacaccgtctgaccatcagtcacaggaagcgtctcaatttgaaaggaaagatgagcccaagaccgaacagaccgagaaagccgaggaggaaactcgtatggagaattcactaccagctaaagtcccttctcgaggcgacgaaatggtagccgatgtccagcagcccctgtcccagattccctccgatacggcctcccccctcctgatactccccccaccagtgcccaacccatctccaacattgagacctgtcgagacacctgtggttggggcccccggaatgggaagcgtgtctacagagccggatgatgaggaagggcttaagcacctggaacagcaagcagaaaagatggtggcctatctgcaggattccgccttggatgatgagcgcctggcgtctaagctccaggagcaccgagccaaaggagtttctatcccgctcatgcacgaggcaatgcagaagtggtattacaaggacccccagggcgagatccaggggccgtttaataaccaagagatggctgaatggtttcaggccggttactttacaatgagtctgttggtcaaacgtgcctgtgacgagagcttccagcccctgggtgacatcatgaagatgtgggggcgggtgcccttctcccctggccccgcaccaccgccccatatgggcgagctggatcaggagcggttgaccagacagcaggagttaacagccctgtaccagatgcagcatctgcagtatcaacagtttttgatccagcagcagtatgcccaggtgctggcccagcaacagaaagcagcgttatcctctcagcaacagcaacagctggccctgctcctccagcagtttcaaacactgaagatgaggatctctgatcagaacattatcccgtctgtgacccgttccgtcagcgtcccagacactggctcaatctgggagttgcagcctaccgcatcacaaccgacagtgtgggaggggggaagtgtttgggatctgccccttgacactacaacccctggccctgccctcgagcagctgcaacagttggagaaggccaaggctgctaaacttgagcaggagcgccgcgaagcggagatgagagcaaagcgagaagaggaggagcgcaaacggcaagaggaactgcgtaggcagcaggaagagatacttcgtcgccagcaggaagaagagcggaaacgtcgggaggaggaggaactggctcgccgaaagcaggaagaagccctccggcgccagagagaacaggaaatcgcgctgcggcggcagagggaggaggaggagcgtcagcagcaggaagaggcccttaggcgactggaggagaggcggcgtgaagaagaggaacggcggaagcaggaggaactgctcaggaagcaggaggaggaagcggctaaatgggcccgcgaagaggaagaggctcagcggcgactggaggagaatcggctgcggatggaagaagaggccgctcgcctgcggcacgaagaggaagaacgaaaaagaaaagagttagaggtccagcgtcagaaggaactgatgcggcaacggcaacagcagcaagaagccttacgaagactccagcagcaacaacagcagcagcagctggcccaaatgaagttgcctagttccagcacatggggtcaacagagtaacacaacagcatgtcagtcgcaggccacactctctctggccgagatccaaaagttagaagaagagcgggagaggcagttgagggaagaacagcgcagacagcaacgggaactgatgaaggcactccaacagcagcagcagcaacaacagcagaagctcagcggatgggggaacgttagtaaacccagtggcactacaaagtctctgctggagatccagcaggaggaagccagacagatgcaaaagcagcagcagcagcagcaacagcaccagcaacctaatagggcccgaaacaacacacattctaatctgcacaccagcatcgggaacagcgtgtggggctctatcaacacgggccctcctaaccagtgggcgtcagacctggtgtcctctatctggtccaacgcagacactaagaatagtaacatgggcttctgggatgatgcggtaaaagaagtggggcctcgaaattcaaccaacaaaaacaagaataatgcctccctgtccaagtctgtaggtgtctcgaataggcagaataagaaggtggaagaagaagaaaaactcctgaagctgttccagggagttaataaggcccaggacggattcacccaatggtgcgaacaaatgcttcacgcgctcaacaccgccaataacctggatgtgccaacgtttgtcagcttcttgaaagaggtggagtccccatatgaagtacatgattacatacgggcatatctgggcgatacatctgaggccaaggagttcgccaaacagttcctggaacgtcgagcgaaacaaaaagcgaatcagcagcggcagcagcagcagctgcctcagcaacagcagcagcagccgccccagcagcctccacagcagccgcagcaacaggattccgtgtggggcatgaaccattccacgctgcactcagtgttccagactaatcagtcaaataatcagcagtctaacttcgaggcggttcagtccggtaagaagaaaaaaaagcagaagatggttcgagccgacccatccctgcttggattttctgtgaatgctagctccgagcggctgaacatgggtgaaattgaaaccctcgacgactattag

SEQ ID NO: 119013 - DNA, 3966 bp, synthetic construct
  misc_feature 1..3966: note = Description of Artificial Sequence: Synthetic coding sequence
  source 1..3966: mol_type = other DNA
atggcagcagagactcagaccctcaacttcggtccggagtggcttcgcgctctgtcttctggaggctccatcacgagtccgccactgagcccagcactgcccaagtacaaactggcagactaccgatatgggcgcgaggagatgctagctttgttccttaaagacaacaaaattccaagcgatctgctggataaggagttcctccccatcctccaggaagagcctctgcccccgcttgctttagttccctttacagaagaagaacagcgtaacttttccatgagcgtgaattccgcagcagttctgcgccttacaggaaggggcggcggcggcaccgtagtaggcgcccctcggggcagaagcagcagtcgagggcgtggtagagggcgcggagagtgcggcttttatcagcgtagcttcgacgaggtggaaggagtgtttggcagggggggtggacgggaaatgcaccgtagccagtcttgggaggagcggggtgacagacgattcgaaaaacctgggcggaaggacgtgggtaagaaaaatggttattattgtatgtactctccagtcctgctgcttggtcagccactttgtcaaggccggccaaacttcgaagagggcgggccaacatctgtgggaagaaagcatgagttcatccggtctgaatccgagaattggagaatttttagagaagagcagaacggcgaggacgaggacggagggtggcggcttgcggggtccaggcgggacggtgaaagatggaggccacattcaccggacggccctagatctgccggctggcgggagcatatggaaagacgaagaagatttgaatttgacttcagggatcgggatgatgagcggggttatcgtcgggttaggtcgggctccgggtctatcgatgacgacagggactcgctccccgaatggtgtctggaagacgctgaggaggagatgggcactttcgacagctccggggctttcctcagtttgaaaaaagtccaaaaagagcccattcctgaggaacaggaaatggattttaggccggttgacgagggagaggagtgtagtgattccgagggttcccacaacgaggaagccaaggaacccgataagaccaataaaaaggagggggaaaagacagaccgcgtgggggtcgaggcaagtgaagagactcctcagactagcagcagcagcgcaaggcctggaacaccctctgaccaccagagtcaggaagcctctcaattcgaaaggaaagatgaaccgaagaccgagcagacggaaaaagccgaggaggagacgaggatggagaacagccttcccgccaaggtgccttccagaggggatgagatggtcgcagacgtgcaacagcctctgtcccagatcccatccgatacggcttccccactgttaatattgcctccacccgtgccgaacccttctccaaccctgcgtccagtggagaccccggtggtcggtgccccagggatgggatcagttagcacagaacccgatgatgaggagggactgaaacatctggagcaacaagccgagaaaatggttgcctacctccaggacagcgccctggacgatgagcggctggcctctaagctccaagagcatagagctaagggagtgtctattccactgatgcacgaggcaatgcagaagtggtactacaaagacccccagggggagattcagggcccatttaacaaccaggaaatggccgagtggtttcaggcggggtatttcacaatgtcgttattagtgaaacgcgcttgcgatgaaagttttcagcccctgggcgacataatgaagatgtggggacgggtgccattctctccaggtcctgctccccctccccacatgggcgagttagatcaggagcgacttacccgccagcaggaattgaccgctctgtaccagatgcagcacctgcagtatcaacagtttttaatccagcagcagtacgcccaggtcctcgcgcagcaacagaaggcagcactatcctcacaacagcagcagcagctcgctctcctgctgcagcaattccagacattgaagatgcggatctcggaccaaaatatcattccatctgtgacccgcagcgtgtccgtccctgataccgggtcaatttgggaacttcagcccaccgcctcccagcccaccgtgtgggaggggggctccgtgtgggatttaccactggatacaaccactcctgggcctgcgttggaacagctccagcaacttgagaaagccaaggccgctaagctggagcaagagaggagggaagcggagatgcgagctaaacgcgaggaggaagaaaggaaacggcaagaggagctccggcgacaacaggaggagattttaaggcgacagcaagaggaagagcgtaagcggcgggaagaggaggagctcgcccgcagaaaacaagaagaggccctcaggaggcaaagggagcaggaaatcgcattgcgacgccagcgggaagaggaggagcgccagcagcaggaagaggctctgcggcggctcgaggagaggcgccgcgaggaggaagaaaggcgcaaacaggaggaactattgagaaagcaggaagaggaggccgccaagtgggctcgtgaagaagaggaggcccagaggcgactcgaagaaaataggcttagaatggaagaagaggcggccagacttcgacatgaagaggaggagagaaagcgcaaggagctggaagtgcagcggcagaaagagcttatgagacagcggcagcagcaacaggaggccctgaggagactgcagcaacagcaacagcagcagcagctggctcaaatgaagctgccatctagctctacctggggccagcagtcgaacaccacggcatgtcagtcacaggctacattgtctttagccgaaattcagaagttggaagaggagcgagaaagacaacttcgagaggaacagagaagacagcagagagagctgatgaaggcgttacagcagcagcagcagcagcaacagcagaagctctctgggtggggaaatgtgtcaaaaccttcaggtacgactaagagtttattggaaattcaacaggaggaagctagacagatgcaaaagcagcagcagcaacaacagcagcatcagcagcctaaccgagcaagaaacaacacccacagcaatcttcacacttctataggaaatagtgtctgggggagcataaacacaggcccaccgaatcagtgggctagtgacctggtcagttcgatttggtcaaatgccgacaccaaaaattctaatatgggcttctgggatgatgccgtaaaagaggtagggccacggaacagtacgaataagaacaagaataatgcttccctgtctaaaagcgtcggcgtgagcaataggcagaacaagaaggtggaggaagaagagaaactgttaaagctgttccagggggtcaacaaagcccaagatggattcacgcagtggtgtgaacaaatgctgcacgctctcaataccgctaataacctagacgtcccaacgttcgtttctttcttaaaggaggttgaatccccctacgaggttcacgattacatcagggcctacctgggcgacacctctgaggcaaaggagttcgccaagcagtttctggagcgccgagccaaacagaaggctaatcagcaaaggcagcaacagcaactaccgcaacaacagcagcaacagcccccccagcagcctccccagcagccgcaacagcaggacagcgtctgggggatgaaccatagcaccctgcatagcgtgttccagaccaatcaaagtaacaaccaacagtctaacttcgaagccgtgcagtccggaaaaaagaagaagaaacagaagatggtgcgggcagacccatcgctgctaggcttttcagtgaacgccagtagcgagcgactgaacatgggtgagattgagactttggatgattactag

SEQ ID NO: 119014 - DNA, 3900 bp, synthetic construct
  misc_feature 1..3900: note = Description of Artificial Sequence: Synthetic coding sequence
  source 1..3900: mol_type = other DNA
atggcagccgagacgcagacactgaattttggccctgagtggcttcgcgccctgtctagcggcgggtccataaccagtccccctctcagcccagctcttcccaagtataagctggctgattataggtacggccgcgaggagatgctggccctgtttctcaaggacaacaagatcccatcagacttgctggataaagagttcctgccaattctccaggaggagcctcttccaccattggctctggtccctttcactgaggaggaacagcgtaatttttctatgagtgtgaattccgctgcagtcctgcggctgacgggtaggggaggcggcggcaccgtggtcggcgcacctcgggggcggagctcctcccgcggacggggcaggggacgcggtgagtgcgggttttaccagcgcagctttgacgaggtcgaaggcgtgtttggtcgcggcggtggtagagagatgcaccggtcccagtcttgggaggagcgtggagatagacggttcgaaaagcccggccgcaaagacgtcggaaggcccaattttgaggaaggtgggcctaccagcgtcggacgtaaacacgagtttattcggtccgagagcgagaattggcgcatcttccgagaagaacagaatggtgaggatgaggacggaggctggcgactggccggttctcgtcgcgatggagagagatggcggccacattcacccgacggcccaaggtctgccggctggagagaacatatggaaagacggcgacgctttgaatttgatttccgcgatcgagacgacgagcgagggtatcgccgggtacggagcgggagcggctccattgatgatgatcgcgacagtttgcccgagtggtgcctggaggacgccgaggaggagatgggtacatttgactccagcggcgccttcctctcacttaagaaggtccagaaggaacctataccagaagaacaagaaatggatttcagaccggtagacgagggggaggaatgttctgatagtgaggggtctcacaacgaagaggccaaagagcccgataagaccaacaaaaaggagggggagaagaccgaccgggtcggggttgaagcctcagaggagactccgcagaccagttcgtcttctgctcgaccaggcaccccatcagaccatcagtctcaggaggccagccaattcgaaaggaaggacgaaccaaagaccgaacaaactgagaaggctgaggaagaaaccaggatggagaactccctcccagccaaggtgccctctcgtggcgatgaaatggttgcagatgtccagcagccattgagtcagatcccatctgacacggcttcaccactgctgatcctgccaccgcctgtacctaatccaagccccactttgagacctgtcgaaactcccgtcgtgggagccccgggcatgggcagtgtcagcacagaacccgacgatgaagagggactcaagcatctggagcaacaggcagagaaaatggtcgcctatctgcaggattccgcccttgacgatgaacggctggcctccaagctccaggaacaccgtgcgaaaggtgtgtccatacctctaatgcatgaagctatgcagaaatggtattataaagacccgcaaggggaaattcaaggccccttcaataatcaggagatggctgagtggttccaagccggctactttacaatgtcactgctggttaaacgcgcatgtgacgaatcgtttcaacctctgggcgatatcatgaaaatgtggggccgcgtaccattttcaccggggcctgcccctccccctcacatgggggaattggatcaagaaagactgacacgccagcaggaactgacagccctctaccagatgcagcaccttcagtatcaacagtttcttattcagcagcagtatgctcaggttttggcacaacagcagaaggccgcactctcctctcagcagcagcaacagttagcgctcctcttacaacaatttcaaaccctgaaaatgagaattagtgatcagaacatcataccgagcgtgacaagaagtgtcagcgtgcctgataccggcagtatctgggagctccagcccactgcaagtcagccaaccgtgtgggagggagggtcagtttgggatcttccactcgacaccaccactcccggcccagccctcgagcagctccagcagttagaaaaggccaaagccgctaagcttgaacaggagaggagggaggcagagatgagagcaaagcgggaagaggaagagagaaagcggcaggaggagctgcgtcggcagcaggaggaaatcctcaggcggcaacaggaagaagagcggaagaggcgagaggaagaggaactggccagaaggaagcaggaggaggccttacgcaggcagagggagcaagaaatcgctttgcgtaggcaaagggaagaagaagagcgccagcagcaggaagaagcccttcggagactggaagaacgcaggcgcgaggaagaggaacgtcggaaacaggaagaacttctccgaaagcaagaggaggaggctgcaaagtgggcacgggaggaggaagaggcccaacgccgccttgaggagaaccgtctaaggatggaggaggaggctgcaagactgcggcatgaagaagaagagcgcaagcgtaaggagctcgaagttcagcgacaaaaggagctgatgcgtcagaggcagcagcaacaggaagcgctcaggaggctgcagcagcagcagcagcagcagcagctggctcagatgaagctgccgagctctagcacttggggtcaacagagcaatacaacagcttgtcagagtcaggccaccttgtccctagccgagatccagaaattggaggaggaaagggagcggcaactccgagaggaacagagacgccagcaacgcgaactgatgaaagccttgcagcagcagcaacagcagcagcaacaaaagctgtccgggtggggtaacgtgtccaaaccctccgggacaaccaaatccctgctggaaatccagcaggaggaagccagacagatgcagaaacaacagcaacagcaacagcagcatcaacaacccaaccgggcccggaataatacccactcaaatctgcacacctctattgggaactctgtgtgggggtctatcaataccggtcctccaaaccagtgggcctcagacctagtgtccagtatctggtctaatgcagataccaaaaatagtaatatgggtttctgggacgacgccgttaaggaagtgggccccagaaattccacaaataaaaacaagaacaatgcctccttaagtaaaagcgttggggtatcaaatcggcaaaacaaaaaggtggaagaggaggaaaagctgttgaagttgttccagggtgttaacaaggctcaggatggctttacccagtggtgtgaacaaatgcttcacgccctaaatacagccaacaacttagacgttcccacgttcgtttcatttcttaaggaagttgagagcccatacgaagtgcatgactacatcagggcgtatctgggggatacctctgaagctaaggagttcgcgaaacagtttctcgagcgacgggccaaacagaaggccaaccagcagagacagcagcagcagctccctcagcagcagcaacagcagcccccacagcagcctcctcagcagccacaacagcaggattctgtctggggaatgaaccactcaaccttacactccgttttccaaacaaatcagtctaataatcaacagtcgaattttgaagccgtgcagagcggcaagaagaagaaaaagcaaaaaatggttagggcagacccttccctgctggggttctccgtcaatgcctcaagtgaacgcctcaacatgggtgagattgagacgctggatgactattag

SEQ ID NO: 119015 - DNA, 2163 bp, synthetic construct
  misc_feature 1..2163: note = Description of Artificial Sequence: Synthetic coding sequence
  source 1..2163: mol_type = other DNA
atggcggccgagacccagaccctcaattttgggccggagtggctgcgcgccttgtcgtccgggggctcgattacctccccacccctgtctcctgccctgccaaagtacaagttggccgattaccggtatggacgtgaggaaatgttggcccttttcctgaaagataacaaaattccatccgacctgctggataaggaattcctccccattttgcaagaggaacccctgcctcccttggcccttgtcccctttacagaggaggagcagagaaacttttccatgagtgtaaattcagctgctgtgctccggctcacaggtagggggggaggggggacagtggtcggggcccctagggggcggagcagttcgaggggtcgtgggaggcccaattttgaagaaggagggcccacgtccgtaggcagaaagcacgagtttattcgtagcgagtccgaaaattggcgaatatttcgggaagagcagaatggtgaggatgaagatggggggtggaggcttgcgggcagtagaagggatggtgaacgatggcgaccccactctcccggctggagggagcacatggaacgtcgtaggagattcgagttcgattttagggatcgcgacgacgagaggggctaccgcagagtgcggtcaggctcaggttcaattgacgacgatcgcgatagcctgccagaatggtgtctggaggatgcagaggaggagatgggcactttcgatagctcaggagcttttctctccctgaagaaggtccagaaggaacctattccagaagaacaggaaatggacttcaggcccgtggacgagggagaagaatgttctgattctgaagggagccacaacgaggaggctaaggagccagacaagaccaacaaaaaagaaggggagaaaacggacagagtaggggtggaggcctccgaggagactccccagacatcctccagttctgcgcggcctggcactccaagcgaccaccaatcacaagaggccagtcagttcgagaggaaagatgaacccaaaactgaacagaccgaaaaggcagaggaagagactcgcatggagaacagtctcccggccaaagttccatcgaggggcgacgaaatggtggccgacgttcagcagccattgtctcagattccctccgacaccgccagtcctctgctgatactgccaccaccagtgcctaaccctagcccaaccctcaggcctgtggagactcccgttgtcggcgctccagggatggggagtgtgtccaccgagcccgatgacgaggagggcctcaagcatttagaacagcaggcagagaaaatggtggcgtacctgcaagattcagcactcgacgacgaaaggctcgccagcaaactgcaggaacacagggcaaagggtgtcagcatcccgctaatgcatgaggcgatgcagaaatggtattacaaagacccccaaggtgagattcaggggcctttcaataaccaggagatggccgagtggtttcaggcagggtattttacaatgtccctcctggttaaacgagcgtgtgatgagagttttcagccactgggtgacatcatgaaaatgtgggggcgggtgccattctcccccggccccgctccccccccacatatgggggaactggatcaggaacgcttgacacgtcaacaggagctgacagcactgtatcaaatgcagcatctccaatatcagcagttcctgattcagcaacagtacgcacaggtgctggctcaacagcagaaagctgcattgagttcccaacagcaacagcagcttgccctgctgcttcagcagttccagaccttgaagatgagaattagcgaccagaatattattccatccgtcacaagatcagtcagtgtaccggatacaggcagtatctgggaactgcagcctactgcttcacaacccactgtgtgggagggtggctcagtttgggacctaccactcgataccaccactcccggcccagctctcgaacaactgcaacaactggagaaggccaaggcagctaagctcgagcaggagcgccgggaggccgagatgcgagctaaaagagaggaggaggagagaaagcgccaggaggaactgcggcgccagcaggaggagattcttcgcagacagcaggaagaagaacggtag

SEQ ID NO: 119016 - DNA, 282 bp, synthetic construct
  misc_feature 1..282: note = Description of Artificial Sequence: Synthetic coding sequence
  source 1..282: mol_type = other DNA
atggccgcagagactcaaacgttgaattttggccccgagtggctgagggctctgagttccggaggcagcattacctcccctcccctgagcccagcactgccaaaatataaattggcagattatagatatggtagggaggagatgctggctcttttcctgaaagataacaagattccttctgatctgcttgataaggagttccttccaattctgcaggaggaacccctcccccccctggcactcgttcctttcaccgaagaagaacagcggaacttctcttag

SEQ ID NO: 119017 - DNA, 303 bp, synthetic construct
  misc_feature 1..303: note = Description of Artificial Sequence: Synthetic coding sequence
  source 1..303: mol_type = other DNA
atggccgcggagacccagaccctcaactttggtcccgagtggctgcgggctctaagtagcgggggctctattacatcccctcccctcagccccgctctgccgaagtacaaactggccgactacaggtacggccgcgaggagatgctcgccttattcctaaaagataacaaaattccgtccgacctgcttgacaaggaatttttgccgattctgcaggaagagccactgccgccacttgccctggtgcctttcaccgaggaagagcagaggaatttcagcatgagcgtgaactccgctgcatag

SEQ ID NO: 119018 - DNA, 42 bp, synthetic construct
  misc_feature 1..42: note = Description of Artificial Sequence: Synthetic coding sequence
  source 1..42: mol_type = other DNA
atggcagcggaaacacaaactctgaatttcggtccggagtag

SEQ ID NO: 119019 - DNA, 348 bp, synthetic construct
  misc_feature 1..348: note = Description of Artificial Sequence: Synthetic coding sequence
  source 1..348: mol_type = other DNA
atggccgctgagacacagactctcaacttcggccctgaatggctccgagcgctttcttctggaggttccattacctcccccccattaagccccgctctgcccaagtataaacttgctgactaccgatatggacgggaggaaatgctggcgctcttccttaaggacaataagatcccttccgatctgctggataaagagtttctgccgatactgcaagaggagccactcccaccattggcccttgttccctttaccgaggaagaacagaggaacttttccatgtctgtaaacagcgccgcagtgctgcgtctcaccggtcggggaggtggagggaccgtggtgggctag

SEQ ID NO: 119020 - DNA, 321 bp, synthetic construct
  misc_feature 1..321: note = Description of Artificial Sequence: Synthetic coding sequence
  source 1..321: mol_type = other DNA
atggccgctgaaacacagactttgaatttcgggcccgagtggctgcgcgccctgagcagtggcggaagcatcacctcaccgcccctgagtccggcgttacctaagtacaagctggctgactaccgttacggaagagaggagatgctggccctgtttcttaaggacaacaaaatccccagcgacttgcttgataaagagttccttcccatcctacaggaggagccgctccctccgctggccctcgttcctttcaccgaagaagaacaaaggaatttctccatgagcgtgaacagcgccgctgtcttgcggctcaccggatag

SEQ ID NO: 119021 - DNA, 342 bp, synthetic construct
  misc_feature 1..342: note = Description of Artificial Sequence: Synthetic coding sequence
  source 1..342: mol_type = other DNA
atggctgccgaaacccagacactcaacttcgggcctgaatggctccgtgccctgtcatctggcggctccataacgagtccccccttgtccccagcccttccgaaatacaagttggctgactatcggtacggacgcgaagaaatgttggcactgtttctgaaggacaataaaataccgtctgatctcctggataaggagtttttgcccatcctgcaggaagaaccacttcctccgctggcccttgtcccattcaccgaagaagagcaaagaaatttcagtatgtccgtcaattccgccgcagttctgagactaaccggacggggcggaggaggcacagtctag

SEQ ID NO: 119022 - DNA, 2619 bp, synthetic construct
  misc_feature 1..2619: note = Description of Artificial Sequence: Synthetic coding sequence
  source 1..2619: mol_type = other DNA
atgaccaagctccccgacgatcccggtagacctaactttgaggagggagggccaacctctgtcggcagaaagcatgaattcattcggtcagaatcggagaattggcgcatctttagggaagaacaaaacggggaggacgaagatggcggatggaggctggccggctcgcgccgggacggtgaacgctggcgaccccactcacccgatggcccacgttcagccggctggagagaacacatggaaaggagaaggcggtttgagttcgatttccgagatcgcgacgacgagaggggctatcggcgggtgaggagtggctccggtagtattgacgacgatcgggattccctgcccgaatggtgcctagaagacgctgaagaggaaatggggacttttgactctagcggggcattcctctcgttgaaaaaggttcagaaagaacctatcccagaggagcaggagatggatttccgcccagtggacgaaggtgaagaatgctcggacagtgagggatctcacaacgaggaggcaaaggagcccgacaagaccaataagaaggagggggaaaagacagaccgcgtgggcgtggaggccagtgaggagacaccccaaacatcctcgagctccgccaggccaggaactccctctgaccatcagtcccaggaagcttcccagttcgaaagaaaggacgagcccaaaacggaacagacagaaaaagccgaggaggagacacgcatggagaactccctgcctgccaaggtgcccagcaggggagacgagatggtggccgatgtccagcagcccctttcccagatcccctcggacaccgccagcccactactgattctcccccctcccgtgcccaacccatcccctacactgaggccggtagagacacccgttgtgggtgcgcccggcatgggtagcgtgagcacagagccggatgacgaagaaggcctgaagcacctggagcaacaggcggaaaagatggtggcttatttacaagactccgcactcgatgacgagcgtctggcatctaagctccaggagcaccgggcaaagggcgtgagcatcccactcatgcatgaagccatgcaaaagtggtactataaagatccccagggagaaattcagggcccattcaataatcaggagatggctgagtggttccaggctggctactttaccatgagtctattggtaaaacgcgcatgtgatgaatcatttcagccattaggagatatcatgaagatgtggggcagagtcccatttagtccaggccccgcaccccctccgcacatgggagagcttgatcaggaaagacttacacgacagcaggaactgactgccctttaccagatgcaacacctgcagtaccagcagttcctgatccagcagcagtatgcccaggtgctggcacagcaacagaaagccgccctcagcagccagcaacagcagcagcttgctttgctcctccagcagttccagactcttaaaatgcgcatttccgatcagaacataataccgtccgtgacacggtccgtctcggtgccagacactgggtctatctgggagctgcagcccacagctagtcagccaacagtgtgggaaggcggcagcgtatgggatctgccgctggataccacaacccctggaccagccttggaacagcttcagcagctcgagaaagccaaggcggcaaagctcgaacaggagcgacgcgaggcggaaatgagggccaaacgggaggaagaggagagaaaacgtcaagaagagctgagacggcagcaggaggagatcctgaggcgtcaacaggaagaggagcgaaagcgtcgagaagaagaggagcttgcgagaaggaagcaggaagaggctctacgccgccagagagagcaggaaatagccttgagacggcagcgagaagaagaagagcgccagcagcaggaagaagctcttcgcaggttagaagagaggcggcgagaagaggaagagcgacgtaagcaggaagagttacttaggaaacaagaagaagaggcggccaagtgggcgcgagaagaggaagaagcccagagaaggttagaagagaacaggcttcgcatggaggaggaggcggcccgcctgcgtcatgaagaggaagaaagaaaaagaaaggagcttgaggttcaaagacaaaaggagctcatgcgacagcgacagcagcagcaggaagccctaagaagactgcaacagcagcaacagcagcagcagctcgctcagatgaaattaccaagtagctccacctggggccagcagagcaacacaacagcgtgccaatctcaggctacactgagcttagcagagattcagaaattggaagaagaacgggagagacagctaagggaggaggagtcaagtgcatcattttgcttttatgcaacagccaaggcgcctgccgagggagtcgatgagtcttcaagtgcagccgcagccacagccacagccgaaactctgcgcctaggggaatgccagcaaaccttcagataccacgagatcagttccggcgacccagccggacgtggacaggctaacgcaaaagccgctgcagctgcagcagccacgccagcgactaaacagagttcttag

SEQ ID NO: 119023 - DNA, 2364 bp, synthetic construct
  misc_feature 1..2364: note = Description of Artificial Sequence: Synthetic coding sequence
  source 1..2364: mol_type = other DNA
atggcagcggagacccagaccctcaatttcggaccggagtggttgcgggcactttcctctggtggcagtatcaccagcccacccctatcccctgctctgccaaaatacaagctggctgactaccgttacgggagagaggagatgctagcactcttcctgaaagacaataaaataccaagtgatctactggacaaagagttcttacctatactccaggaggaacccctgcccccactggctctggttccatttaccgaagaggagcagaggaattttagcatgtctgtcaactccgcagcggtcctgagacttacggggaggggagggggaggaactgtcgtaggagcaccccgtggtcgaagctcctcccgtgggcggggccggggccggggcgagtgcggattctatcagaggtccttcgatgaagttgagggcgtgtttggcagaggcggtgggcgcgaaatgcaccgctctcagagctgggaggagcgcggcgataggcgattcgaaaagccaggacgcaaagatgtgggccgacccaacttcgaagagggaggacccaccagtgtaggacgcaagcatgagttcatccgctctgagtccgaaaattggaggattttccgtgaggagcaaaatggcgaagacgaagacgggggctggagacttgcaggcagtcggagagacggtgaacgctggcgtcctcacagccctgacggaccccgcagcgccggttggcgggagcacatggagcgacgacgcagattcgagttcgattttcgagacagagatgacgagcgaggctaccgaagggtgcggagtggctctgggtctatcgacgacgaccgcgattctctgcccgagtggtgcctagaagatgctgaggaagagatgggcacgtttgactcctctggcgcttttctctcgcttaaaaaggttcagaaggaacctattccggaagagcaggagatggacttcaggccagttgatgagggtgaagaatgttcagactcggaggggagccataacgaagaggccaaagaacccgataagacgaacaaaaaagagggcgaaaaaacggatcgggtaggggtcgaagcctccgaagagactccccagacatcatcatcgagtgcaagacctggcacaccatccgatcatcagtctcaggaggcctcccagttcgaacggaaagatgaaccaaagaccgaacaaactgagaaggcagaggaagagacaaggatggaaaacagccttcctgcaaaggtaccttcacgcggcgacgaaatggttgcagatgtgcaacaacccctttctcagatccctagtgacacggccagccctctcttgatactgcctcctccagttcccaacccatctccaaccctacgcccagtggaaacccccgtggtcggtgcgcccgggatgggctccgtgagcacagagcccgatgatgaagagggcttaaagcacctggagcagcaggccgagaagatggtagcctatctgcaggattcagctcttgacgacgaacggctcgcaagcaaactccaggagcatcgagccaagggcgtatccatccccctcatgcacgaagccatgcaaaagtggtactataaggatccccagggggaaatccagggcccgtttaacaaccaagaaatggcagaatggtttcaggcagggtattttactatgtccctcctggtgaaacgcgcctgcgatgagtcctttcagcctctgggggatataatgaagatgtggggaagggtgccgttcagcccagggccagcacccccaccacacatgggtgagttagaccaagaacgtctgactagacagcaggagctaaccgctctgtaccagatgcagcacctgcagtaccagcagtttttaattcagcagcagtacgcccaggtgctggcccagcaacagaaggcagcactttcatcccagcaacagcaacaactggcactcttactccagcagttccagacactgaaaatgagaattagcgaccaaaacattatcccgtctgtgacaaggtctgtgagcgtgcctgacacaggttccatctgggagctgcagccaaccgcttcgcagccgactgtgtgggagggtggctccgtctgggatctacccctggacacaaccacccccggaccggcactggagcagctccagcaactggagaaggctaaagccgcgaagctggagcaggagagaagagaagctgaaatgcgggctaagagggaggaagaagagaggaagcgacaggaagagcttcgccgccaacaagaagagattctaaggagacagcaggaggaagagcgtaagaggcgcgaagtggggaagagggacagttag

SEQ ID NO: 119024 - DNA, 3882 bp, synthetic construct
  misc_feature 1..3882: note = Description of Artificial Sequence: Synthetic coding sequence
  source 1..3882: mol_type = other DNA
atggccgcagaaacacagactctgaactttgggcctgaatggctccgcgccctgtctagcgggggctcaatcacctccccccctttgagtccagcactacctaaatataagttggctgactacagatacggccgcgaagagatgcttgccctgtttctgaaggataacaagataccttctgatcttctcgataaggagttcctccctatacttcaagaagaaccactcccaccccttgccctggtgcctttcacggaagaggaacaacggaactttagcatgtcggtaaactctgccgcagtccttcggctgactggccggggcggtgggggcacggtggtgggtgccccacgtggaaggagttcttcaagggggaggggtagaggtaggggtgagtgtggcttttatcagcgcagcttcgatgaagttgagggcgtctttggcagggggggcggacgggaaatgcaccgatcacagtcatgggaagagcggggggaccggcgatttgagaagccgggaaggaaagatgtgggtcgccccaacttcgaggaggggggccccacatctgtgggaagaaagcacgagtttattagatcagaatctgagaattggcggattttcagggaagagcagaacggtgaggacgaagatgggggctggcgcctggcaggcagccgacgcgacggcgaacgctggcgcccacactctccgggatggcgcgaacacatggaaagacgacgacgcttcgaatttgattttagggatagagatgacgagcgtggataccgcagggtcagatctggttccgggtccattgatgacgaccgggacagtttgcccgaatggtgcctggaagacgccgaagaggagatgggtacctttgatagcagcggtgccttcctgtctctcaaaaaggtgcagaaagaaccaataccagaagaacaggaaatggactttcgacctgtagacgagggtgaggagtgctcggattcagaggggtcgcacaatgaggaagctaaggaaccagataagacgaacaaaaaagaaggcgagaagacggacagagtcggagtggaggcctccgaggagactcctcagacttcgtcctcgtctgctcggccagggacaccttctgaccaccagagtcaggaggcatctcagtttgaacgcaaagacgaaccgaagacagagcagacggagaaagccgaagaggagactcggatggaaaactccctgcccgccaaggtgccctcacgtggggacgagatggtggccgacgtgcagcaacccctcagtcagatcccttcggacaccgccagtcccctccttatcctgcctcccccagtcccaaatccgtcaccaacccttcgtcctgtggaaacgcctgtagtgggcgccccaggcatgggctccgtatccaccgagcctgatgatgaagaaggcctaaaacacctggagcagcaagcggagaaaatggtggcttatctgcaggattccgccctggatgatgaaaggctggcctctaaactccaggagcaccgggccaaaggcgtatcaatccccctgatgcatgaagccatgcagaaatggtattacaaagatcctcagggtgaaatccagggaccatttaacaaccaggagatggcagagtggtttcaggccggatatttcactatgtcactgttggtcaaacgagcctgtgacgagagcttccagcctctcggcgacatcatgaagatgtggggccgggttccgttttctcctgggccagctccccctccccacatgggggaactggatcaggagaggcttactaggcagcaagaactgaccgccttgtatcagatgcaacatctgcagtatcagcagttcctgattcaacagcagtacgctcaggtcctggctcagcagcagaaggcagctcttagcagtcaacaacaacagcagctggcgttgctgctccagcagttccaaacacttaaaatgcgcatctccgaccaaaacattataccctccgtgacacgatcagtttctgtccccgacaccgggtccatatgggaactgcagcccactgcttctcaaccaactgtttgggagggtggtagcgtctgggacctgccattagatactaccaccccaggccctgccctagagcagctacagcagctcgaaaaagcaaaagccgcaaaattagagcaggagcgccgggaggctgaaatgcgtgccaagcgcgaggaggaagagaggaagaggcaggaggaactacgtaggcaacaagaggagatactgagaagacaacaggaggaagagcgtaaaagacgagaagaggaggaacttgcgaggcgcaagcaggaagaagccctgcgccgccagcgggagcaggaaattgctctgagacggcagcgcgaggaagaggaaaggcagcaacaggaggaagctcttagacgattggaggagagacggcgggaggaggaagagaggcgaaagcaggaggagctgcttcgaaagcaggaggaagaggctgcaaagtgggctcgagaggaagaggaagcacagaggaggctggaggaaaataggctccgaatggaggaggaagctgctaggctccggcacgaagaagaggagcgcaagcgcaaagagctggaagtgcagaggcagaaagagctgatgaggcagcggcaacagcagcaggaggcgttgcgaaggctgcagcagcagcagcaacagcagcagcttgcccagatgaagctgccctctagcagcacttgggggcaacagtctaacactaccgcctgtcagtcccaggctaccctctcactcgccgaaattcagaagttggaggaagaaagggaacgccagttaagagaagagcaaagacgtcagcagcgggagctcatgaaggccctgcagcaacagcaacagcaacagcagcaaaagcttagcggatggggcaacgtgagtaaacccagcggtaccacaaaatcactcttggagattcagcaggaagaggcaagacaaatgcagaaacagcagcagcaacagcagcagcaccagcagcccaatcgagctagaaacaacacacacagcaatctacatacttcgatcggaaacagcgtgtggggcagtatcaatactgggccaccaaatcagtgggcttcagacttagtcagtagtatatggtctaatgcagatactaagaactcaaatatgggcttttgggacgacgccgttaaagaggttggtcctcgcaatagcacaaacaaaaacaagaataatgcctcactgtctaagtctgttggtgtcagtaaccgccagaacaaaaaggtggaagaagaggagaaacttttaaaattgttccagggggtcaacaaggctcaggacggctttactcagtggtgcgagcaaatgctgcacgctctgaacacagcaaataacttggatgtgccaaccttcgttagcttcctgaaagaggtggaatccccatatgaggtgcatgactatatccgggcctatctcggcgatacgtctgaggccaaagagtttgccaaacagtttctggagcgccgagccaagcaaaaagccaaccagcaacgccagcagcagcagctgccgcaacagcagcagcagcaacccccccagcagcccccacagcagccccagcagcaggattccgtttggggtatgaatcactcaaccctgcactcagtgtttcagaccaaccagtccaataaccaacagagtaacttcgaggctgtgcagagcgggaaaaagaaaaagaagcagaagatggtaagggccgatcccagcctcctcggattcagcgtcaatgcaagtagcgaacgcctgaacatgggtgagatcgaaactctggatgactactag

SEQ ID NO: 119025 - DNA, 3963 bp, synthetic construct
  misc_feature 1..3963: note = Description of Artificial Sequence: Synthetic coding sequence
  source 1..3963: mol_type = other DNA
atggcagccgagacacaaaccttaaattttggtccagagtggctgcgcgctttgtctagtggtggatcgataacaagcccgcccctgtcccccgccctaccaaaatataagctcgcggattatcggtatggaagagaagagatgttggcactttttctgaaagataataaaatcccctccgacctgcttgacaaggagtttttaccaatcctgcaagaggagcccttaccacctctcgctctggtgcctttcactgaggaggaacagaggaacttttctatgtcagtaaattccgcagcagtcctgcgactgacagggcgtggggggggtgggaccgtcgtgggagccccccgaggtcgatctagttcacgggggagagggcgaggaagaggagagtgtggcttctaccagagaagttttgatgaggtggagggcgtgttcggccgcggcggaggccgcgaaatgcacagatcccagagttgggaagaacgcggagacaggaggttcgagaagccaggcagaaaggatgtggggaagaagaatggctactactgtatgtactctccagttctgcttttgggccaacccctttgtcagggacggcccaattttgaagaagggggccctacctctgtcggccggaagcacgagtttatccgaagcgaatcagagaactggcgcatttttagagaggagcaaaatggggaggacgaggatggcggttggcgcctagccggatcaaggcgcgacggcgaacggtggcgcccacattctccagatggaccacggagcgctgggtggagggaacacatggagagacggcgccgtttcgagttcgactttagagaccgagatgacgaacgagggtatagacgggttagaagtggaagcggctcgatagacgacgaccgtgacagcctgcctgagtggtgtctggaggacgcagaagaagaaatgggtaccttcgactctagtggggcattcctcagcttgaaaaaggtgcagaaagaaccaatcccagaagaacaagaaatggacttcaggccagtagacgagggggaggagtgctcagactccgagggaagccataacgaggaggccaaggagcctgataaaaccaataaaaaagaaggtgagaaaaccgaccgggtgggcgtagcttccgaggagaccccccagacttcctcctctagtgccagacccggaactcctagcgatcaccagagtcaagaggcttcacagtttgagagaaaggatgaacccaaaacagaacagacagagaaggcagaggaagagacacgcatggagaacagcctgcccgccaaagtgccatcccggggggatgagatggtggccgatgtacaacagccgctttcacaaatccctagcgacacagcctctccattactgattttgcccccccctgtccccaacccctcaccaaccctaaggcctgtggaaactccagtggtgggtgcacctggtatgggttctgtgagcacagagccagacgatgaggaaggactgaaacacctcgagcagcaggcagagaagatggtcgcttaccttcaagacagcgccctcgacgacgagaggttggcttctaagctgcaggaacatcgcgccaagggagtgagtataccgctgatgcatgaggccatgcagaagtggtactacaaagacccccagggggaaatccagggacctttcaacaatcaggaaatggcggagtggtttcaggccggatactttactatgagcctacttgtaaaacgcgcatgcgatgaaagttttcagccgctcggagacattatgaagatgtggggaagagtgcctttttctccgggccctgcacctcctcctcacatgggagaattagaccaggagagattaactaggcagcaggagctgacggctctgtatcagatgcagcacctgcaataccagcagttcctgattcaacagcagtatgcccaggttctggcccagcaacagaaggccgccctctcatcccagcaacagcagcagctggccctgcttttacagcagtttcaaacacttaagatgcggattagcgatcagaacatcattccttctgtgactcgatcggtgtctgtcccagataccgggtctatttgggagcttcagcccaccgcttctcagcccaccgtgtgggagggcggttcggtctgggatctgcccctcgatactacaactcctggacctgccctcgagcagctgcagcagctcgagaaagccaaagccgcaaagctggaacaagagaggagggaagccgagatgcgtgcaaagcgcgaagaggaggaaaggaaacggcaggaggagctgaggaggcagcaagaggaaattctccgtcgacagcaggaagaagagagaaagcgaagggaggaggaagagttagcccggagaaagcaggaggaggctttgcgtcgccaacgagagcaggaaatcgcccttcgcagacagagggaagaagaggagaggcagcagcaggaggaggccctgcgtcgtctcgaagaaaggcgccgagaagaagaggaacggaggaagcaagaggaactcctgaggaaacaggaagaggaggccgctaagtgggctcgagaagaagaagaagcacagcgacgcctagaggagaatcgcctacggatggaagaggaggcagcaaggcttcgccacgaggaagaggaaaggaaacggaaagagcttgaggtccagcggcagaaggagctgatgaggcaacggcagcagcagcaggaggcactgcgacgcctgcagcagcagcagcagcagcagcaactcgcccaaatgaaacttccatcaagcagtacatgggggcagcagagcaacacaaccgcttgccaatctcaggccactctttctcttgccgagatccagaaactcgaggaggaaagagaaagacaactgcgagaagaacaacgtcgacagcagagagaactgatgaaagccctgcagcagcagcagcagcagcagcagcagaagctgtcaggatggggcaacgtttctaagccttccggcaccacaaaatcactcctggagatccagcaggaggaggcaaggcaaatgcagaagcagcagcagcaacagcagcaacatcagcaaccaaaccgggcaagaaacaatacccatagcaatctgcacacctccataggcaattccgtgtggggctcaatcaatactggcccaccaaaccaatgggcttcagaccttgtctcctccatctggagcaatgctgataccaagaattcgaacatgggtttctgggatgatgcagtgaaggaagttggtccgagaaattctaccaataagaacaagaacaatgcaagcctctctaaatccgtaggcgtgagtaatcgtcaaaacaagaaggttgaggaagaggagaaattattgaagctgttccagggagtaaataaggctcaggatggattcacacagtggtgtgaacaaatgctgcatgccttgaatacagcaaataaccttgatgtcccgacttttgtcagtttcctaaaagaggtcgagtccccttacgaggtgcatgattacatcagagcttacctgggggacacctctgaggctaaggagtttgcaaagcagtttcttgagagacgggccaagcagaaagccaaccagcaacgacaacagcaacagttgccccaacagcaacaacagcagcccccgcaacagcctccccagcagccgcagcagcaggacagtgtgtgggggatgaatcattccaccctgcacagcgtgttccagaccaaccagtctaacaatcagcagtccaactttgaagctgtgcagagtggaaaaaagaagaaaaaacagaagatggtccgggcagacccttcgcttcttgggtttagtgtcaacgccagttccgaacgtctgaatatgggtgaaattgaaaccttggatgactattag

SEQ ID NO: 119026 - DNA, 2085 bp, synthetic construct
  misc_feature 1..2085: note = Description of Artificial Sequence: Synthetic coding sequence
  source 1..2085: mol_type = other DNA
atgagtgggggcgaggtggtgtgttcggggtggctccgtaagagtccgcctgaaaaaaagctgaaaagatatgcatggaagaggagatggttcgtgttgcgttctggtcgcctaaccggtgatcccgatgtcctggagtactataagaacgatcatgccaaaaaacctatccgcattatcgacttgaacctgtgtcaacaggttgatgcaggattgacatttaacaaaaaagagttcgagaactcatatatattcgacatcaataccattgataggatcttctaccttgtggcagattcggaggaggagatgaataaatgggttcgatgtatttgtgacatctgcggtttcaacccaaccgaggaggacccagtaaaacctcccggatcttctcttcaggcaccagccgacctgccattagcaatcaatacggcccctccaagcacacaggccgatagttcaagcgccaccttaccccctccctatcagctgatcaatgtcccacctcatctggagacgcttggaattcaggaagacccacaggactatctgctcttgatcaattgtcagtccaagaagcctgaaccaactcggacccatgcggatagcgccaagagtaccagcagcgagaccgactgtaacgataatgtccctagccataagaacccagcctccagccaatctaaacacggtatgaatggcttcttccagcagcaaatgatttacgacagcccgccttcacgggcccccagtgcatcggtagactcgagtctgtacaacctgcctaggagctactcgcacgacgttctccctaaggtaagtccaagctctacagaggcggacggcgagctttacgtgtttaatacccccagtggaacttccagcgtggagacccagatgaggcatgtgtcgatctcctacgacatacccccaacccccggtaacacttatcagatccctaggacctttcctgaggggactctgggccagaccagtaaactggatacaatccctgacattcctcccccaaggcctccgaagccacatccggcccatgaccggagccctgtagaaacatgctccatcccccgcactgcctcagataccgatagctcgtattgtatacccacggccggcatgtctcccagccgtagcaatacaatctcaacagtagacctgaacaagttgaggaaggacgccagctcgcaggactgttatgatattcccagagccttcccttcagaccgatcttctagcctcgaaggcttccacaaccacttcaaagtgaaaaacgttctcaccgtcgggtcagtatcctcggaagaactcgatgagaactacgtgccaatgaacccgaattctcctcccaggcagcactcttcctcattcaccgaacccatccaggaagcgaattacgtgccgatgactcctgggacctttgatttctcttccttcgggatgcaggtccctccgcctgcacacatgggcttccgttcttcccccaaaacccctccccggcgccccgttccagtggctgactgtgagcctcctccggtcgacaggaatcttaagcccgacagaaaagtgaagccagccccacttgaaatcaagccgttaccagagtgggaagagcttcaggctcccgtgcgaagcccgatcacgagatctttcgcccgcgactccagccggtttcccatgtccccaaggccagattctgtgcattctactacctccagttcagactctcacgattccgaagaaaattacgtacccatgaaccccaacctgagttcagaagaccccaacctattcggttcaaacagtctggatgggggaagctcaccgatgattaagcccaaaggagataagcaggtggagtatctggacctggaccttgacagtgggaagtcgacaccccctcgcaaacaaaagtctagcggcagtggatcctccgtagcggacgagagggtggactatgttgttgtcgaccagcagaagacactcgcgctaaaatcaacacgtgaggcttggaccgatgggcgacagagcaccgagtccgaaacccctgctaaatcagtgaagtag

SEQ ID NO: 119027 - DNA, 2175 bp, synthetic construct
  misc_feature 1..2175: note = Description of Artificial Sequence: Synthetic coding sequence
  source 1..2175: mol_type = other DNA
atgtcaggtggggaggttgtgtgttcagggtggctgcgtaaatcccctcctgaaaagaaactgaagaggtacgcttggaaaaggcgctggtttgtcctgaggagcggccggctcaccggcgatcctgatgtgctcgagtattataaaaacgaccatgctaagaagcctattcgcataattgacctcaacctgtgtcagcaagtggatgccggacttacattcaacaagaaagagttcgaaaactcttacatttttgacatcaataccattgaccgcatattttatttagttgctgatagcgaggaggaaatgaacaagtgggtgcgctgcatatgtgacatctgtggctttaacccgacggaggaagatccggtgaaaccgcccggatcatccttacaagctcccgccgatctgcccctggccattaatactgcacctcccagcactcaggctgacagctccagcgctaccttgccaccaccgtatcagctgattaatgtgcctccacatcttgagacactgggcattcaggaagatcctcaggattacctgctgctcatcaactgtcagagtaagaagccagagccaacaagaacccatgccgattctgcaaaaagcacgtcttccgagactgactgcaatgataatgttcccagccataagaatcctgcaagtagccagtccaaacacggtatgaacggtttctttcagcagcaaatgatttatgactccccacccagcagggcgccctccgcttccgtggacagctccctttacaatctgccacggtcatactcacatgatgttctgcccaaggtctcaccaagctccactgaagccgacggggagctgtatgtattcaacacgccctcaggcacatcatcagtcgaaactcagatgagacacgtttccatatcttacgatataccacctacacccgggaatacatatcagatacctcgtactttccccgagggtacgttaggccagacgagtaagctggatacgattcccgacatccctcccccacgtccgcctaagcctcaccccgctcacgatcgctcacccgtggagacatgttccattccacgtacagcaagcgacacagattcctcttattgtattccaaccgccggcatgtcaccatcgaggagtaacacaatttctacagtggacctgaacaagctccgtaaggacgcctcatcccaggattgctatgatatacccagggcattccccagcgaccgatctagctccttggaaggcttccacaaccacttcaaggtcaaaaatgttctcacagttggttctgtctcttcggaagaattggacgaaaattatgtcccaatgaatccaaactctccacccaggcagcactctagttcttttacagagccaatccaagaagcaaactatgtgcctatgacgcctggaaccttcgacttctcttctttcggaatgcaggtccccccccctgctcatatgggatttaggtcatcgcccaaaactcctcctcggcggcctgtgcctgtagctgattgcgaaccaccgccggtggatagaaacctgaagcccgatcgcaaagggcagtcccccaagatactgagattaaagcctcatgggttggagcggacagactcccaaaccattggagacttcgctacgcgtcgcaaggtgaaacccgctcctttagagataaagccgctgcctgagtgggaagaactgcaggcccctgtcaggtcccccatcacccggtcgtttgctagagacagttcccggttccccatgagtccacgtccagatagtgtgcattcaacaacctctagctcagattcccacgattctgaggagaattatgtgccaatgaatccaaacctcagtagtgaagaccccaatctgttcggctctaactccctagacggagggtccagccccatgatcaagccaaaaggggataaacaggtcgaatacctggacctggatctggattctgggaaatcgactccccctaggaaacaaaagagtagtggtagcggaagctctgtggccgacgagagagtcgattacgttgtcgtggaccagcagaagaccttggccctcaaatctacacgagaggcctggactgatggcagacaatctacggagtctgagacaccagcaaagtccgtgaagtag

SEQ ID NO: 119028 - DNA, 1776 bp, synthetic construct
  misc_feature 1..1776: note = Description of Artificial Sequence: Synthetic coding sequence
  source 1..1776: mol_type = other DNA
atgaacaaatgggtgcgatgcatctgtgacatctgcgggttcaacccaacggaagaggacccggtgaaacctccaggttcctctttgcaggcccccgcggacttgcctctggcaatcaacactgccccccctagtactcaagccgattcctcttccgccaccctaccaccaccttaccagcttattaacgtgcctccccatcttgaaacgctagggatacaagaggacccacaggattacctcctcctgattaactgtcagtcaaagaaaccggagcctacgcgaacgcacgctgattccgccaagtctacaagttccgaaacagactgtaacgacaacgtaccctctcataagaatccagcttcctctcagtccaaacatggcatgaacggctttttccaacagcagatgatttacgacagtcccccttcaagagcgccctctgccagcgtggatagctccttatacaatctgccccgcagctactcccacgatgtgcttcccaaagtctccccgagtagtacggaggccgatggggagctgtacgtgtttaatacaccttccggcacaagcagtgtggagacacagatgcgacacgtgtccatatcatacgacattccaccaacgcccggtaacacataccagatcccccgaactttcccggaaggcaccctcggtcaaacatctaaacttgacactatccccgacatccctccgcctcgaccaccaaaaccacatcccgcccatgaccgatcccctgtggagacgtgttctatccctcgtaccgctagcgacactgattccagctattgcattcccaccgccggaatgagccctagccggagtaacacaatctctacagttgatctgaataaactaaggaaggatgccagcagccaggactgttacgacattccacgggcctttccatcggaccgttcttcctctctggagggtttccataatcacttcaaagtgaaaaatgtcttaactgtcggctcagtgtcgtcagaggaactggacgagaactatgtgcctatgaatccaaacagcccaccacgccagcatagctcgagctttaccgaaccaatacaggaggcaaactatgttcccatgacccccggaacattcgatttctcctcatttggcatgcaggtgcccccccctgcccacatgggattccggtccagcccaaagacacccccaagacgcccagtaccagtggccgactgcgagccaccccccgtggaccgcaatttaaagccagaccggaaagtaaaaccggcccccctagaaatcaagccgcttcccgagtgggaggaactacaagcccccgtgaggagcccaattactcgctcattcgctcgtgactcgtcacggtttcccatgtcaccccgtccagattccgtgcactcaaccactagtagttctgacagtcacgattcagaagagaattatgtacccatgaacccaaacttgagctcagaggatcccaatctgttcggatccaacagtctggatggcggaagctctccgatgatcaagcccaaaggggacaaacaggtggaatacttggacctcgatttagattccggtaaatcaacgcctcctaggaagcagaagagctccggaagcggtagctcagtcgctgatgagcgcgtggactacgtggtggtagaccagcagaaaactctggccctgaagagtacacgggaggcctggaccgatggcaggcaaagcacggagagcgaaacacccgcaaagagcgttaaatag

SEQ ID NO: 119029 - DNA, 1917 bp, synthetic construct
  misc_feature 1..1917: note = Description of Artificial Sequence: Synthetic coding sequence
  source 1..1917: mol_type = other DNA
atgagcggggatccggatgtactcgaatactataaaaacgaccatagtaagaaacccctgaggatcatcaacttgaacttctgtgaacaagtcgatgccggcttaaccttcaataaaaaggaactccaggatagtttcgttttcgacatcaagacctctgaacggacattttacctagttgccgaaacagaggaggacatgaataaatgggttcagtccatctgccagatctgtggatttaaccaagccgaagaatcaacggattctctgcgcaacgtaagcagcgccggtcatggcccaaggtcctcccccgcagagttgtcgtcctcctcccagcacctgctcagagagagaaagtcaagtgccccttcccactcatcacagcccacattattcacattcgagcccccggtttccaaccacatgcagcccacactttcaacaagcgcaccccaagaatacctgtatctccaccagtgcatcagcagaagggccgaaaacgcaagatctgccagcttctcacaggggaccagggcatcgtttttgatgagaagcgatacagccgttcagaagctagcccagggaaacgggcattgtgttaatggaatctcgggacaagtccacggcttctactcactgcccaagcccagccggcacaacacagagtttcgggacagcacatacgatctgcctaggtctctggcctctcatggacacaccaaaggttccttgacaggcagcgagaccgataacgaggatgtctacactttcaagacgccaagtaacacactttgcagagaattcggcgacctgcttgtggacaacatggatgtccccgccacgccccttagcgcataccaaatcccgaggacctttactctagataaaaaccataatgccatgaccgtcgctacacccggcgactctgctatcgctccccctcctaggccgcccaagccaagccaggcagaaacccctcgttgggggtcaccacaacagcgccctccaatcagcgaaaactcacgctcggtcgccgccaccatacccagacggaatactctgcctgcaatggacaactcccggttacaccgtgcatcgagttgcgaaacctacgagtatccgcagaggggcggtgagtccgctggacggtctgccgagtcaatgagcgacggcgtcgggagcttcctcccaggaaagatgattgtggggcgttccgattctacgaacagcgaagacaattacgttccaatgaatccgggctcatcaactctgctggcaatggaaagagctggggataatagccagagcgtatacattccaatgagtcctggggctcatcattttgatagcctggggtatccttcgacaaccctaccagtccatcgaggtccttcgcgcggatctgaaattcagcctccacctgtaaatcgcaacctgaagccagatcgaaaggccaagcccacccctcttgaccttcggaacaataccgttatagacgagctgcccttcaagtcgccaatcacaaagagttggtcaagggccaaccatacattcaatagcagttcctcacagtattgtaggccaatttccactcagagtatcacgtccaccgattcgggtgatagcgaggaaaactacgtcccaatgcagaacccggtatccgcctctcccgtgccaagcggaactaactccccagccccaaaaaaaagtaccggctccgtggattacctggctctggacttccagccaagttcaccatcccctcatcgaaaaccgagtacatcatccgtgaccagcgatgagaaagtggattatgtccaggtcgataaagagaaaacgcaagcactgcaaaacaccatgcaggagtggactgatgtgaggcagagctccgaaccaagcaaaggagcaaagctctag

SEQ ID NO: 119030 - DNA, 2031 bp, synthetic construct
  misc_feature 1..2031: note = Description of Artificial Sequence: Synthetic coding sequence
  source 1..2031: mol_type = other DNA
atgtctggaggcggcgatgtggtctgtacaggttggctgcgcaaatctccacctgaaaagaagctgaggcgctacgcctggaaaaaacgatggttcattctgagatcgggccgtatgtccggggatccagatgtacttgagtactacaagaatgatcattcaaagaagcccctcaggatcatcaatttaaacttttgtgagcaggtggacgccggtctgacatttaataagaaagaactgcaggacagtttcgtgttcgacattaagacttcggagcgaacattctacttggtggcggaaacggaggaagacatgaataaatgggtgcaatctatttgccagatctgtggttttaatcaggctgaagagagcactgactcattgcgaaatgtgtcctctgctggacatggaccgcgaagtagtcccgccgagctgtcttccagtagccaacacctgctgagggagcgaaagtcctctgccccctcgcattctagccagcctaccctctttacttttgagcctccagtgagcaaccacatgcagcctactctcagcacatcagctccccaggaatacttgtatctgcatcagtgcatcagcagaagggctgagaatgcccgctctgccagctttagtcagggtaccagagctagctttcttatgaggagcgacacggccgtgcagaagctggcacaggggaatgggcactgcgtcaacgggatctcagggcaagtgcacggcttttactccctgcccaaaccgagccggcacaacacagagttccgagactcaacatatgacctgcctcgctcactggccagtcacgggcacacaaaggggtcactgaccggaagtgaaacggacaatgaggatgtgtacacatttaaaacaccatcgaatacgctgtgtagggaattcggtgacttgctggtggataacatggacgtccccgccaccccactttccgcctatcagattcctcgaacatttactctggacaaaaatcataatgccatgaccgtcgcaacgccaggcgactcggctatcgctccaccccccaggccccccaaaccaagccaggctgaaacaccaaggtgggggagcccgcaacagcggcccccaatcagtgagaacagccgcagcgtagcagctacaattccgaggcgaaacactctccctgccatggacaattcaaggcttcacagagcatctagctgcgaaacctatgagtacccccaacgtgggggcgagtcagccggacgctcagccgaatccatgtccgatggggtcgggtcttttctgcctggtaagatgatcgtagggagatcagactcaactaacagcgaagacaattatgtgccaatgaatccgggtagcagcactttgctggcaatggaacgagcgggcgataacagccagagtgtttatattcccatgtcccccggtgcacaccatttcgactctctgggctaccctagcacaacccttccagtgcatcgcggcccatcgaggggctcagaaatccaaccgcccccagttaataggaacttgaagccagaccgaaaagctaagccaacccctctcgatctgagaaataatactgtgatagacgagctgccatttaaatcccccatcaccaagagctggtcccgagctaaccacacgttcaatagcagtagttcccagtactgtcggcccatctcgacgcagtccatcacatctaccgatagtggtgattctgaggaaaattacgtccctatgcagaaccccgttagtgcatcccccgtccccagcgggactaactcaccggccccaaaaaagagtacagggagtgtagattacctggcactggatttccagccatcctctccctcaccccatagaaaaccttcaaccagcagcgttacttccgatgagaaggttgactatgtgcaggttgacaaagagaagacccaggctttgcagaatactatgcaggaatggactgatgtaagacagagcagcgagccttcaaaaggcgccaagttatag

SEQ ID NO: 119031 - DNA, 396 bp, synthetic construct
  misc_feature 1..396: note = Description of Artificial Sequence: Synthetic coding sequence
  source 1..396: mol_type = other DNA
atgagtggggaccctgatgtattagagtattataaaaacgaccacagcaagaaacctctccgcattataaatttaaacttctgcgaacaggtagacgcaggattaacttttaataaaaaggaactccaggactcctttgtgtttgacatcaagacgtccgagaggactttctatttagtggcagagacagaagaagatatgaataagtgggtccaaagtatatgtcagatttgcggatttaatcaggccgaggagagcaccgattccctgcgcaatgtgtcttccgccggccatggaccccgctctagtcccgctgagctctcatctagctcccagcacctccttagggagcggaaaagctccgcccctagccacagcagccagccaactctctag

SEQ ID NO: 119032 - DNA, 309 bp, synthetic construct
  misc_feature 1..309: note = Description of Artificial Sequence: Synthetic coding sequence
  source 1..309: mol_type = other DNA
atgtccggcgatcccgatgtgctggagtattataagaacgatcactccaaaaagccccttcgtatcataaacctcaatttctgtgaacaggtcgacgccgggttgactttcaacaaaaaggaactacaggactcttttgtgttcgacatcaagacctccgagcgcactttttatctggtagctgagaccgaggaggatatgaacaagtgggtgcagtccatctgccagatttgcgggtttaaccaggcggaagaatcaaccgattcactccggaatgtgtcctccgctggacatggaccccgttcctag

SEQ ID NO: 119033 - DNA, 993 bp, synthetic construct
  misc_feature 1..993: note = Description of Artificial Sequence: Synthetic coding sequence
  source 1..993: mol_type = other DNA
atggaagctgttgccaagttcgattttacggccagcggtgaggacgagttgtcttttcacactggtgacgtgctgaagatcctgagtaatcaggaagaatggtttaaggctgagctgggaagtcaggaggggtacgtccctaagaacttcatcgacatccagttcccaaagtggttccatgaaggactgagtaggcaccaagctgaaaatctgctcatgggaaaggaagtgggcttcttcataattcgtgccagccagagctccccaggagacttctcgatcagtgtgcgacacgaggatgacgtgcaacacttcaaggtgatgagagataataaaggcaattacttcttatggacagaaaagtttccaagcttgaacaagctggtggattactaccgcactaattcgatcagtcggcagaagcagatattcctgcgcgacaggacacgcgaagatcagggtcaccgcggcaacagcctagaccgtcgatcacaggggggcccccatctatccggggccgtgggggaggaaattcgtccatctatgaaccggaagcttagcgatcacccgccgaccctacccctgcagcagcaccagcatcaaccccaacctccgcaatatgcgcccgcccctcagcagttacagcaaccaccgcagcagagatatctgcaacatcatcactttcaccaagaaaggcgcgggggctcactggatatcaacgatgggcattgtggtactggacttgggtctgaaatgaacgcagcactgatgcaccgtaggcacaccgatccagtccagttgcaggctgcaggaagagtcagatgggctagagccctgtacgacttcgaagcactggaagatgacgagctgggttttcactctggtgaggtcgtggaagtgctcgactcaagcaacccatcttggtggacaggccgccttcataataaattgggcttgttcccagcgaattacgtggctccgatgacaagatag

SEQ ID NO: 119034 - DNA, 654 bp, synthetic construct
  misc_feature 1..654: note = Description of Artificial Sequence: Synthetic coding sequence
  source 1..654: mol_type = other DNA
atggtctcacggcgcccccttagtacccccggacgcgagctgacacacggacagggcggctggttactgcatcacccaggtcagccagagttgcctcgcgggctcctacatctgtgccaggggcacaggggtaattctctggatcggagatcgcagggcggtcctcatcttagtggcgccgtcggggaggagatccgcccttctatgaaccgcaagttgtccgaccaccctcctacgcttcccttgcaacagcatcaacaccagcctcaaccaccgcagtatgcacctgcaccacaacaactgcagcaacccccacagcagcgatatctccagcatcaccatttccatcaggagcgtagaggggggtctttggatataaatgacggccactgcggcaccggcctagggtctgagatgaacgccgctctcatgcataggagacatacggaccccgtccaacttcaggcagccgggcgggtgcggtgggctcgcgcactttacgatttcgaagctctggaggacgatgagttaggtttccatagtggagaagtggtggaggtgctggattcttctaacccaagttggtggaccggaagactacacaacaaactcgggctcttcccggccaactacgtggctccgatgacacggtag

SEQ ID NO: 119035 - DNA, 993 bp, synthetic construct
  misc_feature 1..993: note = Description of Artificial Sequence: Synthetic coding sequence
  source 1..993: mol_type = other DNA
atggaggcagtggctaaatttgacttcaccgcctcgggcgaagatgagttatcttttcacactggcgatgtcctgaaaatcctgagcaatcaagaagagtggtttaaggccgaactcggatctcaagagggctatgtcccaaaaaactttatcgacattcagttccccaagtggtttcatgagggtctgtctcgacatcaggccgaaaacctgttaatgggcaaagaagtgggatttttcatcatacgcgcctctcagagctcacccggggatttttctatcagcgtgaggcacgaagacgacgtacaacacttcaaagtaatgcgcgacaataagggaaattattttttgtggaccgaaaaatttccctcactaaacaaactcgtggactactataggactaacagcatttcgagacagaaacagatctttctgcgcgaccgtaccagagaggatcagggccatcgggggaacagtctcgaccgccgaagccagggggggccccatttaagcggagcagttggggaagaaatcaggccgagcatgaatcgcaagctgagtgatcacccacccacgctacctctgcagcaacatcaacaccagccccagccaccacagtacgctccagctcctcagcagctgcaacagcctcctcagcagcgatatctccagcatcaccacttccaccaggaacggaggggcggatctctggatatcaatgacggtcactgcggaaccggtctgggatctgagatgaatgctgctcttatgcacaggcggcacaccgaccctgtgcaactccaggccgctgggagagtcaggtgggcacgcgccttgtacgactttgaggctctggaggacgacgagctggggttccactcaggggaagttgtggaagttcttgattcctccaaccccagctggtggaccggccggctgcacaacaaattgggactatttcccgctaattacgtggccccaatgactcggtag

SEQ ID NO: 119036 - DNA, 294 bp, synthetic construct
  misc_feature 1..294: note = Description of Artificial Sequence: Synthetic coding sequence
  source 1..294: mol_type = other DNA
atggaggcagtagccaagttcgacttcacagcttccggcgaggacgaactcagctttcataccggcgatgtgttaaaaattctctctaatcaggaggaatggtttaaagccgagctggggtcccaggagggttacgtgccgaagaactttatcgatatccagttcccgaagtggttccacgaaggtctcagtaggcatcaggctgagaatctgctgatgggcaaagaagttggcttctttataattcgggcaagtcagtcttctcctggggacttttctatctctgtaagatag

SEQ ID NO: 119037 - DNA, 795 bp, synthetic construct
  misc_feature 1..795: note = Description of Artificial Sequence: Synthetic coding sequence
  source 1..795: mol_type = other DNA
atgttggaatttgtgtccctgctagcccgcaaagattctaacaactcggtgtcaaagccccggcataaactgaaccctttctcttctaagaggcacgaagacgacgttcaacattttaaagtaatgcgggacaacaagggaaactatttcctctggacagaaaagttcccgagcctgaacaaattggtggactattataggaccaatagtatttcacgccaaaaacagatctttttgcgggatcgaactagggaggatcagggccataggggtaattctctggaccgcaggtctcagggagggccccacctctctggggcagtgggcgaagagatccggccttctatgaataggaagctgagtgatcatccacccactttgcccttgcagcagcatcagcaccagccccaacctccccagtacgctccggcacctcagcagctgcagcagccacctcaacagcgctacctccagcaccaccattttcaccaggaaagaaggggcgggtctttggacattaatgatggtcactgcgggactgggcttggcagtgagatgaacgccgccctgatgcatcgacggcacactgaccctgttcagctgcaggccgcaggtcgtgtccgttgggctcgggcattatacgacttcgaagcactggaagacgacgaattgggattccactcaggcgaagtcgtggaagtcttggattccagtaaccccagctggtggactggcaggcttcacaataagctgggcttgttcccagccaattacgtcgctccaatgactaggtag

SEQ ID NO: 119038 - DNA, 837 bp, synthetic construct
  misc_feature 1..837: note = Description of Artificial Sequence: Synthetic coding sequence
  source 1..837: mol_type = other DNA
atggaggccgttgctaaattcgactttactgcctctggagaagatgaactatcctttcacacaggggacgtcctgaagattctcagcaaccaagaagaatggttcaaggccgaactgggatcccaggaaggatacgtgcccaaaaactttatagatatccagttccctaagcacgaggacgatgtgcaacatttcaaggtgatgcgagacaataaagggaactatttcttatggaccgagaagtttccctccttaaataaactcgttgactactatcgcacaaatagcattagccgccagaagcagatctttctaagggaccgcaccagagaagaccagggccaccgcgggaacagcctagatcgtcggagccagggcggaccacatttgtctggggcagtgggggaggagatcagaccttcaatgaatcggaaactatccgatcatcccccaaccctcccgctccagcagcaccagcaccagcctcagcctcctcagtacgcgcctgccccccaacagctccagcagcccccccagcagcgttaccttcagcaccatcatttccaccaggagaggcggggtgggagtctggatattaacgacgggcactgtgggacagggctggggtccgagatgaacgcggctctcatgcaccgcaggcacaccgacccagttcagttgcaggccgcagggagagtcagatgggcccgcgccctgtatgacttcgaagctttggaggaggttctggacagcagcaatccatcttggtggacgggaagactgcacaacaagcttgggctatttcctgcaaattatgttgcacccatgacgcgctag

SEQ ID NO: 119039 - DNA, 915 bp, synthetic construct
  misc_feature 1..915: note = Description of Artificial Sequence: Synthetic coding sequence
  source 1..915: mol_type = other DNA
atgctcgagttcgtctcgctgcttgcccgcaaggactccaataacagcgtgtccaaaccaagacataagctgaacccattcagctcaaaacgctggttccacgagggactcagccgccaccaggcagagaatctgctgatggggaaggaagtgggcttcttcatcatcagagccagccaatcctcccccggcgacttcagtatttccgtgcgacatgaagacgatgtacaacattttaaagttatgagagataataaaggaaactacttcctttggacagaaaagtttcccagcctgaacaagctagtggattattataggacgaattctatcagtcggcaaaagcagatctttctgagggataggaccagggaggatcaaggacatagagggaattcactggataggcgaagtcaggggggtcctcatctatcaggggccgtgggcgaagagatccgcccttcgatgaataggaagttgtccgatcaccctcccacgctccccctacagcagcaccagcatcaacctcaacccccacagtacgccccagcccctcagcagttacagcagcctccgcaacaaagataccttcaacatcatcacttccatcaagaacgacggggaggcagcctcgatattaatgatggtcactgtggtacgggcttgggtagcgagatgaacgctgcgttgatgcatcggagacacaccgacccagttcagttgcaagctgctggacgggttcggtgggcacgggctctgtacgacttcgaggccctggaggacgacgagctgggctttcacagcggggaggtcgtggaggttctagactcctccaatccaagttggtggacgggccgcttgcataacaaactgggcctgtttcccgctaactacgtggccccaatgacaagatag

SEQ ID NO: 119040 - DNA, 777 bp, synthetic construct
  misc_feature 1..777: note = Description of Artificial Sequence: Synthetic coding sequence
  source 1..777: mol_type = other DNA
atggggaaggaggtggggttcttcattatcagggcttctcagagcagccccggcgacttttccatttcagtccggcatgaagacgacgtgcagcacttcaaggttatgcgtgataataaaggtaactattttctgtggacggagaagttcccgagcctcaataagctcgtcgactactacagaaccaattctatttcacgccagaagcagatattcctgcgggatcgaactagggaggatcagggtcaccggggcaatagcttagacagacgttcgcagggtggaccccacttgtccggagcagtaggcgaggaaattcgcccatccatgaataggaaactcagcgaccacccacctacattaccattgcaacaacatcagcatcagcctcagccaccccagtatgcacctgcccctcaacagctccaacagccaccacagcagagatacttacagcaccatcatttccaccaggagcgccggggcggctcactcgatatcaatgatggacactgtggcacaggactgggctctgagatgaacgcagccctgatgcaccgtaggcacactgatccagtacaactgcaggctgctggcagagttcgctgggcacgcgcactgtatgacttcgaagctctcgaagatgatgagctgggcttccatagcggtgaggtggtcgaagtgttagattcctccaatccttcctggtggaccggcaggctacataacaaactcggcctgttccctgccaattacgtggcaccgatgacccgctag

SEQ ID NO: 119041 - DNA, 507 bp, synthetic construct
  misc_feature 1..507: note = Description of Artificial Sequence: Synthetic coding sequence
  source 1..507: mol_type = other DNA
atgttttggaagctcagcttgtctttgttcctggtggccgtgctggtgaaggttgccgaggcacgcaagaaccgcccggctggtgcgattcctagtccttataaagacgggtcatcaaacaattcagagagatggcagcaccagatcaaggaggtgcttgctagttcccaggaagccctggtggtgaccgagaggaaatacctaaaaagcgactggtgcaagacccagcccctgaggcagacggtatcggaagagggatgtcggtctcgcactattttgaatagattctgctatggacagtgcaactctttctatatcccccgtcatgtgaagaaagaggaggaaagtttccagagctgtgccttctgtaagccccagagggtgacgagcgtcctggtggaactagagtgtccaggcttagaccctccttttcgattgaagaaaatacaaaaagttaagcagtgccgctgtatgagcgtaaatttatccgatagcgacaagcaatag

SEQ ID NO: 119042 - DNA, 1443 bp, synthetic construct
  misc_feature 1..1443: note = Description of Artificial Sequence: Synthetic coding sequence
  source 1..1443: mol_type = other DNA
atggcgggcacgcggtgggtgctaggagcgctgctgcgaggttgtggctgcaattgcagctcctgcaggcgaaccggagctgcttgcttgccgttctatagtgccgctgggtctattccatctggcgtctcagggaggaggagattgctcctgctcctcggagcggccgcagcagcggcaagccagacaagggggctgcagaccgggccagtgccacccggcaggctggccgggccacctgcggtggccacatctgctgcagcagctgccgcagctagctacagcgctctccgcgccagtttgctcccacaaagcctcgctgccgctgcagcagtccccacccgctcctacagccaggaatccaaaactacatacctggaggacctgccacccccccctgagtacgaactggccccatctaagctagaggaggaagtggacgacgtgttcctcatccgcgcacaaggccttccatggtcctgtacaatggaggacgtgctgaattttttctccgattgccgtattcggaatggcgagaatgggatccattttctcctgaatagggatggcaaacggaggggggatgcacttattgaaatggaaagcgagcaagacgttcagaaggctttagagaagcatcgaatgtatatgggacagaggtacgttgaggtttacgaaatcaataatgaggacgtggacgccctgatgaagagtctgcaggtgaagagttcccctgtagtgaatgacggggtggtgagactccgaggactgccttattcttgcaacgagaaggatatcgtcgacttctttgccgggctgaatattgtcgacatcacgtttgtgatggactatagaggcaggagaaagacaggcgaggcatacgtgcagttcgaagaacctgaaatggcgaatcaggccctgctgaagcaccgcgaggaaatcgggaacagatatatagaaatctttcccagtcgccgaaacgaggtgaggacacatgtgggtagctacaaaggcaagaagatcgcaagcttcccgacagccaaatacataactgagcctgagatggtctttgaagagcatgaggtgaacgaggacatccagcctatgacagcctttgaatcagagaaagagattgagctgccaaaggaggtcccagaaaagttgcccgaggctgccgactttgggacaaccagctccttgcattttgtgcacatgagaggattacccttccaggcaaatgcccaagatataatcaatttctttgcaccactgaaacctgttcgcatcactatggagtacagcagtagtggaaaagccactggcgaagcagacgtccacttcgaaacacacgaagatgcagtcgcagcgatgctgaaagacaggagtcacgtccatcaccggtacattgagttgtttctgaatagttgtccaaaaggtaagtag

SEQ ID NO: 119043 - DNA, 957 bp, synthetic construct
  misc_feature 1..957: note = Description of Artificial Sequence: Synthetic coding sequence
  source 1..957: mol_type = other DNA
atggaggacgtgctaaacttcttttccgactgtaggatccgtaacggagaaaatggaattcattttctgttgaatcgcgatggcaaaaggagaggtgatgctctgatagagatggagtcggagcaggacgtacagaaagcactggagaagcacagaatgtacatgggacagcgatacgtcgaagtctatgagattaataacgaggatgtcgatgctctaatgaagagtctgcaggtgaagtcctcccccgtggtaaacgatggcgtggtacggctgcgaggcctcccttattcttgtaacgaaaaggacatcgtcgacttttttgccggcctcaatattgtggatatcaccttcgtgatggactatagagggagacggaagacgggcgaggcgtatgtgcagtttgaagagcctgagatggccaaccaggcactgttgaagcacagggaagagatcggaaaccgatatatcgaaatcttcccttctagaagaaacgaggttcgcacccacgtcgggagctataagggaaagaagatcgcttccttccccactgcaaaatacatcaccgaaccagaaatggtattcgaagaacatgaggtgaacgaggatatccagcctatgacagccttcgagagcgaaaaagagatcgagctcccgaaagaagtcccagagaaactccctgaggccgccgacttcggcactacctcttcactacactttgtccatatgaggggcctgccatttcaggctaatgctcaagatatcattaactttttcgcccctcttaagcccgtgaggatcacaatggagtacagttcctctgggaaggcaacaggtgaagcggacgtgcactttgagacgcatgaagatgccgttgccgcaatgctaaaagacaggtcccatgtgcatcaccgatacatcgaattgttcctcaacagctgccccaaagggaagtag

SEQ ID NO: 119044 - DNA, 1362 bp, synthetic construct
  misc_feature 1..1362: note = Description of Artificial Sequence: Synthetic coding sequence
  source 1..1362: mol_type = other DNA
gcggcagccgtgcctaccaggagttactcccaagtgcgcggccgacgagaaggtcctggggcaaggagtctgcctggaagagttcatgcgccacctcggccgtccgtgcccccgtgcgctccccggggtcacgccaggggctctgcgacactggccgctcacccaccccctagtacgctgtgcagttactgggccctggagcaggggaaactttcacaagcatccgggctactcctcgtgctcttctctccaagagttagtggacgcctgggtagcgagagcaagaccacctacctggaagacttaccgcctcccccagagtatgagctggccccttccaagctcgaagaagaggtggacgatgtctttctgattagagcgcaggggttaccatggtcctgcactatggaggatgtgctgaatttcttttcggactgcagaatccggaatggggagaatggcattcacttcctgcttaatagggacggcaagcggcgcggggacgccctcattgaaatggagtccgagcaggacgtgcagaaggcactggaaaagcatcgaatgtatatgggtcagaggtacgtcgaagtctacgagatcaataacgaagatgtggatgctttgatgaaatcattgcaggtgaaaagttcacctgtggtcaacgacggggtggttcgtttgcgaggactcccttactcttgtaatgaaaaggacattgttgactttttcgctggtctcaacatcgtggatattacattcgtgatggactatcggggtagacggaaaacaggcgaggcctatgtgcagttcgaggagcccgagatggcaaaccaggccctcctgaagcatagagaggagattggcaaccgatatattgaaattttcccttcccggagaaacgaggtccgtactcacgttggctcctataaaggtaaaaaaattgctagcttccctactgcaaagtacattacagagcctgagatggtgtttgaagagcatgaagtaaacgaagacatccaaccaatgacagccttcgaatcggagaaggagatcgaactgccaaaggaagtgccggagaagttgccagaggcagccgacttcggtacgacaagctcattgcactttgtgcatatgcggggactaccatttcaagctaacgcacaggacatcatcaatttctttgcacctctcaagccagtcagaatcacaatggaatacagcagttctggaaaagcgacaggggaagccgacgttcactttgaaacccacgaggacgccgtcgccgcaatgctcaaggacaggtcccacgtacatcataggtacatcgagctcttcttgaacagctgtcccaaagggaaatag

SEQ ID NO: 119045 - DNA, 957 bp, synthetic construct
  misc_feature 1..957: note = Description of Artificial Sequence: Synthetic coding sequence
  source 1..957: mol_type = other DNA
atggaggatgtgctgaacttcttctcagattgcaggattagaaatggggaaaacggcatacacttcctgctgaacagggatggaaaaaggaggggtgacgccctgattgagatggagagcgaacaagatgtgcagaaggctttggagaagcatagaatgtatatgggacagcggtatgtggaagtgtatgagattaataatgaagatgtggatgctctgatgaaatcgctgcaggtgaagtcctcgcccgtagtgaatgatggagtcgtgagactccgtggattgccttatagctgtaatgaaaaggacatcgtggatttcttcgcaggcctgaacatcgtggacattactttcgtcatggactatcggggacggaggaagacaggagaggcctatgtgcagttcgaagaaccagaaatggcaaatcaggccttgctgaaacatcgcgaggagattggcaacagatacatcgagatttttcctagtcgaaggaatgaagtgagaacccacgtgggcagttacaaaggcaagaaaattgcttccttccccaccgctaaatacatcacagaacctgagatggtgttcgaagagcacgaagtaaatgaagacattcagcccatgacagcttttgaatccgagaaggagatcgaactgccgaaagaagtaccagagaaactacctgaagccgctgactttggcacaaccagtagcctccactttgtgcatatgagggggttgccatttcaggcaaacgctcaagacataattaactttttcgcccccctgaagcccgtccgaattaccatggagtacagcagttcagggaaggcgaccggcgaggcagatgtccacttcgaaacccatgaagatgccgtggccgccatgctgaaggataggagccatgtgcatcatagatatattgaactatttttgaatagctgccccaagggaaagtag

SEQ ID NO: 119046 - DNA, 1254 bp, synthetic construct
  misc_feature 1..1254: note = Description of Artificial Sequence: Synthetic coding sequence
  source 1..1254: mol_type = other DNA
taacctcccccttctaccttatgttcctattgggcactcgagcagggtaagctctcccaagcatccgggctccttttggtcctgttctcacccagagtgagcggcagactgggatcagtgtcggtggccggcgtgaacgtggaggcccttttccctgcctggccaatggagtcgaagaccacatacctggaagacctgcctccacccccagaatatgaactggccccttcaaaactcgaagaagaggtggacgatgtgttcctgataagagctcagggcctgccttggagttgtacaatggaagatgtgctgaatttcttcagcgattgccgtatccgaaatggtgagaacgggatccactttttattaaatcgagatgggaaaagacgcggggatgcattgatcgaaatggaatctgagcaagacgtgcaaaaagcactcgaaaaacaccgaatgtacatgggccagcggtatgtcgaggtgtacgagattaataacgaggatgtggatgccctgatgaagtccctgcaagtaaagtcctcacccgtggtaaatgacggggtagtgaggctccgcggtttgccttattcgtgtaacgagaaggatatcgttgacttctttgctgggctgaatatcgtggacatcacgtttgtgatggattatcgtgggcggcggaagactggagaggcgtacgtgcagttcgaggagcccgaaatggctaaccaggcactccttaagcaccgtgaggagataggcaacagatacatcgagatattcccatctcggcgtaatgaggtgagaacacacgtcgggtcctataaagggaaaaagattgccagctttcccacggcaaagtacatcactgagcctgaaatggtgtttgaggagcacgaggtgaacgaggacatccaacccatgacagcatttgagtcagagaaggaaatcgaactccctaaagaagtacctgagaaactacccgaagctgccgacttcggcaccaccagcagtctacacttcgtgcatatgaggggcctgccctttcaggccaacgcacaggacatcatcaatttttttgctccattaaaacccgtccgcatcactatggaatattcttcaagtggtaaggccacaggtgaagccgacgttcattttgagacacacgaggacgctgtggctgccatgctgaaagaccgttctcacgtgcaccaccggtatatcgagctgttcctgaattcatgtcctaaggggaaatag

SEQ ID NO: 119047 - DNA, 1239 bp, synthetic construct
  misc_feature 1..1239: note = Description of Artificial Sequence: Synthetic coding sequence
  source 1..1239: mol_type = other DNA
atggccggaactagatgggtgctgggggcactattgagaggttgtgggtgtaattgcagctcttgcaggcgcaccggcgctgcatgtctgcccttctattccgccgcaggctcaattccggctgcagcagtcccgacaaggtcttactcacaggaatctaaaaccacttatctggaagatctgccaccacctcccgagtatgagctggccccctctaaattagaggaagaagtggacgatgtcttcctgatcagagcccagggactgccctggtcctgcaccatggaagatgtgctgaacttcttcagcgattgccgtatccgaaacggggagaacggcatccatttcctgctcaatagagacggcaaacgacgcggggacgctctcatcgagatggagtctgagcaggatgttcagaaggccctcgagaagcacaggatgtacatgggccagcgctacgtggaggtctatgaaatcaacaacgaggacgtagacgctctcatgaagagcttgcaggtcaaaagctcacccgtcgtgaatgacggagtggtgcggttgcggggtctcccatactcatgtaatgaaaaggacatcgtggacttctttgcggggctcaacatcgtggacatcacatttgtgatggactaccgcggcagacgaaagactggcgaagcttatgttcagttcgaagaacccgagatggcaaatcaggctctgctaaaacaccgggaggaaatcggaaatcgctatatcgaaatttttccctctagaaggaacgaggtgcgtacccacgttggcagttacaaaggtaaaaaaattgcttcattccccaccgcgaagtacattaccgagcctgaaatggtgtttgaggaacatgaagtgaatgaggacattcaacccatgaccgccttcgagtctgaaaaagagatcgagttgcccaaggaggtccctgagaagctgccagaagcagccgatttcgggacaactagttctctgcattttgtacacatgcgtggtttaccattccaagccaacgcccaggatatcataaacttctttgctcctctaaagcccgttagaattactatggagtacagcagtagcggtaaagctaccggggaagcggatgtgcactttgagacccacgaagacgccgtggctgcgatgctgaaggataggtctcatgttcaccaccggtatatcgagttattcctgaactcctgcccaaagggcaagtag

SEQ ID NO: 119048 - DNA, 1089 bp, synthetic construct
  misc_feature 1..1089: note = Description of Artificial Sequence: Synthetic coding sequence
  source 1..1089: mol_type = other DNA
atggagtctaagaccacatatctggaagacttaccgccaccacccgaatacgaattagctccatctaaacttgaagaggaggtggacgacgtgtttctgatcagagcacaggggctgccatggtcctgcactatggaggatgtgctgaatttcttctctgactgtaggattcgaaacggagagaatggaatccacttcctgcttaatagagatggcaagcggcgcggcgatgcattaatagagatggagtcggaacaggatgttcagaaagccctggaaaaacaccggatgtatatggggcagaggtatgtcgaggtgtacgaaatcaacaatgaggatgtggatgccctgatgaagtccctgcaggtgaagtcatctcccgttgtgaacgacggcgtggtgagactccggggcctaccatacagctgcaatgaaaaggacattgtggatttttttgctggactgaacatcgtggacataactttcgtgatggactatagagggagaagaaaaaccggggaggcatatgtccagttcgaagaaccggagatggctaaccaggctctcctgaagcaccgggaggagataggcaaccgctatatagagatatttcctagcaggaggaacgaggtgcgcacacatgtgggatcatacaagggcaagaagatcgccagctttcccaccgctaaatatatcaccgagccagagatggtgtttgaggaacacgaagtgaacgaggatatacagcccatgaccgcatttgagagcgagaaagagattgaactgccaaaggaggtgccggaaaagctgccagaagctgccgatttcggtacaacttctagcctgcacttcgtacacatgcgcggattgcctttccaagcaaacgcgcaagacatcataaatttcttcgcaccgttgaaacctgtgcggatcactatggagtatagcagctccggcaaggcaaccggggaagccgatgtgcacttcgaaactcacgaggatgccgtggcagctatgctaaaagatagaagtcatgtccatcacaggtatattgagcttttcttaaacagctgccctaaaggaaaatag

SEQ ID NO: 119049 - DNA, 1401 bp, synthetic construct
  misc_feature 1..1401: note = Description of Artificial Sequence: Synthetic coding sequence
  source 1..1401: mol_type = other DNA
atgctaaggtctactagtaccgtgacattgctcagcggaggagctgccaggaccccaggtgcaccgtccaggagggccaatgtctgccggctccgtctaaccgtcccccccgaatcccccgtgcccgagcaatgcgagaaaaagatagagcggaaggagcagttgttagatctgagtaacggcgaacctacgaggaaactgcctcagggagtcgtgtatggcgtggtgaggcgatcagaccaaaaccagcaaaaagagatggtcgtttacggctggagcacaagtcaactcaaggaagaaatgaattacataaaagatgttagagctaccctggaaaaagttcggaagcgaatgtacggagactacgatgagatgcgacagaaaattcgccagctgactcaggaactttccgttagtcatgcacaacaagaatatctagaaaaccatattcagacacagtcgagcgctctggaccgctttaacgctatgaattccgcactcgcctccgactctattgggctccagaagactcttgtggatgtgacattggagaattccaacattaaagaccaaatccggaacctacaacagacctatgaggcctccatggacaagcttagggagaaacagcgacagctggaggtggcccaggtggagaatcaactattgaagatgaaggtggagtcgagtcaggaggccaatgctgaagtgatgagggaaatgaccaagaagctctacagccagtatgaggagaaactgcaagaagagcagaggaagcactccgctgagaaggaagctctgctcgaggaaaccaactcatttcttaaggcaattgaggaagctaacaagaagatgcaggctgccgagatttcgcttgaagaaaaagaccagaggatcggggagttggaccggctgatcgagcgcatggagaaggaaagacaccagctacagctgcaattgctagagcatgagacagaaatgagtggagaactgactgattctgacaaagagcggtatcagcagctggaggaagcatccgctagtttgcgcgagagaataagacacctggatgatatggttcattgccagcagaagaaagtgaaacagatggtcgaggagattgagtcgttaaaaaaaaagctccagcagaaacagttactgatactgcagctgctcgaaaaaatctccttcttagaaggagagaataatgagttgcaatccagactcgactatctgacagagacccaggccaaaacggaggtggaaacccgcgagatcggggtggggtgtgatctgctaccctcgcagacaggtaggacccgggaaatcgtaatgccttcaaggaattatactccctatactcgcgttttggagctgacaatgaagaagacactgacctag

SEQ ID NO: 119050 - DNA, 1194 bp, synthetic construct
  misc_feature 1..1194: note = Description of Artificial Sequence: Synthetic coding sequence
  source 1..1194: mol_type = other DNA
atgctgcgctccacatcgacggttacgctgttgtccgggggagccgcaagaacccccggcgcccccagtcgacgagctaatgtgtgtcgcctcaggttgaccgttccccccgagtcgcctgttcctgagcagtgcgagaaaaagatcgagcgtaaggagcagctgctggacctgtccaatggggagcctacccgtaaattgcctcagggcgtggtgtatggtgtggtcaggagatctgaccagaatcaacagaaggaaatggtggtgtatggctggtctacatcacaacttaaagaggaaatgaattatatcaaggacaagacactagtcgacgtgacattagagaatagtaacataaaagatcagatccgtaacctccagcagacgtacgaggcatccatggacaaacttcgagagaaacagagacagctggaggtcgctcaagtagaaaaccagttgctgaaaatgaaggtggaatcatcccaggaggctaacgccgaagtgatgagggagatgaccaagaagctatactcgcaatacgaagaaaaacttcaagaggaacagcgtaaacatagtgctgagaaggaagccctgctggaagagaccaactcctttctcaaagctattgaagaggccaataagaagatgcaggcagcggaaatctctctggaggagaaagaccagcggatcggtgagctcgacaggctgatcgagcgcatggaaaaagagagacaccagctgcagctgcaactgctggagcacgaaactgagatgagcggcgaattgaccgactctgacaaggagaggtaccaacaactagaagaggcatctgccagtttacgtgaacgtattaggcaccttgacgacatggtgcactgccagcaaaaaaaggtgaagcaaatggttgaagagatcgagtcccttaaaaagaagctgcagcagaagcagcttctgatcctgcagctccttgaaaagatcagctttctcgaaggagaaaacaatgagctgcagtcacgactcgattatctgaccgagacccaagctaagaccgaagttgagacgcgggaaatcggggttgggtgcgatctcttaccttcacagaccggccgaacccgggagatagtaatgcccagtagaaactacactccttacaccagagtgcttgagctgacaatgaagaagacactaacatag

SEQ ID NO: 119051 - DNA, 1248 bp, synthetic construct
  misc_feature 1..1248: note = Description of Artificial Sequence: Synthetic coding sequence
  source 1..1248: mol_type = other DNA
atgctccgttctaccagtaccgtgacacttctgtctggcggggcagcacgaactccaggagcaccttcgcgccgagccaacgtctgccggttgcgactgaccgtgcctcccgagtccccagtccctgaacaatgcgaaaaaaagattgagcggaaagagcaactgctagatctctctaacggtgagccaaccaggaaacttccccaaggggttgtgtatggtgtcgtgagacggagtgatcagaatcaacagaaggagatggttgtgtatggttggtcaactagccaacttaaagaagaaatgaactacattaaggatgtatctcacgctcagcaggaatacttagagaaccatattcagactcagtccagtgcactggaccgctttaacgccatgaactccgccctggcgtctgattccatagggctgcagaagactctagtggacgtgactctggagaatagtaacattaaggatcagatccggaatctccagcagacttacgaggcttccatggacaaactcagagaaaagcagcggcagctggaggtggcccaggtggaaaatcagctcttaaagatgaaagtggagtcctcccaggaagctaatgctgaggtgatgagagagatgacgaaaaagttatattcgcaatatgaggaaaagctgcaggaggagcagcgaaaacacagcgctgaaaaagaggccctattagaagagaccaacagcttccttaaggctatcgaggaggctaacaaaaagatgcaagctgccgagatttctctggaggagaaagaccagagaatcggagagctcgatagattaattgaacgcatggagaaagagcgtcaccagcttcaattacagttgctggaacacgagacagagatgtcaggagagctcaccgattctgataaggaaagatatcaacagctggaggaagcaagcgcatcgttgcgagaacgtattagacacctggatgatatggttcattgtcagcagaagaaggtgaaacagatggtggaagagaataatgaattacaaagtaggttagactatctcaccgagacccaggccaaaacagaagtggagactagggagatcggcgtaggttgtgacctcctgccccggcagtcaagaaagtttgagaaagttctcaacgaattcgtacagctcttgcctttgccccaccatctgctctgggctttcggcaacgtttgttggagacgccatttcgggcttctgcagtag

SEQ ID NO: 119052 - DNA, 1317 bp, synthetic construct
  misc_feature 1..1317: note = Description of Artificial Sequence: Synthetic coding sequence
  source 1..1317: mol_type = other DNA
atgctgcgctccacttccacagtcaccttgctgagcggaggagctgcccggacacctggggcccctagcaggcgcgccaacgtgtgtcggctgcgactaacagtcccacctgagtcacccgttcccgagcaatgcgagaaaaaaattgagagaaaagagcagctgttggacctgtctaatggagagcctacccggaagctgcctcagggagtcgtatatggcgtggtgcggaggtctgaccaaaatcagcagaaagagatggtggtttacggctggagcacatcccagttaaaagaagagatgaattacataaaggacgtcagggctactctggagaaagtcaggaaacggatgtacggtgactatgacgaaatgcgccaaaaaattagacagctgactcaggagctgtccgtctctcatgcacagcaggaatatctcgaaaaccatattcaaacccagtcgtctgcactggaccgctttaacgctatgaattcagcactcgcctccgattctattgggcttcagaagacactggtcgatgtgactctcgagaatagcaatatcaaggaccaaattcgaaatctccaacagacttacgaggcctcaatggataagcttcgggagaagcaacgccagctggaagtggcccaagttgagaatcagctgcttaaaatgaaggtagagtctagccaggaagcaaacgctgaagtcatgcgcgagatgaccaaaaaactgtacagccagtatgaagagaaactccaggaagagcagcgcaaacactctgctgaaaaggaagctctgctcgaggagaccaattccttcctgaaagctatcgaagaggctaataaaaagatgcaggcagccgagattagcctggaagaaaaagatcagcgtattggggagctggacagattaatcgagcgcatggagaaggagcggcaccagctgcagctgcaactgctggagcacgagactgaaatgtccggggagctgactgactccgacaaggaacgatatcaacagttggaagaggcctccgccagcttaagggagcgaatccgccatctggatgacatggtacattgccagcagaagaaagtgaagcagatggttgaagaaaacaacgaactgcaaagtagactggactacttgaccgagactcaggcgaaaacagaggtagaaacacgcgaaatcggggttggttgcgatcttctgccatcacagacagggagaaccagagaaatagttatgccatctcgaaattataccccatatacgcgcgtcctggagcttaccatgaagaaaactttaacatag

SEQ ID NO: 119053 - DNA, 1338 bp, synthetic construct
  misc_feature 1..1338: note = Description of Artificial Sequence: Synthetic coding sequence
  source 1..1338: mol_type = other DNA
atgttacggagcacatccaccgtcaccctgctgagcggaggcgccgcaaggacccctggtgcccctagcagaagagccaacgtgtgtagactgagactcaccgtgcctcccgaaagcccagtgccggaacagtgtgaaaaaaagattgagagaaaggagcagctgttggatctgtcaaacggcgagcctacccgaaagttgccccagggcgtggtctatggagtggttcgccgttccgatcagaaccagcagaaagagatggttgtgtacggttggtcaaccagtcagctgaaggaagagatgaactacattaaggacgtgagagctacactggagaaagtgcgaaagcgcatgtacggggactatgacgaaatgagacaaaaaatcaggcaacttactcaggagctatcagtgtcccatgcccagcaggaatacctcgagaatcacattcagactcagagcagcgccttggatcgtttcaacgccatgaacagcgcccttgcctcggattctataggcctacaaaagacgctggtcgatgtgacgctggagaactctaacatcaaagatcagatccggaacctgcagcagacctacgaggcctccatggataagttgagggaaaagcagcgccagctggaagtggcccaagtggagaaccaactcttgaaaatgaaggtcgaaagcagccaggaagcgaatgctgaagtgatgcgggagatgacaaaaaaattgtattcccagtacgaggaaaaacttcaggaggagcagcgaaaacatagtgccgagaaagaggctctgttagaggagacaaactccttcctgaaagccatcgaagaggccaacaagaagatgcaagccgcagaaatttcactggaagaaaaagatcagcggatcggggagctggatcgattaatcgagcggatggaaaaagaaaggcaccagctccagctccagctgctggagcacgagactgaaatgagtggcgaactgactgactccgacaaggagcgttatcaacaactggaagaagctagcgctagcctccgggagcgcattcgccacctcgacgatatggttcactgccagcaaaagaaggtaaaacagatggtcgaggagatcgaatccctgaaaaagaaactgcagcaaaaacagctcctcattctgcagctcctcgagaagattagtttcttagagggggagaataacgagttgcagagcaggttagactacctgacagagacccaagcgaagacagaagttgagacacgcgagatcggagttggttgtgatctgctgcctagacgatgcaaacagagcagccagcgcaagaattag

SEQ ID NO: 119054 - DNA, 1653 bp, synthetic construct
  misc_feature 1..1653: note = Description of Artificial Sequence: Synthetic coding sequence
  source 1..1653: mol_type = other DNA
atgctgagatcaacctccacagtgaccctgctgagcggcggcgccgcccgaaccccaggtgccccatcaaggagagctaatgtttgtagactgcgactgactgtgcctcctgagtcacccgttccagagcagtgtgagaaaaaaattgagcgtaaagagcaattattagacctgagcaacggcgaacccacaaggaaactgccgcaaggggtggtgtatggcgtggtgaggcgcagcgaccagaatcagcagaaagagatggtggtttatggctggtctacctctcagttaaaagaggaaatgaactacataaaagacgtgagggcaaccttagagaaagtgcgcaaaaggatgtacggcgactacgatgaaatgaggcaaaaaatccgccagctaacccaggaactaagtgttagccacgcccagcaggagtatctggaaaaccacatccagacgcaatctagtgcactggaccgctttaacgctatgaactctgccctggcgtcagacagcattggtctccaaaagactctcgtagatgtcactctggagaattccaacattaaggatcagatccggaacttgcagcaaacctacgaggcttccatggataaattacgggaaaaacagagacaactggaagtggcccaggtggaaaatcagcttcttaagatgaaggtcgagtcttcgcaagaggccaacgccgaagtgatgagggaaatgaccaagaagctgtattcacagtatgaggagaagcttcaggaggagcagcggaagcactcagccgagaaagaggcactgctggaggagacaaactccttcttaaaggccatcgaggaggccaacaaaaagatgcaggctgcagagatttcgctcgaagaaaaagatcaaagaataggagagttagatcgcctcatagagaggatggaaaaggagagacaccaactgcagttgcagctgctggaacatgaaactgagatgtctggcgaactgacagattccgacaaggagaggtaccagcagttggaagaggcgtccgcttcactcagagagagaatcaggcacctcgatgatatggtccattgtcagcagaagaaagtgaaacagatggtcgaagaaatcgaatcgctgaagaaaaaacttcagcaaaagcagctgctgattctccaactgttggagaaaatctcattcctcgaaggggaaaataacgaactgcagtcacgattggattacctgacagaaacccaggccaaaactgaagttgagacacgtgagatcggggtggggtgcgacctcttgccgcggctgcccttccgacagaatgattcatcaagccactgtcagaagagtggcagtccaatttcctctgaggagcgccgcaggcgtgacaaacaacatctcgacgacatcaccgctgcaaggcttctgcctctgcatcacatgcccacccagttgctgtccattgaggagagcttggctttacagaaacagcaaaagcagaactatgaggaaatgcaggccaagctggccgctcagaaactcgctgaaaggctgaacatcaaaatgcggagctataatcccgaaggcgaaagctcaggcaggtaccgggaggtgagggacgaggatgacgactggtcctctgacgagttctag

SEQ ID NO: 119055 - DNA, 1308 bp, synthetic construct
  misc_feature 1..1308: note = Description of Artificial Sequence: Synthetic coding sequence
  source 1..1308: mol_type = other DNA
atgctgcggagcacctctacagtcactctcctgtctggaggggctgccaggaccccaggtgcacctagccgccgcgccaacgtgtgcagactgagactgacagtgcctcccgaaagtccagtccctgagcagtgcgaaaagaagattgagagaaaggagcagcttcttgaccttagcaatggagagcctacccggaagttgccgcagggcgtggtgtatggcgtcgtcagacggagcgaccaaaatcaacagaaggaaatggttgtttacggctggagtacttcccagctgaaagaagagatgaactacataaaagacgtgtcgcacgcgcagcaggagtatctcgaaaatcacatccagacgcaatcctccgccctagatcgcttcaacgcaatgaattctgccttggcctcggacagtatcgggcttcagaagacactcgtggacgtgacactggagaactctaacatcaaggaccagattcggaaccttcaacagacctacgaggcaagcatggataagctccgagagaagcagcgccagctcgaggtggcccaagtcgagaaccagctgctaaagatgaaggtggaatccagccaggaagccaatgccgaggtgatgcgagagatgacaaagaagttgtatagtcagtacgaggagaaactgcaggaggaacaacggaagcactccgcggagaaggaagctctcctggaagagaccaatagcttcctcaaggccatagaggaagccaacaagaaaatgcaggccgcagagatcagcctggaggagaaggatcagcgcatcggcgagttggacaggctcatcgaaaggatggaaaaagaacggcatcagcttcagctccagttgctggagcacgaaacggagatgagcggggagttaacagacagcgacaaggaacggtaccagcaactggaggaggcaagtgcctcgcttagggaacgcattcggcatttggacgatatggtgcactgtcagcaaaagaaggtgaaacagatggtcgaagagatagagtccctgaagaaaaagctgcagcagaagcagttgctgattctgcagctgctcgaaaaaatcagttttctggaaggcgaaaacaacgaactgcagtctcgcctggactatctaactgagacacaggccaaaacagaagtggagactagggaaatcggtgtgggttgtgacctcctgcctagccaaaccggacgcacgcgggagattgttatgccttccaggaactacaccccctatacgcgcgtgctggagctgacaatgaagaaaacactcacctag

SEQ ID NO: 119056 - DNA, 1401 bp, synthetic construct
  misc_feature 1..1401: note = Description of Artificial Sequence: Synthetic coding sequence
  source 1..1401: mol_type = other DNA
atgttaaggtctacctctaccgtgaccctgttgtccgggggggcagcacggactccaggagcgccaagtcggcgcgccaatgtatgtcggctgcggctgacagtacccccagagtctcctgtgcctgagcaatgcgaaaagaagatcgaacggaaggaacagctgctggacctctcgaacggtgaaccgacaaggaagctacctcagggggtcgtttacggtgtggtgcggaggtccgaccagaaccagcagaaagagatggtggtgtatgggtggtctaccagtcagttaaaggaagagatgaattatataaaggacgtgcgggccacactggagaaggtgcgaaagcgcatgtatggggattacgatgaaatgaggcagaaaattaggcagctaacccaggagctatcggtgagccatgcacagcaagagtacctcgagaatcatattcagacacagtcgtcggcactggacaggttcaacgcaatgaacagcgccctggcatcagactcaataggactgcagaaaacactggtggatgtaactctggagaattccaatattaaagatcagataaggaacctgcagcagacttatgaggcctccatggacaagcttagagaaaagcagcgccagctggaggtggcgcaggtcgaaaaccagctgctgaaaatgaaggtggaaagcagccaagaggctaatgcagaggtgatgcgcgaaatgacgaagaaactgtatagccagtatgaggagaagttgcaagaggagcagcgcaaacactcagcggagaaggaggctctcctagaggagaccaattcattccttaaggcgatcgaggaagcaaacaagaaaatgcaggcagccgagatcagtctggaagaaaaggatcagcgcataggggagcttgatcgtctcattgaacggatggagaaggaaaggcaccagcttcaacttcagttactagagcacgagactgagatgtccggggagctgacagactccgataaagagcggtaccagcagctcgaggaagcatctgcctctcttcgagaaaggattaggcacctagacgacatggtgcattgtcagcaaaaaaaggttaagcaaatggtggaagaaatcgagagtctgaagaagaagctgcagcagaagcagttgttgattctgcagttactcgagaagatctcattccttgagggggagaataacgaacttcagagtcgtttggattatttaaccgagacacaggccaagacggaggttgagactcgtgagatcggagtcgggtgtgatctgctgccttcccagaccggaagaaccagagaaattgtaatgcccagtcgcaactacacaccttacactcgtgtcttggaactcactatgaaaaagaccctcacttag

SEQ ID NO: 119057 - DNA, 1317 bp, synthetic construct
  misc_feature 1..1317: note = Description of Artificial Sequence: Synthetic coding sequence
  source 1..1317: mol_type = other DNA
atgctgcgctccaccagcaccgtgacactgctaagcggaggcgctgcccgcactcctggggcacctagccgccgggcaaacgtttgccgattgaggctcaccgtgcctcccgagtccccggtcccagagcagtgcgagaaaaagatcgagaggaaggaacaactcttagacctgagcaatggtgaaccaacaaggaagctcccacaaggggtcgtctacggagttgtccgacggtccgaccagaatcagcaaaaagaaatggtcgtgtatgggtggtcgacctctcagttaaaggaagagatgaactacataaaggatgtgcgtgcaacactcgagaaggtgaggaaacggatgtacggagattacgacgaaatgcggcagaaaataagacagctcacccaggaactgtctgtgagtcacgcgcagcaggagtacttggaaaaccacattcagacacagtctagcgcccttgatagattcaacgccatgaattcagccctggcatctgattctatcggcttgcagaagaccctcgtggacgtcactctggagaatagcaacatcaaagaccaaattcgaaatctccagcaaacttatgaagcctctatggacaagctgcgcgaaaagcagcggcagctggaagttgcccaggtagagaaccaactcctgaagatgaaggtcgagagcagtcaagaagccaacgccgaagtgatgagagagatgacgaaaaagctgtacagccagtacgaagaaaagctgcaagaagagcagcggaagcactccgccgagaaggaggcactcctggaggagaccaattcattcctgaaggcaatcgaggaggcaaataaaaagatgcaggccgccgaaattagcctagaagaaaaggaccagagaattggagaactggaccggctgatagagaggatggaaaaagaacggcatcagctgcaactccaacttctcgagcatgaaactgagatgtctggcgagctgacagactcagacaaagagcgctaccagcagctcgaagaggcttccgcctcactcagggaaaggataagacacctcgatgatatggtccactgtcagcagaaaaaagtcaaacagatggtggaagaaaacaacgagctgcagtctcggctcgactatctcacagagacccaggctaaaactgaggtcgagactcgcgagattggagtgggctgcgatttgctgccctcccagactggcagaaccagggagatcgtgatgccgagtcgtaactacacaccttatacgcgcgtgctggaattaaccatgaagaagactcttacttag

SEQ ID NO: 119058 - DNA, 1401 bp, synthetic construct
  misc_feature 1..1401: note = Description of Artificial Sequence: Synthetic coding sequence
  source 1..1401: mol_type = other DNA
atgttgcggagcacatcgaccgtgaccctgctgagtggtggtgccgctagaacccctggagcaccctccagaagagccaatgtgtgtagattgaggcttacagtcccaccagagtcccctgtgcccgagcagtgtgagaaaaaaatcgagagaaaggaacagctactcgatctgtccaatggagaacctacgcgcaagctgccccagggcgttgtgtacggtgtcgtgcgaaggagtgaccaaaatcagcagaaggaaatggtggtatatggatggtctaccagtcagctgaaggaggagatgaattatatcaaggacgtcagagccacactggagaaagtgcgaaagcggatgtacggcgattatgatgaaatgcgccaaaagattcgtcagctcacccaggaactctccgtctcccatgcgcagcaggagtatcttgagaaccacattcaaacgcagtcttctgctctggatagattcaacgctatgaattccgccctggcttcggattctatcggccttcagaagaccctggtggatgttacacttgagaattctaatataaaggaccagataagaaacctccagcagacgtacgaggcctctatggacaagctgcgtgaaaaacagcgccagctagaggtggctcaagtggagaaccaactactaaaaatgaaggtcgagtcttcgcaggaggcaaacgcggaggtcatgagagaaatgaccaagaaactgtactcacagtatgaggagaagctgcaggaagaacagcgcaaacatagtgcagaaaaggaggctttacttgaggagacaaatagtttcctgaaggctattgaggaagccaacaagaagatgcaggcagctgagattagcttggaggagaaagaccagagaatcggcgaactggaccggctgattgagcgtatggagaaggagagacaccaactccagctgcagctccttgaacacgagaccgagatgtcaggagagcttactgactctgacaaggagcggtatcaacagctggaggaggccagtgcgtcgctgcgggaaagaattaggcaccttgacgacatggtccactgccagcagaagaaggttaagcagatggtggaagagatagagagcctgaaaaaaaaactgcagcagaagcagctacttatcctccagctcttggagaagatttcttttttggaaggagaaaataatgagcttcagagccgtttggactacttgactgaaactcaggccaaaaccgaggttgaaacaagagaaattggagttgggtgcgacttgcttccaagccaaacaggtaggacccgagagatcgtcatgccatctcgtaactacactccctatacgagagtattggagttgactatgaagaagacacttacctag

SEQ ID NO: 119059 - DNA, 2328 bp, synthetic construct
  misc_feature 1..2328: note = Description of Artificial Sequence: Synthetic coding sequence
  source 1..2328: mol_type = other DNA
atggagaagtttgggatgaactttggggggggcccttcaaagaaggatcttctggagaccattgagacccagaagaaacagctcctccagtaccaagctcgcctgaaggacgtcgtgagagcatacaaatctttgcttaaagagaaagaagctctagaagcgtcaatcaaagtgctgagcgtctcccatgaggctgacgtgggtctggccggggtgcagttgcccggactcacatttccggactccgtggacgacagatgctctacccattctgaggattctacaggcactgcaactagcctcgacactgctgcaagtctgacatcaacgaagggagagtttggagtcgaggacgaccggccagcacgtgggcccccccccccaaaaagtgaagaagcgagttggagtgagtcgggagtcagctcaagcagcggcgacgggccctttgctggcggcgaggtggacaagcgactgcaccagctgaaaacccagcttgcaactttgaccagcagcctggcaaccgttactcaggaaaaatcccgaatggaagcttcatatcttgcagacaaaaagaagatgaagcaggacctagaggacgccagcaataaagctgaggaagagcgggctagactcgagggagagctcaagggactgcaggaacagatcgcagaaactaaagcaaggctcatcacgcagcagcacgatagggcccaggagcagtccgaccatgcgctgatgctcagggagctgcagaagctcttgcaggaggaaaggacccaacgccaggatttagaactgagactcgaggagacgcgagaggccctcgctgggcgcgcctacgccgctgagcaaatggaaggcttcgaactccagaccaagcagctaactagggaggtggaagagttaaagtctgaactgcaggctattcgggacgaaaagaaccagcctgacccaagactgcaggagttgcaggaggaagccgcgcggctcaagagccactttcaggcacagttacaacaagaaatgagaaagacagctctggccgaggatcagctaagacagcagagtcaggtcgaagagcagagggtggctgccttagaaaaccaaatcagcgaggtttctgaactgcttggcacatacgagaaagctaaacaaaaagaccagttggccattcagaagctcaaggagcggatcctccaattagatctggagaacaagactttagctttggccgccagtagccggagccccctcgacagtcacggcgaggagtcctctctcgacgtcaacgtcttgaaggacaagatggagaaacttaaacggctactccaagttgccgcccggaagagccaggtgaccctcgacgtagaaaagctgtgtgatctggaaataatgccctcatcagaagcagcagacggcgaaaaagcgacagctctgtactatcagcaggagcttaaacagctcaaggaggagttcgaacggtataagatgagagcccaggttgtactgaagagtaagaatactaaggacggtaacctggggaaggaattggaggcagcacaggaacaactggctgagctaaaggagaaatacattagtttgagattatcctgtgaggaactagaacaccagcatcaacaagaggctgacgattggaagcaggaactggctagattacagcagctccaccgccaggaactagaaagatgtcagctggatttcagggaccgtaccctgaagctcgaagaggaactccacaaacagagagacagagccctcgctgtgctgacagagaaagacctggagctggaacagctgagatctgtggcgttggcgtcaggacttccaggacggcgaagccctgtgggcggcggaggcccgggagatccggccgacacaagctcttcggattcgctgacgcaggcactgcagctagcagctgccaatgaacccactttttttctctacgccgagcagttggcacggaaggaggtcgaaataacctcactgagaaagcagaagcatcgcctcgaggtcgaagtacaccagttgcaagatcggcttctggaagagggtgaaaggcatagagaggaggtcgctgcattgcaaagtcatattgagaaaaacattagagatcagtcccgcgaaggtgccaatctggagtacctaaaaaatatcatttataggtttctgacattacctgattctctcggccgccaacagacattgaccgcaatcctgaccattctgcacttttcccccgaggaaaagcaggtgataatgaggctgcccacgtccgctagctggtggccctctggaaagcgatag

SEQ ID NO: 119060 - DNA, 5055 bp, synthetic construct
  misc_feature 1..5055: note = Description of Artificial Sequence: Synthetic coding sequence
  source 1..5055: mol_type = other DNA
atggaagacctggtccaggacggcgtggcatcccccgccaccccagggacaggcaaatccaaactggaaacactgcccaaggaggatcttatcaagttcgccaagaaacagatgatgctcatccagaaggctaagtccaggtgtacagagctggaaaaggaaatcgaggagctccggtctaaacccgtcacagaaggaaccggtgacatcatcaaggcgctgactgagcgcctcgacgctctcttgctggagaaagcagaaaccgagcagcagtgtctgtcattaaagaaggaaaacatcaaaatgaagcaggaggttgaggattcagtaaccaaaatgggcgatgcacacaaggaactggagcaatctcacataaactatgtgaaagagatcgaaaatcttaaaaatgagctgatggccgtgagatcaaaatacagcgaggacaaggctaatctacagaaacagttggaagaagccatgaatacccagctggaactcagcgaacagctcaagtttcagaacaattccgaagataatgtgaagaaattgcaggaggaaattgaaaagatacggcccggattcgaagagcaaattttatacctccagaaacaactggacgccacgacagatgagaagaaggaaaccgtgacacagcttcaaaatattatcgaggccaacagccagcactatcagaagaatattaacagtcttcaggaagaactactgcaactgaaagcaatccaccaagaggaagtcaaggaattgatgtgccagatagaagcctctgctaaggaacacgaggcagaaatcaataagctgaacgagttaaaagagaacctagtgaaacagtgcgaggcatccgagaaaaacatccaaaaaaagtatgagtgtgagctggagaaccttagaaaggccacatcaaacgcaaaccaggataaccagatctgctctatcctgctgcaggaaaacactttcgtcgaacaggttgtcaacgagaaggtcaagcacctcgaggatactctaaaggaacttgagagccagcattccattctgaaggacgaggtaacctatatgaacaatctgaaacttaaactggaaatggacgcccagcatattaaggacgagttctttcatgaacgtgaggatcttgagtttaagatcaacgagctgctgcttgcaaaggaagaacagggatgcgtgattgagaagcttaaatcagaattagcagggctcaacaaacaattttgctacaccgtggagcagcacaatcgggaagtacagagtctgaaggaacagcatcaaaaagaaatctctgagttgaatgaaacgtttttatcagattctgagaaagaaaagcttacccttatgttcgaaattcaaggactgaaggagcaatgcgaaaacttgcagcaggaaaagcaggaggcaattctgaactacgagtcgctccgcgagataatggaaatcctgcaaacagagttgggtgaatcggcaggcaagatttcccaagagttcgagtccatgaaacagcagcaggcgagtgacgtgcatgagctccagcagaaactgcgaactgcattcaccgagaaagacgcgttactcgaaactgtgaatcggcttcagggggagaacgaaaaacttctgtctcagcaggagctcgtgccggaactcgagaacaccataaaaaatctgcaagaaaagaatggggtgtatctgttgagtctatcccagcgagataccatgttgaaggagctggagggaaaaatcaactctctgacagaagaaaaggacgactttattaacaagttgaagaactcccatgaggagatggataattttcataagaaatgtgaaagggaggagcgcctcattctcgagctgggcaagaaggtagaacagaccatacaatacaacagtgagctcgagcaaaaagtgaacgagctgactggggggctcgaagagactctgaaggagaaggaccagaacgaccaaaaacttgagaagcttatggtgcagatgaaggtgctatccgaagataaggaagttctctctgccgaagtcaagtcactgtatgaggagaacaacaaactgtctagcgagaagaaacagcttagtcgcgacctggaggtcttcctgagtcagaaagaggatgttatcttaaaagagcatattacacagctggaaaagaagctacagctgatggtggaggaacaggataacctaaacaagctgctggaaaatgaacaggtacagaaactctttgtaaagacccagctgtatggctttctgaaggaaatgggcagcgaagtgtctgaggattctgaggagaaggatgttgttaacgttcttcaggccgtaggggagagcttagccaaaattaatgaagagaagtgcaatttggcattccagagggatgaaaaggtactcgagctggagaaagagattaaatgtttgcaggaagagagtgtggtccagtgtgaggagctgaaatcactgctgagggactatgagcaggaaaaggtcctgcttcgcaaagagcttgaagaaatccagagcgagaaggaagcattgcagagcgatctgttagagatgaagaacgcaaacgagaagaccaggcttgaaaaccaaaatctgttgatccaggttgaggaggtctcacagacttgctcaaagtctgagattcacaatgaaaaagagaagtgttttatcaaggagcacgagaacctgaagcctctgctggaacagaaagaacttagggacaggcgagcagaactgatcctactcaaggactcattggctaaaagtccctcagttaagaatgaccccttaagttccgtaaaagaactggaagagaaaattgagaacctcgaaaaagagtgcaaggagaaggaggaaaagatcaataaaataaaactggtcgctgtcaaagccaagaaagagctcgactcctctagaaaggagacacagacagtgaaagaggagcttgagtccctgaggagcgagaaagatcaactgtcagccagtatgcgggatcttattcagggagccgagagttataagaacctcttgctggaatacgagaagcagtctgaacagctggatgttgaaaaggagcgcgctaataactttgagcaccgcatcgaagacctgacccgccaattacgcaactctaccctgcagtgcgagactataaattcagacaacgaggacctgctcgcaaggattgagacgctacagtcaaacgccaaactcttggaggtgcaaattctggaagttcagcgcgcaaaagccatggtggacaaggagcttgaagctgagaagttgcagaaagaacagaaaattaaggagcacgccactaccgtaaacgaactcgaagaacttcaagtgcagcttcagaaacagaaaaagcagctgcagaagactatgcaggaacttgagctggtcaaaaaagatgcgcagcagaccactctcatgaatatggaaatcgccgactatgaacggctgatgaaagagttgaaccaaaagctgaccaataaaaataacaaaatcgaggatcttgaacaggagatcaagattcagaagcagaaacaggaaacactgcaggaggagatcacaagtctccagtcaagcgtgcaacagtatgaagagaaaaacaccaagatcaagcagctcctcgtgaagacgaagaaggagctggccgactctaaacaggccgagaccgaccatttaatcttgcaggcaagtctaaaaggcgagctggaggcatcccagcagcaagtggaggtttataaaatacaactggccgagattacctctgagaagcacaagattcacgaacacctgaaaacatcagcagaacagcatcagagaaccctgagcgcctatcagcagagagtcaccgccctccaagaggaatgccgcgcagctaaagcagaacaggccactgtgaccagcgagtttgagagttacaaggtcagggtccacaacgtcttgaaacaacaaaaaaataaaagtatgtctcaagctgagactgagggcgccaagcaggagcgtgaacaccttgagatgctaatagatcaactcaagattaagcttcaggactcccagaacaatctgcagattaatgtcagcgaattgcagactctacagagcgagcacgacactttgctagagcggcacaacaaaatgctccaggagacggtgagtaaggaagccgagttgcgggagaaactctgttccatccagagcgagaatatgatgatgaagtccgaacacacccagaccgtctctcagctgaccagccagaacgaggtgctgcgtaattcttttcgtgaccaggtgcggcatctacaggaggaacataggaaaaccgttgaaaccctgcagcagcagcttagcaaaatggaagcccagcttttccagttgaaaaacgaacctaccacacgttctccagtaagtagtcagcagagtctgaagaatcttcgtgagagaaggaacaccgatctcccccttctggacatgcacacagttaccagggaagaaggagagggtatggagaccactgacaccgaatcagtgtccagcgcaagcacttatactcagtcactagaacaactgctgaacagcccagaaactaagctcgagccgcctctgtggcatgccgaattcacgaaggaagaattggtgcagaaactgagctctactacaaaatctgcagaccatttgaacggtctgttgcgagagacagaagcaacaaatgccatactgatggagcagattaaattgctcaagagtgagattcgtagacttgagagaaaccaggagcgagaaaagagtgcagcgaacctggagtatcttaagaacgttctgctgcagttcatctttctgaagcccggtagtgagagagagcgcctcctccctgtcatcaatactatgttacaactctcacccgaggaaaaagggaagctggcagccgttgctcagggggaagaggaaaacgcctccagaagttcaggttgggctagctatctgcactcctggtctggcttgcgttag

SEQ ID NO: 119061 - DNA, 2052 bp, synthetic construct
  misc_feature 1..2052: note = Description of Artificial Sequence: Synthetic coding sequence
  source 1..2052: mol_type = other DNA
atgtgtcagatcgaggcctccgccaaggaacacgaggctgaaatcaacaagttgaacgaactcaaggagaatcttgtgaagcagtgcgaagccagtgaaaaaaatattcagaagaagtatgagtgtgaactggaaaatttaaggaaagcaacttcaaatgccaatcaggacaaccagatttgctcaatcctgttgcaggagaacaccttcgtcgagcaggtagtaaatgagaaggttaaacatctggaagacacactaaaggaactggaaagtcagcactccatcctgaaagacgaggtcacgtatatgaataacttaaaacttaaattagaaatggacgctcaacacatcaaggacgaattcttccatgagagggaggacttagagttcaaaataaatgagttgttgttggcaaaggaggaacagggttgcgtgattgaaaaacttaaaagtgagcttgccggcctgaataaacagttttgctacactgttgaacagcataaccgcgaagtccagtccctgaaagagcagcaccagaaagagatctccgagctgaacgaaacttttctgtccgattctgagaaggagaagctcactctcatgtttgaaatccagggcctgaaagagcagtgtgaaaacctccagcaggaaaaacaggaggcaatcctcaactatgagagcctgagagagatcatggagatcctgcagactgaacttggagaaagcgccggaaagatctcccaggagttcgagtccatgaagcagcaacaggcctctgacgttcacgagcttcagcagaagttgcggactgcttttaccgagaaggatgcgctgcttgagaccgtgaaccgcctccaaggggaaaacgagaagttgctctcccagcaggagcttgtccccgaactggaaaatacgatcaaaaatttgcaggaaaaaaatggagtgtatcttctgtcccttagccagagagacacgatgttgaaggagctcgaagggaagatcaattctctgaccgaagagaaggatgattttattaataaattaaaaaatagccacgaagagatggataactttcataagaagtgcgagcgcgaggaaagacttattctggagcttggcaagaaggtagaacaaacgatccagtataatagcgagctggaacagaaggtcaatgaactgacaggaggcctggaggagactctcaaagaaaaggatcaaaacgatcagaagttggaaaagttgatggtccagatgaaagtcctttctgaagacaaggaagtcctctccgccgaagtcaaaagtttgtatgaggagacaattaattcagtccagaagaagcaactttctcgagacttggaggtttttctgagtcagaaagaagacgttattctgaaagaacacatcacccaattagagaagaagctacaacttatggtggaagaacaggacaacctcaataaattgttagaaaacgaacaggtacaaaaacttttcgttaaaacacaactctacggcttcctcaaggaaatgggaagtgaggtcagtgaggactcagaggagaaagacgtcgttaatgttttgcaggccgttggggaatcactggcaaaaattaatgaggaaaagtgcaatctggcttttcagagggacgaaaaggtactggaactagagaaggagattaaatgtctccaagaggaaagtgtggtccaatgtgaggagctgaagtctttacttcgtgactacgaacaggagaaggtcctgttgcgtaaagaactggaggagattcagtcagaaaaggaggcactgcaaagcgacctgctggagatgaaaaatgctaacgaaaaaacccggcttgagaaccaaaacctcctgatacaggtggaggaggttagtcaaacatgcagcaagagcgaaatccacaatgaaaaggagaagtgctttattaaggaacacgagaacctgaagcctctcctggaacagaaggagctgcgcgacagacgggctgaactcatcttacttaaggactctttggctaaaagtcctagcaagaagtag

SEQ ID NO: 119062 - DNA, 1347 bp, synthetic construct
  misc_feature 1..1347: note = Description of Artificial Sequence: Synthetic coding sequence
  source 1..1347: mol_type = other DNA
atggaagatctggtccaagatggcgtggcatcacccgcgactccgggcacagggaagtcaaagctggaaacactgccaaaagaggacctcatcaaatttgcgaagaaacagatgatgctcatccaaaaggcaaagtcgaggtgcactgaattagagaaagaaattgaggagctgcgctctaagccggtcacagaagggaccggtgatataattaaggctctaaccgaacggctggatgcgttacttttggaaaaagcggaaacggagcaacaatgcctgagcttaaagaaagaaaacattaaaatgaaacaggaagtagaggactccgtgactaaaatgggagacgcccataaggagcttgagcagtcccatattaactatgttaaagaaatcgaaaatttgaaaaatgagttaatggccgttcggtctaaatacagcgaggacaaggctaatcttcagaagcagctggaggaggctatgaacacacaactcgaattgtccgaacagctgaaatttcagaataattctgaagacaacgttaagaaattgcaggaggaaatcgagaagataagacctggctttgaggagcaaattttgtatttacagaagcagctggatgccactacggacgagaagaaggaaaccgtgacacagctacagaatatcatcgaagccaactcccagcactaccaaaaaaacattaacagtctgcaggaggagctactccagctcaaggctatccatcaagaggaggtcaaggagctaatgtgtcaaattgaggcgagcgcaaaagagcatgaagctgaaatcaacaagctgaacgagttgaaggaaaatctggtgaagcaatgtgaggcttccgagaagaacatccagaaaaaatacgaatgtgagctcgagaacttacgcaaggccacgtccaacgcgaaccaggacaatcaaatctgctcgattctcctgcaggagaacacctttgtcgagcaggtggttaacgaaaaagtgaaacatctggaggacacactcaaagagctggaatctcaacactcgatcctgaaggatgaggtaacctacatgaataacctgaaactgaaactggagatggacgcccaacatataaaggatgagtttttccatgagagggaagacctcgagtttaagattaacgagctgctacttgctaaagaagagcagggctgcgtaatcgagaaattgaaatctgagctggcaggcctgaacaagcagttttgctacaccgtcgagcaacacaatcgggaggtgcaaagtttgaaagagcagcatcagaaggagataagtgaactaaacgagacgtttctgtctgactcctag

SEQ ID NO: 119063 - DNA, 1878 bp, synthetic construct
  misc_feature 1..1878: note = Description of Artificial Sequence: Synthetic coding sequence
  source 1..1878: mol_type = other DNA
atggcccaggctctgagtgaagaagaatttcagcgcatgcaggctcagctgttagaactgcgaacaaataactaccagttgagtgatgaactacgcaaaaatggtgtcgagctcactagcctgcggcagaaagtggcttacctggataaggaattttctaaggctcaaaaggccctgagtaagagcaaaaaggcccaggaggtggaggtgctgctctctgagaacgaaatgctgcaagcaaagctccactcccaggaggaagactttagactccagaattccacactcatggcagaattctccaaagaaagatatggaaaagaggctggcaagttctcagccgtcagtgaaggccagggggaccccccagggggtccagctcctactgtcctcgcaccaatgcctctcgccgaggttgagttgaagtgggagatggaaaaggaggagaagaggctgctgtgggagcagctccaggggctcgaatcctcaaagcaagctgaaacgagtcgtttacaggaggaactggcaaagctttcagagaaactgaagaaaaagcaggagtccttctgtcgcctccaaaccgagaaggaaacactgttcaatgactccaggaacaagatagaagaactccagcagcggaaggaggctgaccataaagcccagctggctagaacccagaaactacagcaggagctggaagcagctaatcagagcctggcagaactgagggatcagaggcagggtgagcgcctagaacacgcggccgcgctgagggccctccaggaccaggttagtatacagtcggctgacgcccaagagcaagtggaaggcttgcttgctgaaaacaacgccttgcgaacatcccttgccgcactggagcaaatccagaccgccaaaacacaggagttgaacatgttgagggaacaaactaccggactcgccgcagagcttcaacagcaacaagccgagtacgaagaccttatgggacagaaggacgaccttaatagtcagctgcaggaatcgctgagggcaaactcgcgcttgctggagcagttacaagagatcggtcaggagaaggaacagttgacacaggagcttcaagaagctaggaagagtgcagagaagagaaaagccatgttggacgagctagctatggaaacactgcaagagaagtctcagcacaaggaggaacttggggctgttaggctgaggcatgaaaaagaggtcctaggtgtgagagcaaggtacgagcgcgagcttcgtgagcttcacgaagataaaaagcgtcaggaggaggaactgcgcggccagattcgtgaagaaaaagcaagaacccgcgagctggagacactgcagcagactgtggaagaactacaggcccaggttcattccatggatggtgcgaaggggtggttcgaaagaaggctcaaagaggcagagggcaaggaggaagagctccaggatgtaagagatcagctcgagcaggcacaggaagaacgcgactgccatctgaagacaatcagtagcctaaagcaggaagtgaaggatactgtcgacggacagcgaattctggaaaagaaggggtccgccgcgctgaaagacttgaaacgtcagctccacctggaaagaaaacgcgcagacaaactccaggagcgtctgcaagatattttaactaattctaaatctcggagcggactggaggagctggtgctgtccgagatgaatagcccctccagaacacaaactggagactccagctctatctcctcttttagctacagagagatcctgcgcgaaaaagaatcatccgccgtgcctgctcgggtccgaggcaaggaggaacctacggccccagcgagtctgaaccctaagatttag

SEQ ID NO: 119064 - DNA, 2433 bp, synthetic construct
  misc_feature 1..2433: note = Description of Artificial Sequence: Synthetic coding sequence
  source 1..2433: mol_type = other DNA
atggcgcaggccctttcggaagaggagttccagagaatgcaggcccaactgcttgaattgcggacaaacaattaccaattatcagatgagctgcgaaaaaatggggtcgagcttacgagtttgcgccagaaggtagcatacctggacaaggagttcagcaaggcgcaaaaggcactgagcaagagcaaaaaggctcaggaggtcgaggtgctgctgtctgagaatgagatgctgcaagccaagcttcactctcaagaggaagactttagactgcagaacagtacacttatggccgagtttagcaaactgtgctcgcagatggaacaactggaacaggagaaccaacagctgaaagaaggggccgcgggagccggagtcgctcaggccggacctctcgtcgacggcgagttgctgcgactgcaggctgagaacacggcacttcagaagaatgttgcggccctccaggagaggtacggaaaggaagccgggaaattctctgcagtgtccgaaggccagggcgacccacccggtgggcctgccccaacggtacttgcccctatgccacttgctgaggtggaacttaagtgggagatggagaaagaggagaaaaggcttctgtgggagcagctccaagggcttgagtctagcaaacaggcagaaactagtagactccaggaagagctggctaaactttctgaaaaattaaaaaagaagcaggaatctttctgtaggcttcagactgaaaaagaaaccttgtttaacgatagtcgaaacaagatcgaagaactgcagcagcggaaagaggctgaccacaaggctcagctggctagaacccagaaactgcagcaggaactcgaggcggccaatcagtccctagcagagctccgggaccagagacagggagagcgactggaacacgccgccgccttacgtgctctgcaggaccagatccagactgccaagactcaggagctgaatatgctgagggagcagaccaccggactggcagccgagctacaacaacagcaggcggaatatgaggatcttatgggccagaaagacgatcttaattctcaattacaggagagcttgcgggctaacagtaggctgctggagcaactccaggagatcgggcaggaaaaagagcagctgactcaggaattgcaggaggccagaaaatccgcggaaaaaagaaaagcgatgctggacgagctcgccatggagacccttcaggagaagtctcaacataaagaagaactcggggccgtacggctacggcacgagaaagaggtgcttggggtgagggccagatacgagcgggagctgcgcgagctgcatgaagacaagaagagacaagaggaggagctgcgaggacagataagggaggaaaaagcccgaacgagagagcttgagacgcttcaacaaaccgtggaggagttgcaggcccaagttcattcaatggatggtgccaaaggctggttcgagcggagactgaaagaagctgaagagagcttgcagcaacagcagcaggagcaagaggaggcgctcaagcaatgccgtgaacagcatgcggcagagctaaagggcaaggaagaagaactgcaggacgttcgggatcagctggagcaggcccaggaagagcgtgattgccatttaaaaacgataagctcactcaagcaggaggtcaaagatacagttgacggccaaaggatacttgaaaagaaaggaagcgccgccctgaaagacttgaaaagacagctacatctggaaagaaaacgggccgataagttacaagagcggctacaggacatcctgacgaattcaaagtccagatcaggcctcgaggaactggtgctgagcgaaatgaatagcccttctcgcactcaaaccggcgattcgtcaagcatcagttcattttcctaccgggaaatcttacgagagaaggaatcgtcagccgtgcctgcgaggtccctctcttcatctccccaagctcaaccaccacgacctgccgagctgtcagacgaagaggttgccgaactgttccagagactcgctgagacgcaacaggagaagtggatgctggaggagaaagtaaagcacctcgaggtgtcctccgcaagcatggcagaggacttgtgccgcaagagcgccataattgagacatacgttatggactccaggattgatgtcagcgtggctgcggggcacactgacagaagcggactgggcagcgtgcttagagatctagtcaagcccggcgatgagaatctgcgcgaaatgaacaaaaagctgcagaacatgctggaggaacagctgacgaagaacatgcacctgcacaaagatatggaggttctatctcaggaaattgtacggctgtcaaaagaatgtgtaggaccaccagatcctgacctggagcctggggaaacctcctag

SEQ ID NO: 119065 - DNA, 2526 bp, synthetic construct
  misc_feature 1..2526: note = Description of Artificial Sequence: Synthetic coding sequence
  source 1..2526: mol_type = other DNA
atggcgcaggcgttgtccgaggaagagtttcaacgcatgcaggcccagctgttggaattacgcaccaataactaccaacttagcgacgagctcagaaagaacggggtagagctgacttctctacggcagaaggtggcttatctggacaaagagtttagcaaagcccaaaaggcgctgtcaaagagcaaaaaagctcaggaagtggaggttctcctgtccgagaacgaaatgctgcaggccaaactgcacagccaggaagaagactttcgattacagaattcaactctgatggcagagttcagcaagctgtgttctcagatggaacagttggaacaggaaaaccagcagctcaaggagggtgccgccggggccggtgtcgcccaggcaggacctctggtggatggagagcttctgcgtctgcaggcagagaacactgctttgcaaaagaatgttgccgccctgcaagagagatacggcaaagaagccggcaagttttctgccgtgagcgaggggcagggtgaccctcccggaggtcccgcccctacagtcctcgcccccatgcccctagcagaagtggaattgaaatgggagatggagaaagaagaaaagaggctgctgtgggagcagttgcaggggttggaaagtagcaaacaggcagagacctccaggcttcaggaggaactggctaagctgtctgaaaagctgaaaaagaagcaggagagtttctgcagattgcagactgagaaggagactctgttcaatgactccagaaacaagattgaagaacttcagcagagaaaggaggccgaccacaaggcccaactggccagaactcagaagttgcagcaggaactggaggcagcaaaccaaagtcttgccgagctccgggaccagcggcagggggaaagactcgagcacgccgctgctttacgagcactccaagaccaagtctcgattcagtctgctgatgcccaggaacaagttgagggactgctagctgagaataatgccctccggactagcctggccgcactcgagcagattcagacagccaaaacccaggaactaaatatgcttcgcgagcaaactacaggcctggcagctgaattgcaacagcagcaggccgagtatgaagatctaatgggccagaaagacgatctcaactcacagcttcaggaaagtcttagagctaactcgcgccttctggagcagctccaggagatcgggcaggaaaaagaacagcttacccaggaactgcaggaggcacgtaagtccgctgagaagagaaaggctatgctcgatgagctagcaatggagaccctgcaggagaagtctcagcacaaagaagaactgggcgccgttagattgcgacatgaaaaggaagtgctgggcgtgcgggcgcgttacgaacgcgagttacgcgagctccacgaggacaaaaagcgtcaggaagaagaactgagaggccagattcgggaagagaaggcccggacccgcgagctagagactctgcagcagactgtggaagagctgcaggcgcaggtccattccatggacggggccaagggctggtttgagaggaggctgaaagaggccgaagagtcccttcagcagcagcagcaggaacaggaggaggccctcaaacagtgtagagaacagcacgcagcagaacttaaggggaaagaggaagagcttcaggacgtcagggatcagctagagcaggctcaggaggagagggattgccatttgaaaacgatctcgagtctcaagcaggaggtgaaggatacggtggacggccaaagaatcctggagaaaaaaggaagcgccgctttaaaagatttgaaacgtcagctccacctggaaagaaagagggcagacaaattgcaggagaggctgcaggatatactgacgaactctaaatctcgcagtggactggaagagctggtcctatctgaaatgaattctccatcccgtacccaaactggtgactcgagctcaatttctagcttttcttatagggaaatcctcagagagaaggagagcagcgccgtcccggcccggtccctgtctagctctccccaggctcaaccgccccgtcctgctgagctgtctgacgaagaagtcgccgagttattccagcggctggccgaaacacagcaggagaagtggatgttggaagaaaaggtgaaacacctagaggtgtccagtgcaagcatggctgaagacctctgtcgcaagtcggcaattattgagacgtatgttatggattctcgtatcgacgtcagcgttgcggccggacacactgacaggtccgggcttggatccgtcctccgagatttagtgaagcccggagacgagaatcttagagagatgaataaaaaactccagaacatgcttgaagaacagctgacaaaaaacatgcatctgcacaaagacatggaagtactgagtcaagagatcgttagactcagcaaggagtgcgtcggcccccctgatccggatttggaacccggagaaacatcatag

SEQ ID NO: 119066 - DNA, 2391 bp, synthetic construct
  misc_feature 1..2391: note = Description of Artificial Sequence: Synthetic coding sequence
  source 1..2391: mol_type = other DNA
atggctcaggctctatccgaggaagagttccaaagaatgcaagcacagctccttgagctgaggactaataactatcagctcagcgacgagctcagaaaaaacggcgttgaactcacatccctgagacagaaggtggcctatctcgataaagaattttctaaggcccagaagctctgctcccagatggagcagctggagcaggagaatcaacagttaaaagagggcgctgctggggccggcgtggcacaggccgggcccctcgtggacggcgagctgctgagactgcaagctgagaatacagctttacagaagaatgtagccgcgcttcaagaaagatacggcaaagaggccggtaagttttctgcagttagcgagggtcagggagaccctcctggtggcccggctcccacagtgctcgctcctatgcctctggcagaagtggagcttaagtgggagatggaaaaagaagaaaagagactcctttgggaacagcttcagggacttgagagctcaaagcaagcagaaaccagccggctgcaagaggaattagctaagttgtccgaaaagctcaagaagaaacaggaaagcttctgtcggctccagacagagaaagagacactgttcaacgattccaggaacaaaattgaggagctgcagcagcggaaggaggccgatcacaaggctcagctggctagaacgcagaagctgcagcaggaactggaagcggcgaatcagtccttggccgagctgagggatcagagacaaggtgaacggctggaacacgcagccgctctgagagctctgcaggaccaagtgtccattcaatcagctgatgcccaggagcaggtcgagggtctgttagctgagaataacgcccttcggacctcccttgccgcactcgagcaaatccaaaccgcaaagacgcaggagttaaacatgctccgagagcagacaaccgggctggccgctgaactgcaacagcaacaggctgagtatgaagacctcatgggccagaaggatgacctcaactctcagctccaggagtctctgagggccaatagccgcttgctcgagcagctacaggaaatcgggcaagaaaaagagcagctaacgcaggaactgcaggaggcgaggaaaagcgcagaaaagaggaaggctatgttagacgaacttgccatggagacgttacaagaaaaatctcagcacaaggaggagttaggggcagtgaggttaagacacgagaaagaggtcttaggtgttcgggcccgttatgagcgggagctgcgtgaactgcacgaggacaagaagcggcaggaggaggagctacgcggccagatccgggaggaaaaagccagaacaagagaactcgaaacactgcagcaaaccgtagaggagctgcaagcccaggtgcactccatggatggcgcaaaaggatggtttgagcgcaggctgaaggaggctgaggaatcactgcaacagcaacagcaggaacaagaagaagccttgaaacagtgtagggaacaacacgcggccgaactgaaaggtaaagaggaggagcttcaggacgtgcgggatcagttggagcaagcacaggaagagcgagactgtcacttaaaaactatatcctccctaaagcaggaggtgaaagatacagtggatggacaacgaattctagagaagaaagggagcgctgcactgaaagatctgaaaaggcaattgcatctcgagcgaaagagagcggacaaactgcaggagaggttgcaggatatcctgaccaatagcaagtctaggagtggactggaagagctggtgttgtccgagatgaatagcccatcaaggacccaaaccggggacagttccagcattagcagcttcagctaccgcgagattctcagggaaaaggagtcatcggccgtgcccgcacggtcattaagtagtagcccacaggcacagccccccagacccgctgagctgtcggatgaggaggtcgctgagctgttccaaagactagccgaaacacagcaggagaagtggatgttggaagagaaagtcaagcacctagaggtgagctctgcttctatggcggaggatttgtgccgaaagtctgccatcatagagacatatgtgatggatagccggatcgacgtgtcagtggccgcgggacacaccgatcggagcgggctgggatctgtactgagagacctagttaagcccggagatgagaatcttcgggagatgaataagaaactccaaaatatgctggaggaacagttgacaaagaacatgcacttgcataaggatatggaagtgctatcacaggagatagttagactgtctaaagagtgcgtgggcccaccagatcctgaccttgaacctggcgagacaagttag

SEQ ID NO: 119067 - DNA, 2433 bp, synthetic construct
  misc_feature 1..2433: note = Description of Artificial Sequence: Synthetic coding sequence
  source 1..2433: mol_type = other DNA
atggcccaagcactgtccgaggaagaatttcaaaggatgcaggcccagctcctcgagctgcgaaccaataattaccagttgagtgacgaactgcggaagaatggggtggagctcacctcgctgagacagaaggtcgcttatctagacaaagagttctcgaaggcccagaaaagccctggcccctgtctgccactacaggaggtagaagtgttactgtctgagaacgaaatgctgcaggccaaattgcacagccaggaggaagattttcggttgcagaattcaaccctgatggccgagttctctaagctgtgttcccaaatggaacaactcgagcaggaaaatcagcaactcaaggagggtgctgctggagctggagtggcgcaggccgggcccctggtagacggtgagctcttaaggttacaggcagagaatactgcactacagaaaaatgttgcggcgctccaggaacgctacggaaaggaggctgggaagtttagcgcagtctcggagggccagggagacccccccggcggcccagcaccgactgttctggccccgatgcccctggccgaagtcgagctgaaatgggaaatggaaaaggaggaaaaacgccttctctgggagcagctacagggactcgagagctctaaacaggccgaaacctctcgactccaagaggagctggccaagctcagtgaaaagctcaaaaaaaagcaggaatcgttttgtagactgcagacagaaaaagagacgctctttaacgatagtaggaacaagatcgaagaactacagcaaaggaaagaagcagatcacaaggcacaactggcaaggactcaaaagctccagcaggagctggaggctgcaaaccagagcttggccgagctcagagatcaacgccaaggcgaaagactcgaacatgccgctgcactaagagccttgcaggaccagatacagactgccaaaactcaggaattgaacatgcttcgtgagcaaaccactgggctggccgctgagcttcagcagcaacaagctgagtatgaagaccttatgggacaaaaggatgacctgaacagccagctgcaggaaagtctgcgcgctaactccagactgctggaacagctccaagagatcggccaggagaaggagcagttgacccaggaattgcaggaagcccgcaaatcagccgagaagaggaaagccatgctagacgagctggcaatggagacactgcaggagaagagccagcataaggaggaacttggggctgtgaggttgcgccatgagaaagaagtgctaggggtgcgcgctcgatacgagcgagagctccgagagcttcacgaagataaaaagaggcaggaggaagagttaagaggacaaattcgcgaagagaaggccagaaccagagaactcgaaaccttacagcagaccgtcgaggagctgcaggctcaggtgcacagcatggacggtgccaagggctggttcgaacggcgtctgaaggaggctgaggaatccttgcagcagcagcagcaggagcaagaagaagccctaaagcagtgtcgggagcaacacgccgctgagctgaagggcaaggaagaggagttacaggacgtccgggatcaactggaacaggcccaggaggagcgggactgccatcttaagaccatttcttcattgaagcaagaggttaaagataccgtggatggacagcggatcttggaaaagaagggcagcgccgccctcaaggacctgaagcgacagctgcacctggagaggaaacgcgcagataaactgcaggaaagacttcaggatattttaactaactcaaaaagtcgtagcggacttgaggagctagtcctgagtgaaatgaactccccttctagaacacagacaggggattccagttcaattagcagtttctcatatcgtgaaattctgagggaaaaggagtcctcggctgtgcctgccagatcgctctccagctcaccgcaggcccagccgcctcgccccgctgaattgtctgatgaggaagtagccgagctcttccagcgcctcgctgaaacacagcaggagaagtggatgctcgaggagaaggttaagcacctggaagtgtcaagcgcaagcatggcagaagacctgtgtagaaagtccgccattattgagacatacgtgatggatagccggattgatgttagcgttgccgctggtcatacagatcgttccggactgggctctgtgctgcgcgacctagttaaacccggggacgagaatctaagagaaatgaataaaaaactgcagaacatgctggaggaacaactgacgaaaaacatgcacttgcacaaggatatggaggtgctcagccaggagattgtgaggctctctaaagaatgtgttggtccacccgaccctgacctagaacctggcgaaacaagctag

SEQ ID NO: 119068 - DNA, 1425 bp, synthetic construct
  misc_feature 1..1425: note = Description of Artificial Sequence: Synthetic coding sequence
  source 1..1425: mol_type = other DNA
atgaaacgggtgctggtcctattgctggcagtcgcttttggacatgcgttagaaagaggcagagactatgagaaaaataaagtctgcaaggaattttcccacctgggtaaggaggattttacctcactctctttagttttgtactctagaaagtttcccagtggcacttttgagcaagtgtcccagctcgtgaaagaagtggttagcctgacagaggcatgttgcgcagagggggctgacccagactgctacgacacccgcactagcgcgttgtccgcaaaatcttgtgaatccaactctcccttcccagtccatcccggaacggcggaatgttgtaccaaagaagggctggagagaaaactctgcatggctgcactcaaacaccagccccaggagtttcccacgtacgtggaaccaaccaatgatgagatctgtgaagccttccggaaggaccccaaggagtatgcaaatcaatttatgtgggagtacagcaccaattacggccaagcaccattgtcacttctcgtgagctacaccaagtcttacctgagcatggtggggagctgctgcacctccgcctcccccaccgtctgcttcctcaaagaacgccttcagctgaagcatctctccttgctcacaacactcagcaaccgggtttgttcccagtacgccgcttatggcgaaaagaaaagcaggctcagcaatctgatcaagttggctcagaaggtgcccaccgcggacctagaggacgtgctacctctggctgaagacattacaaacatattgagtaagtgttgtgagagcgctagcgaggactgcatggccaaagagttacccgagcacacagtgaagttgtgcgataaccttagcacaaaaaactctaagttcgaagactgctgtcaagagaagaccgcaatggacgtattcgtctgcacatacttcatgcctgcagcccagttaccagaactgccagatgttgaattacctacgaataaggatgtgtgcgatcccgggaacaccaaggtcatggataagtatactttcgaactctccagaagaacccatctcccagaggtttttttgtcgaaggtgctggagcccactttgaagtctttgggcgaatgttgcgatgtagaggactccacaacttgtttcaatgcgaagggaccattgctgaagaaggaactgtcttcattcattgataaagggcaggagctgtgcgctgattactcagagaatacatttaccgagtacaaaaagaagctggccgagcggttaaaggccaaattgccggatgccactccaaccgagctagccaaactcgtgaataaacatagcgatttcgcaagtaattgttgctcgattaattctccccctctgtattgtgacagcgagatcgacgcagagctgaaaaacattctctag

SEQ ID NO: 119069 - DNA, 438 bp, synthetic construct
  misc_feature 1..438: note = Description of Artificial Sequence: Synthetic coding sequence
  source 1..438: mol_type = other DNA
atgaaaagagtcttggtgctgcttttggccgtcgcatttggacatgcactcgagaggggccgagattacgagaagaacaaagtgtgcaaggagttcagccacctcggcaaggaggattttacaagtttgagcttagtcctgtactcacggaaattcccctctgggacctttgagcaagtgtcccagctggttaaagaagtcgtgtccctgacagaggcctgttgcgccgaaggagccgatccggactgctacgatacaaggacatctgctctgtccgctaagagctgtgagagtaactccccatttcccgtgcatccagggaccgccgaatgctgcactaaagagggcctggaaaggaagctgtgcatggccgccttgaaacaccagccgcaagagttccctacgtacgtggagcctactaacgatgaaatctgctag

SEQ ID NO: 119070 - DNA, 1482 bp, synthetic construct
  misc_feature 1..1482: note = Description of Artificial Sequence: Synthetic coding sequence
  source 1..1482: mol_type = other DNA
atgctgtggtcctggtccgaggagagaggcggcgctgcacgtctcagcggccgaaaaatgaagagagtgttggtactcttgcttgccgtggcgttcggacatgctttggaacgagggagagactacgagaagaacaaggtatgcaaggaatttagccatctggggaaggaggactttacctccctgagtctcgtactgtacagcaggaagttcccatctggaacattcgagcaggtctcacagctggtgaaagaggtagtgtcgctgaccgaggcctgctgtgccgagggagccgatcctgattgttatgacactcgtaccagtgctctgtccgcgaaaagctgtgaaagcaattccccttttcccgttcacccgggtacagcagagtgctgcacaaaggagggcctggaaagaaagctgtgcatggcggctctaaaacatcagccacaggagttccccacttatgtagagccaacaaatgacgaaatctgtgaggcattcaggaaagaccctaaagagtacgcaaaccagtttatgtgggagtactctactaactacggtcaagccccgttatcacttcttgtgagctacaccaaaagttacttgtccatggtggggagctgctgcactagtgccagtccaactgtttgttttttaaaagagaggttacaactaaagcacctttctctcctgaccactcttagcaatagggtatgctcacagtacgctgcttatggggagaagaagtctagattgagtaacctgatcaagttggcacagaaggtgcccacagctgatctcgaggatgtccttccgctggccgaggatatcacaaatattctgagcaaatgctgtgaatccgcctccgaggattgcatggctaaggagttgcccgagcacacggtaaagctgtgtgacaacctctccacaaaaaactccaagttcgaagactgctgtcaggaaaagaccgctatggacgtgttcgtgtgtacctactttatgcccgccgctcaactacccgaacttcccgacgtggagctccctaccaacaaagatgtgtgtgatccaggaaataccaaggttatggataaatacacttttgagctttccagacgaacacacctgcctgaggtgttcctgtccaaggtcctcgagcccaccctcaagagcctgggggaatgctgtgacgtcgaagatagcacaacgtgcttcaacgccaaaggccctttgctgaaaaaggagctgtcatcattcattgataaagggcaagagctgtgtgcggattatagcgaaaatacgttcacggagtacaaaaaaaaactggccgaacgattaaaggcgaaactccccgatgcgacccctacagaactggctaaactggttaacaaacacagtgactttgccagtaactgctgctctataaactccccccccctttattgtgattcagagatcgatgcagagttaaaaaatatcttgtag

SEQ ID NO: 119071 - DNA, 669 bp, synthetic construct
  misc_feature 1..669: note = Description of Artificial Sequence: Synthetic coding sequence
  source 1..669: mol_type = other DNA
atggctgcatccgttaggcaggcacggtctctgctcggggtagccgctacgctggccccggggtccaggggttatagagcacggccgcctcccagaagaagacccggcccacggtggccagatcccgaggatctgctgacaccccggtggcaactgggcccccgctacgccgcgaaacagtttgcacgctatggagctgcctccggcgtcgtcccgggctccctgtggccatctccagagcagctgcgggagttagaggctgaagagcgtgagtggtatcctagcctggccactatgcaggagagcttgcgcgttaagcagcttgccgaagagcagaagcgaagagagcgggaacagcacattgcagagtgcatggccaaaatgccacaaatgatcgttaactggcagcagcagcaacgggaaaattgggagaaagctcaagcagataaggaacggcgggcacggctgcaggccgaggcccaggagctgttaggataccaagtcgatccccgatctgctaggttccaggagctgctgcaggacctagagaaaaaggaacgtaaacggcttaaagaagagaaacagaagagaaaaaaagaagcccgagcagcagccctggccgccgccgtagcacaggatcccgcggcttctggggcgccatctagctag

SEQ ID NO: 119072 - DNA, 1038 bp, synthetic construct
  misc_feature 1..1038: note = Description of Artificial Sequence: Synthetic coding sequence
  source 1..1038: mol_type = other DNA
atggtcgcggccctgctgggcgggggaggagaagcgagaggaggcactgtacctggggcgtggctttgtctgatggctcttcttcagctgcttggcagcgctccccgcggaagtggcctggcgcacgggcgacgcctgatctgctggcaagccctcctgcagtgtcagggggaacccgaatgctcctacgcatacaaccaatatgctgaggcctgtgcgccagtgctggcccaacacgggggaggtgacgctcccggtgctgctgctgccgcattccctgccagtgctgcttcgtttagctcacgctggcgctgcccctcccattgcattagtgccttgattcagctgaaccacacccggaggggcccagctcttgaagattgcgactgtgctcaggatgaaaattgtaagtccactaagcgggccattgaaccttgtctacctcggacttccggtgggggggctgggggacctggcgccgggggggtaatgggttgtaccgaagcccggaggcggtgcgacagggattcaaggtgtaacctggccttaagcaggtacttaacatattgtggtaaggtgtttaacggcctgaggtgtacagacgaatgtcgcaccgtgatagaagacatgcttgcaatgccgaaagctgccctgttaaatgattgcgtgtgtgatgggctcgaaaggcctatctgtgaatcagtcaaggaaaatatggcaagactttgtttcggagccgaactgggcaatggtcccgggtccagcggctctgacggcggtctggacgactactacgatgaggactatgatgatgaacagagaactggcggagccggaggtgagcagcctctggatgatgacgacggggtgccccatccaccgagaccagggagcggggctgccgcgtccgggggaaggggagatctaccatacggccctggcaggagaagttcaggcggaggaggaagactggctccgagaggtgcctggacacccctggcaagcatactactgctcctgctgggacccttgttctag

SEQ ID NO: 119073 - DNA, 942 bp, synthetic construct
  misc_feature 1..942: note = Description of Artificial Sequence: Synthetic coding sequence
  source 1..942: mol_type = other DNA
atgtgtactgctctcagccctaaggtgcgctccggccctggactcagcgacatgcatcagtatagccagtggttagctagtcgccatgaggctaacctcctgcctatgaaagaggacctggctctatggctaacgaatctgctcgggaaagaaattactgcggagaccttcatggaaaaacttgacaatggagcactgctgtgccaactggccgaaactatgcaggaaaagttcaaggagagcatggacgctaataagcccaccaagaacctgccactcaaaaagattccctgcaaaactagtgccccctccgggagttttttcgcaagagacaacaccgctaacttccttagttggtgtagagacttgggggtggatgaaacctgcctcttcgagtcagaaggcctcgtcctgcataaacagcctcgcgaggtctgcctgtgtctcctggagctgggacgtatagcagcccgctacggggtggagcctcccggacttatcaagctggagaaggagatcgagcaagaggagaccctgtcagcgcccagcccatctccctcccctagcagcaaatcatctggtaaaaagtcgacaggtaatctcctggacgatgctgtaaaacgtatctccgaggaccctccttgtaaatgccccaataaattttgcgtggagaggctgagtcagggacgttaccgggtcggtgaaaagatcctcttcattaggatgctccacaacaaacatgtgatggtgagagtgggagggggctgggagacatttgccggctatctcttaaaacacgatccttgcagaatgctgcagattagccgggtcgatggcaagacctcacctatccagagcaagtcccctaccttgaaggacatgaatccagacaactaccttgtggtgtccgccagctacaaggccaaaaaggaaatcaaatag

SEQ ID NO: 119074 - DNA, 942 bp, synthetic construct
  misc_feature 1..942: note = Description of Artificial Sequence: Synthetic coding sequence
  source 1..942: mol_type = other DNA
atgtgcacagcgctctcaccaaaggtcagatccgggccaggactgtcagatatgcaccaatatagccagtggctagcctcgagacacgaggcaaatttgctgccaatgaaggaggatctggccctgtggcttacgaacctcctggggaaggagatcacagctgagacctttatggagaagctcgacaacggggccctgctgtgccagctggcagagacaatgcaagagaaattcaaagagtctatggatgctaacaaaccgacaaagaatctccctctgaagaagatcccatgtaaaacttctgcacccagcggatcattctttgcaagggacaacacagcaaactttttgtcatggtgtagggacttgggcgtcgacgaaacttgtctgttcgagagcgagggactggtcctgcataagcagcccagagaagtgtgcctgtgcctacttgagctgggccgcatcgccgcgcgttacggcgtggaacccccaggtctgattaaacttgaaaaagagatagaacaggaggaaactttgtctgcccccagcccatctccctccccttctagcaagagctctgggaaaaaatcgactgggaatctgctcgatgacgcagttaaacggatatctgaagatccaccctgtaaatgccccaacaaattctgcgtggagaggttatcacaaggccggtatagagtaggggagaagatcctttttatccgcatgctccacaacaaacatgtcatggtgcgcgtggggggcggatgggagacttttgcggggtatctgctcaaacacgatccctgccgcatgctgcagatatctcgggtagatggcaagacatctccaatccaaagcaaaagcccaaccctcaaagatatgaacccggacaactacctggtggtgtccgcctcctataaggctaaaaaggagataaagtag

SEQ ID NO: 119075 - DNA, 942 bp, synthetic construct
  misc_feature 1..942: note = Description of Artificial Sequence: Synthetic coding sequence
  source 1..942: mol_type = other DNA
atgtgcactgctctgtccccaaaggtgagatcaggccccggcctgtcggacatgcatcagtactctcaatggctggcctctaggcatgaggccaacctactccccatgaaagaggatctggctctctggctgacaaatctgctggggaaagagatcaccgccgagacattcatggagaagctggacaatggtgcacttttatgtcaattagcagaaacaatgcaggagaaattcaaggagagtatggatgctaataagcccactaagaacctgccactcaagaaaattccctgtaagacctcggccccttccgggtctttttttgcgcgagataacacagctaatttcctgtcttggtgccgtgacctgggagtggatgagacatgcttgttcgaatctgaaggattagtcttgcacaaacagcctagagaggtatgcctgtgccttctcgagcttggtcgcatcgccgccagatacggggtggaacccccaggccttataaaactcgagaaagaaatcgagcaagaagagactttatccgccccttcccccagccctagtccaagctccaagagttccggcaagaaatccacaggcaatctcctggatgacgccgtaaaaaggatctcggaagacccgccttgtaagtgtcctaataagttttgtgtggagaggctttcccaagggagatatcgagtaggagagaagatcttgtttatccgtatgctccataacaaacatgtcatggtccgggttggtggtgggtgggaaaccttcgctggctatctgttgaaacacgatccctgccgcatgctgcagatcagcagagtcgacggcaagacttcacctattcagtcgaaatcccctactctcaaggacatgaaccccgacaactatcttgtcgtcagtgcctcttataaagcaaaaaaggagattaagtag

SEQ ID NO: 119076 - DNA, 546 bp, synthetic construct
  misc_feature 1..546: note = Description of Artificial Sequence: Synthetic coding sequence
  source 1..546: mol_type = other DNA
atgtgcacagccttgtcgcctaaagtaagaagcgggcccgggttgtccgatatgcatcaatactcacaatggctggcttcccgtcacgaggccaatctgctccccatgaaggaagatctggccctatggctgaccaatctcctcggcaaggaaattactgccgagactttcatggagaagctggataacggcgccctgctttgccagctcgcagagactatgcaggaaaagtttaaggagtccatggacgccaataagccgactaaaaatctgccactcaagaagattccttgtaagacaagcgccccatctggatctttcttcgcccgggataacacagccaactttctgagctggtgtcgtgatctcggcgtcgacgaaacttgccttttcgaaagcgagggcctcgtgctgcataaacagcctagggaggtgtgcctctgtctacttgagctggggcgtatagccgcaaggtacggcgtggagccccccggcctgattaaactagaaaaggagatcgaacaggaagagaccctttctgcctag

SEQ ID NO: 119077 - DNA, 618 bp, synthetic construct
  misc_feature 1..618: note = Description of Artificial Sequence: Synthetic coding sequence
  source 1..618: mol_type = other DNA
atgtgcacagcactgtcacctaaggtgcgcagtggcccaggtctctcggacatgcaccagtattcacagtggctggcaagtagacatgaggccaatctgctgcccatgaaggaggacttagccttatggcttactaacctcctgggcaaggagattacagccgaaacctttatggagaagcttgacaatggtgccctgctgtgccagctggccgaaaccatgcaggagaagttcaaagagtcaatggatgctaacaaacctaccaagaaccttcccctcaagaagatcccatgtaaaacctctgccccatccggaagtttcttcgctagagacaacaccgctaattttctcagctggtgcagagatctaggagtcgacgaaacatgtttgtttgaatcagagggtctcgtactgcataagcagccccgagaggtgtgcttgtgcctgctggagctggggcgcatagccgcgaggtacggcgttgaaccacctgggctcatcaaactggaaaaagagatagaacaggaggaaaccctcagtgctccctccccaagccctagtcccagcagtaagagctctgggaagaaaagtaccggcaatttactagacgatgcatag

SEQ ID NO: 119078 - DNA, 411 bp, synthetic construct
  misc_feature 1..411: note = Description of Artificial Sequence: Synthetic coding sequence
  source 1..411: mol_type = other DNA
atgtgtacagcgttaagtcccaaagtccgcagtgggcccggactaagcgacatgcaccagtattcccagtggctggcctcacgccacgaagcaaacctgttgcctatgaaggaggacttagccctgtggctcactaacctgttgggcaaagagatcaccgctgagacatttatggaaaagctggacaacggagccctgctctgtcagctcgccgaaaccatgcaagaaaagttcaaggagagcatggacgcgaacaagcccactaagaatctgcccttaaagaaaatcccttgtaagacttcagcaccgtctgggagtttttttgcccgcgacaacacagcaaactttttatcctggtgccgcgatctgggagtggatgagacatgcttgtttgagagtgaaggcttatag

SEQ ID NO: 119079 - DNA, 468 bp, synthetic construct
  misc_feature 1..468: note = Description of Artificial Sequence: Synthetic coding sequence
  source 1..468: mol_type = other DNA
atgtgtacagctttgtcccctaaggtgaggagcggccctgggctgagcgatatgcatcaatacagccagtggctagctagcaggcacgaggcaaacttactacctatgaaggaggacctggccctatggcttacaaacttactgggcaaggagatcaccgcagaaacttttatggaaaagctcgataacggcgctctcctatgtcagctcgcagagacaatgcaggagaaattcaaagaatcaatggatgcgaacaagcccaccaagaacttgccactgaagaagatcccctgtaagacctctgcgccttctggatcctttttcgctagggacaacaccgcaaacttcttgtcatggtgccgtgatctcggggtcgacgagacctgtctgtttgagtctgagggtctggtgctccacaaacagccacgggaagtgtgtctgtgcctgctcgagttgggacgaatctag

SEQ ID NO: 119080 - DNA, 2043 bp, synthetic construct
  misc_feature 1..2043: note = Description of Artificial Sequence: Synthetic coding sequence
  source 1..2043: mol_type = other DNA
atggctgatcccgtggcaggaatcgccggatccgccgcaaagtctgttcggcccttcagaagttccgaggcatatgtcgaagcaatgaaggaggacctggcagagtggttgaatgcactatatggcctcgggttgcctgggggtggcgatggatttctgaccggcttggctacaggtacaaccttgtgccagcacgctaacgcagtcactgaggcagcgagagccttggctgctgcccgccctgctaggggtgtcgccttccaggctcattccgtcgtgcctggatcctttatggccagagataatgtggccaccttcattgggtggtgccgcgtggaactaggcgtgcccgaggtcctcatgtttgagactgaagatctggtgctgcgcaaaaacgagaagagcgtcgtactgtgcctcttggaagtggcacggcgcggtgcccgcctgggcctgctcgcccctagacttgtacagttcgagcaggagatcgagagggaattacgcgccgcccccccagctcccaatgccccggcggccggcgaggacactactgagacagctccggcccctggcacccccgctagagggccacggatgactccatcagacctcaggaacctcgacgagctggtgagagaaattctcggacgatgcacctgcccggaccagtttcccatgatcaaggtgagcgagggtaagtatagggtgggtgacagcagcctcctgattttcgtgcgcgtgcttcggtcccatgtgatggtccgtgtgggcggtggttgggatacactggagcactatttggacaagcacgacccatgccggtgctcttcaactgcacataggccgccacagcctagagtctgcacgtttagcccccagcgagtgagccctactacttctccccgccccgctagtcccgtgcctggcagcgaaagacgcgggagcagaccggagatgacccctgtctcgcttcgcagcacaaaagagggtcccgagacgccacctcggccgagagatcagttacctccccacccgaggtcacggaggtatagcggagattcggacagcagcgcgagcagcgcgcaatcaggtcctctcggcacacggagcgatgataccggcacagggccacgccgtgagcgccctagtcggcgcctaaccactggcaccccagcctctccacgtcggccaccgctaaggagccagagtcgcgataggctggatagaggccgcccaagaggcgcacctggaggtagaggggctcagcttagtgttccatctcctgcaaggcgtgctagaagccagtcaagggaagaacaagctgtcctcctcgtaagaagggatcgcgatggtcaacatagctgggtgcctaggggacgtggaagcggagggagcgggagaagcactccccagactccccgggcccggagtccagcggctccacgactcagcagggtctcctccccaagtcccgagctgggcacaactcccgctagcatctttaggactcctctgcagctagacccccagcaggaacagcagctcttccggagattagaagaggagtttctggccaatgcacgcgctttggaagcagtcgcttctgtgacacccacaggccccgccccggacccagcccgggcccctgacccacccgcacctgacagtgcctattgcagttcatcatctagctcctcttctctttccgtgctcgggggcaaatgcggacagcctggcgacagcggacggactgcgaacggtctgcctgggcccagaagtcaggcgcttagtagttcctccgacgagggcagcccgtgcccaggtatgggaggtcccctcgacgcccccggatcccccctggcttgcacagaacccagccggacttgggcgagaggccgtatggacacccagcccgataggaagcctagtagaatccctacccccagaggccccaggagacccagcgggcctgctgaacttggcacctggcacgctcttcactccgtcactcctagagcggagcccgattcttggatgtag

SEQ ID NO: 119081 - DNA, 1014 bp, synthetic construct
  misc_feature 1..1014: note = Description of Artificial Sequence: Synthetic coding sequence
  source 1..1014: mol_type = other DNA
atggccgacccagttgccgggattgctgggtctgccgctaagagcgtccgcccatttcggtcgtctgaggcatatgtggaggcgatgaaagaggatttagctgagtggctcaacgcgctctatgggctgggtctgcccggaggtggggacggtttcctgacaggcctcgccacaggtacgacactgtgccagcatgcaaatgcagtgacagaggccgctcgggctctagcggcagcacgcccagcccgtggcgtcgccttccaggctcatagcgtcgtccctggctcatttatggctagagacaacgtcgccacgtttattgggtggtgtagggtggagcttggtgtgcccgaggtcctaatgttcgagactgaagatctggtgctgcgcaagaacgaaaaatccgtagtgctatgtctcctggaggtagcacgcagaggcgcccgtctgggccttctcgccccacgcctggtgcagtttgagcaagaaatcgaacgtgaactccgggcggccccgcctgctcctaacgctcccgctgcaggcgaggacaccactgaaactgctccagccccgggaacacccgcccgcggacccagaatgactccctcagacttgcgaaacctggacgagctggttagggaaatcttgggacgctgcacctgccccgaccaattcccgatgattaaagtgtccgagggcaaataccgtgtaggagacagttccctcctgatcttcgtccgcgtcctcaggtcccacgtcatggtgcgagtaggcggtggctgggacacattagagcactacctggataagcacgatccctgcaggtgcagctcaactgcacacaggcctcctcagccccgcgtctgcaccttcagcccccagcgtgtgtcgcccactacctcgccgcgtcccgcatcacccgtccccggctccgaaagaagaggaagtaggccggagatgacgcccgtctcgctgagatccactaaggagggccccgagacccctcctagatag

SEQ ID NO: 119082 - DNA, 990 bp, synthetic construct
  misc_feature 1..990: note = Description of Artificial Sequence: Synthetic coding sequence
  source 1..990: mol_type = other DNA
atggctgaccctgttgctggaattgccgggtcagctgccaagtctgtcagacccttccggtctagcgaggcatacgttgaagcaatgaaagaggacctggccgagtggctgaatgctttgtatggcctgggtctgcccggtggcggtgacggttttctaactggattggcaactggaaccaccctctgccagcatgccaatgccgtgactgaggctgcacgggcgttagcagcagcccgaccggctcggggcgtggcctttcaagcacactccgtcgtgcccggctctttcatggccagagacaacgtggcaaccttcatcggctggtgtcgggtggagttgggagtgcccgaggtccttatgtttgaaactgaagacctggtactcagaaagaatgagaagagcgtggtgctctgtctgctggaagtggcccgccggggagcccgtctcgggcttctcgcacctcgactggtccaattcgaacaggaaatcgagcgggaacttcgcgcagcaccacctgctccgaatgcccccgctgctggggaggacactactgaaaccgccccggcacctggcacccccgctcggggcccccgcatgacacctagcgatctgaggaatttggatgagctggttagggaaatccttggccggtgtacctgtccggaccagttccctatgattaaagtctccgagggcaaatatagggtaggcgatagctccctattgatatttgtgagggtactacgctcacacgtgatggttcgggtgggcgggggatgggacacactcgagcattacttagacaagcatgacccctgccgctgctcttcaactggccccggcatttcttgtcctccgatacctgctccggcagccaccccgggcacggttactccccagcccccacctccccgtgccgccccgctggtgcctgcagtgatgactcaggcccttgcgccaggtggatccgaccctgcagggggctag

SEQ ID NO: 119083 - DNA, 1614 bp, synthetic construct
  misc_feature 1..1614: note = Description of Artificial Sequence: Synthetic coding sequence
  source 1..1614: mol_type = other DNA
atggctgaccccgtggccgggatcgctggctctgccgccaaatctgtaagaccctttcgtagttctgaagcctacgtggaggccatgaaagaagacctagctgagtggcttaatgccctctacggactgggattgcctggagggggggacggttttcttacaggccttgccaccgggacaaccctgtgtcagcacgcaaacgctgtcactgaggccgcacgggccctagcagctgcacgtcccgctcggggggtggcctttcaagctcattccgtggtacccgggtccttcatggcccgtgataacgttgccaccttcattggatggtgcagggtcgaattgggcgtgcctgaggttctgatgtttgagaccgaggatctggtgttaaggaagaacgaaaaatcagtggttctctgcctgctggaggtcgccaggagaggcgcccgcctgggactactggccccacgactggtgcagtttgaacaagagatcgagcgagagctgagggccgccccgcctgccccaaacgccccagctgccggggaagatacgactgagaccgcccccgcccctggtacccccgcccggggccccagaatgaccccgagcgatttgagaaacctcgacgagttggtgcgcgagatccttggtcgttgtacgtgcccagatcagtttcctatgattaaagtttccgagggaaagtacagggtgggggactctagtctattaatcttcgtgcgcgtgcttaggtctcacgtgatggtccgagtgggtggtggttgggataccctagagcactaccttgataaacacgatccatgcagatgtagtagcactgcccacagacccccacagcctagggtttgcacctttagcccacagcgcgtttctcctactacatcaccccgccctgcctccccagtgccaggttcagaaagacggggatcacgccccgagatgacaccagtctccctgaggagcacgaaggaagggccggaaactcctcccagacctcgagatcaactgcccccccacccgcgctcaagacggtatagtggggactctgactcctctgcctcctcggctcagtccggccctctggggacccgctccgatgacacaggaaccggaccgaggcgagagaggccctcccggcgtcttacgactggtacccccgcctctccgagaaggcccccagcctgcgccgcgtctccggagacaggctggatcgctgctgggcctggcggacctcaggaggccggagagccctcatgcagatctccagcactcccagggggacccggtgcccgggcggctagatctaggctatgttgtttatgtgctggaatcgagacaggtagcacccacggctgtcaaggtgcaggggccgtgggcgctcgagccggggccccacctcggctccctgtaccggcagcactccagcatccaggatttcctggcagcccagctcccgtgcagagttgggcacctcaccgcccagcgagctccgctcatccctgctcctccactaggtcccgatcctcatcgtgttccggcgcttggaaaaggtcaagctggccaatgcccgggccactgaggctgctactggcatag

SEQ ID NO: 119084 - DNA, 1614 bp, synthetic construct
  misc_feature 1..1614: note = Description of Artificial Sequence: Synthetic coding sequence
  source 1..1614: mol_type = other DNA
atggccgatcctgtggctgggatcgccggaagcgccgcaaaaagcgtaaggccttttagaagcagtgaggcttacgtggaggccatgaaagaagacctcgctgagtggttgaacgccctgtacggactgggcctccctggcgggggggacggattcttgactgggcttgcgaccggaacaaccctgtgtcagcatgccaatgccgtgactgaggctgcgagagccttggcagcagctagacccgcccgaggcgtggccttccaggcgcacagcgtcgtgcctggtagctttatggcaagagataacgtcgcaacatttatcggatggtgccgcgtggagcttggcgttcctgaggtgctcatgttcgagacggaggatttggtcctccggaaaaacgagaaatccgtcgttctctgcctgttggaggtggcaaggagaggcgctaggctgggtctcctggcaccaaggcttgtgcagtttgagcaggagatcgagagggagctgcgcgccgcaccacctgcccccaacgcccccgccgcaggggaggataccaccgaaaccgctccagcccctggaacgcccgctcgcgggcctaggatgacaccgtctgacctgaggaacctggatgagctggtgcgggagattttgggccgatgtacatgtcctgaccagttccctatgatcaaggtcagtgaaggcaagtacagagtgggcgacagctcactcctgatttttgtaagggtcctgcggtcacatgtgatggtgagagtgggcgggggttgggatacgctggaacattacctggacaagcacgacccttgcaggtgcagttctacagctcatcgcccaccccagccaagagtctgcacatttagtcctcaacgcgtttctcccacgactagtccacgacctgcctcccctgtccccggctctgagcgtcgcggttcccggccggaaatgactcccgtgtcactccgcagcaccaaagagggaccagagacccctcctcgacctagagatcagttgccgccccatccaagatctagacggtatagcggagactccgattcatcagcctcttccgcgcagtcaggccccctcggcacccggagcgatgatacagggacaggacccagacgggaacgccccagcaggagattaaccacaggtacaccggcctcgcctaggcggccacctgcttgtgctgcgagccccgagacaggctggattgcggccggtccaggaggccctcaggaggctggggagccatcctgccggtccccagccttgcccgggggacccggggctagagccgcgcggtcacgcctgtgctgcctgtgcgcaggcatcgaaacaggctcgacccacggatgtcagggagccggcgccgtgggcgcccgagccggtgcccctccaaggctccctgtgcccgctgcccttcagcatcccgggtttcccgggagtccggccccggtgcagagctgggctccccatcgtccagcatcttcggcacacccttgttcctcgactcgttcaaggtccagctcatgcagcggcgcctggaagcggagcagttggcccatgcctggacctctccgcctgttgcttgcttag

SEQ ID NO: 119085 - DNA, 1614 bp, synthetic construct
  misc_feature 1..1614: note = Description of Artificial Sequence: Synthetic coding sequence
  source 1..1614: mol_type = other DNA
atggcagatcctgttgcaggtattgctggcagcgcagcaaagtccgtgaggccattccggagctccgaagcatacgtggaggctatgaaggaggaccttgcagagtggttgaatgcactatatggacttggactccccggcggcggcgatggcttcttgacgggtctcgccacagggactaccctgtgtcagcacgctaatgcggtaacagaggccgcaagggcactcgccgcggcgcgccccgcaagaggcgtggcatttcaggcccactccgtggtcccaggtagtttcatggctcgtgataacgtggccaccttcatcggttggtgtcgggtggagctgggagtaccagaggtgctgatgttcgagactgaagacctcgtcctcaggaaaaacgagaagagtgtcgtgttatgcttgttggaggttgcacgccgtggagcaaggttgggcctgctcgctccaagactggtccagttcgagcaagagatcgaacgggaactgcgcgccgctcccccagcccctaacgctcctgcagctggggaggataccaccgagactgcgcctgctccaggaactccagcccggggccccagaatgacacctagtgatctgcgaaacctagatgagttagtgcgtgaaattctggggaggtgtacatgtccagaccagttccccatgataaaagtctcagagggcaaatatcgggttggcgacagctcacttctgattttcgttcgagttttgcggtcacacgtcatggtgagggttgggggtgggtgggatactctggaacactatctcgacaaacacgacccgtgcaggtgctcttctactgctcacaggccaccccagccaagagtctgcacttttagcccacagagagtttccccaactaccagtcccaggccagctagcccggtacctggatctgagcggcggggaagtcgacccgagatgacacctgtgtccctgcggtccaccaaggaagggcctgagactcccccccgcccgcgggatcagctcccccctcatcccaggtcccggcgctacagcggcgatagtgattcaagcgcatcatcagcccagagcgggcctctgggcacccgtagcgatgatacgggtactggccctagacgggagaggcccagtcggcggctgacaactgggactcccgccagcccgcgacggcctccggcttgcgcagccagtcctgaaactggatggatcgcagccggacccggaggaccccaggaagcaggtgagccttcttgccggagtccagccctgcccggtggccccggtgccagagctgcgagaagtagactgtgctgcctctgtgccggcattgagacaggaagtacacacgggtgtcagggcgccggggcggtgggggctcgcgccggggccccaccccgccttcccgtaccagctgcattgcagcatccaggattccctggctcaccagcccccgtccagagttgggcaccccatcgtcccgccagcagcgcccacccctgcagcagtacgcgcagcagaagctcgtcatgttctggtgcttggaagcgctcgtcttggccgatgcccggacccctgcgactcctgctcgcctag

SEQ ID NO: 119086 - DNA, 417 bp, synthetic construct
  misc_feature 1..417: note = Description of Artificial Sequence: Synthetic coding sequence
  source 1..417: mol_type = other DNA
atggcagaccccgtggccggcatcgcgggctccgcagcaaaatccgtgcggccctttagaagttccgaggcgtacgtagaggccatgaaggaggatctggcagaatggctgaacgccctgtatgggcttggtctgcccggaggaggggacgggtttctcacagggctcgcgacaggcacaaccctctgccagcacgccaacgctgttacagaggctgcacgagccttggccgctgcccgccctgccagaggcgtggctttccaggctcattcagtggttcctgggagtttcatggcaagagataacgtcgcgacttttatcggatggtgtcgtgtagagctaggcgtgcctgaggtcctgatgttcgagactgaggatctcgtgcttcgcaaaaatgagaaaagcgttgttctgtag

SEQ ID NO: 119087 - DNA, 432 bp, synthetic construct
  misc_feature 1..432: note = Description of Artificial Sequence: Synthetic coding sequence
  source 1..432: mol_type = other DNA
atggctgaccctgttgcagggatagctgggagcgctgctaaatcagtaagaccctttcgcagctcagaggcctacgtggaagctatgaaggaggacctcgctgagtggctaaacgccttatatggattgggactgcccggagggggagatggctttttgactgggttggctactggaaccactttatgccagcacgcaaatgcagttaccgaggctgctcgagctctggctgccgcccgacccgctagaggcgtggctttccaggctcattctgtggtgcctgggtcatttatggcacgggacaatgtggctacatttattggttggtgccgcgtggagctcggcgtcccagaagttctgatgttcgagaccgaagaccttgttctgcgcaaaaatgaaaagagtgtagtgctgtgtctgttggaagtttag

SEQ ID NO: 119088 - DNA, 1614 bp, synthetic construct
  misc_feature 1..1614: note = Description of Artificial Sequence: Synthetic coding sequence
  source 1..1614: mol_type = other DNA
atggccgacccggtggcgggaatagcgggctccgcagctaagtctgtgagaccatttcgttcctccgaagcctatgttgaggcaatgaaggaggatttggcggagtggcttaacgccctgtatggattgggcctgcccgggggcggggatggcttcttgaccgggctggcaacaggtacaactctgtgccaacacgccaacgccgtcaccgaagcagctcgagcactggctgcggctagacccgcccgcggggttgccttccaggcccacagcgtggtgcccggtagtttcatggctagggacaacgtggccaccttcatcggatggtgtagggtggagctcggcgttcctgaggtgctgatgttcgagaccgaggacctggtgttgagaaaaaatgaaaagtccgtggtgctgtgccttctagaggtcgcacggaggggagcaagattgggcctgttggctccacgcttggtacagttcgagcaggagattgagagagagctgagagctgccccacctgcccccaatgccccagcggccggggaggatacgacagaaaccgcacccgctcccgggacaccagcccgggggccgcgcatgacgccatccgacttacggaatctggatgagttggttagagaaatcctgggaaggtgcacgtgccctgaccagttccctatgatcaaggtttctgagggcaagtaccgggtcggagattctagcctgctcatattcgtgagggtgctaagaagccatgtgatggtcagagtcggaggtgggtgggatacgttggagcactacctggataaacacgatccctgcaggtgcagttctacagctcatcggccccctcagcctcgcgtctgcaccttctccccacaacgggtttcacctaccacttcaccgcggccagcctctccggtgccagggtccgagcggaggggctctcggccagagatgacacctgtctctttgcgcagcaccaaagaaggccctgaaactcctccccgcccacgggatcaactgccaccgcaccctcgaagccgaagatattctggcgattcagactcctccgccagttcagcacaatctggcccgctgggaaccaggagtgatgatacgggaaccggaccacgtcgagaaagaccaagcaggcggctcaccaccggcacgcccgcaagccccaggaggccgccagcatgtgccgcctcaccggagacaggctggattgccgcgggtcctggtgggcctcaggaggccggggaaccgtcctgtagatcacctgcccttcctggcggccccggagcaagggccgcccggtccaggctgtgctgtctgtgtgcagggatcgaaactggatcaacgcatgggtgccagggtgctggtgcagtgggagcccgggcgggagctcctccgcggcttccagtgcccgcagccctgcagcatccagggttccccgggtcccccgctcctgtccaaagctgggcgcctcatcggcccgcgagttcagcccatccttgctcatctaccagatcacggagcagcagttgttctggagcatggaagcgttccagctggcctatgcctggtcccctgcggctgctactcgcttag

SEQ ID NO: 119089 - DNA, 2037 bp, synthetic construct
  misc_feature 1..2037: note = Description of Artificial Sequence: Synthetic coding sequence
  source 1..2037: mol_type = other DNA
atggccccaagtctgagtccgggaccagctgcgctgagaagggccccccagctcttgcttcttctgttggcagcagaatgcgcgctcgccgcactgctgcctgctagagaggccacacaattcctgaggccgaggcagcggagggccttccaggtgttcgaagaagctaagcaagggcacttggaacgagagtgtgtcgaggaactttgcagcagggaggaggctcgagaggtgtttgaaaacgaccccgagaccgattatttctaccctaggtatctcgattgcattaataagtacgggtccccttatacaaaaaacagtggttttgccacttgtgtgcaaaacctgcctgaccagtgtacacccaatccatgtgaccgcaaggggactcaggcgtgccaggatttgatggggaactttttctgtttatgcaaggctggttggggaggacggttatgtgacaaggatgtgaacgagtgctctcaggagaatggggggtgcctgcaaatttgccataacaagcccgggtcatttcattgttcttgtcactccggcttcgagctgagtagcgatggacggacatgccaggatattgacgaatgtgctgactcagaggcctgtggtgaagctcgctgtaagaatttgccgggatcctactcttgtctgtgtgatgaaggcttcgcctactcaagccaggaaaaagcatgcagggatgtcgatgagtgcctgcagggtcgctgtgaacaggtgtgtgtgaatagtcccggatcttacacctgtcattgcgacggacgagggggtcttaagctgtcccaggacatggacacttgtgaagatatacttccatgcgtgcctttctccgtcgccaaaagcgtgaaaagcttgtatttgggccggatgttctccggaacccccgttattaggctgcggttcaaacggctgcagccaacccggttggtggcagagtttgacttcaggacatttgacccagagggcattctgctttttgcagggggccaccaggactccacatggattgttctcgccttgagagccggtaggttagaactgcagttgcggtataatggagtggggcgcgtgacatcgtctgggcctgtgatcaatcacggaatgtggcagaccatctctgtagaggagctcgctagaaacttagtgataaaagtaaaccgggatgcggtgatgaaaatcgcagttgcaggtgacctgtttcagcctgaaaggggcctgtatcatctcaacctgaccgtgggagggatccccttccacgaaaaagacttggtacagcccatcaacccacggctcgatggctgtatgcgttcctggaattggctgaacggagaagatactactatacaggaaactgttaaggtgaacacgcggatgcagtgttttagtgtgactgagaggggatctttctatcctgggtctggcttcgcgttttatagtctcgactatatgcgcacgccactggacgttggaaccgaatcaacgtgggaagtggaagttgtagcgcatatacggccagcggccgatacaggtgtcttattcgcgttatgggccccggacttgagagccgttcctctgagcgtggcgctggtggattaccattccactaaaaagctcaaaaagcaattagtagtcctggcagtggaacatacggctctagcactgatggagattaaagtctgcgacggacaggagcacgttgttactgtctccctgagagacggtgaagcaactttggaagtggacgggacgcgtggccagtccgaagtgtcagccgcccagctgcaggagagactggccgtactggagcgccacctgcgttcgccagtacttaccttcgccgggggactcccggatgtgcctgtgacaagtgctcctgtgacagccttctatagagggtgcatgacactggaagtaaaccgtcgtctgctggatctcgacgaagctgcctataagcactcagatattactgcccattcatgccctcccgtggaaccagccgcagcctag

SEQ ID NO: 119090 - DNA, 1875 bp, synthetic construct
  misc_feature 1..1875: note = Description of Artificial Sequence: Synthetic coding sequence
  source 1..1875: mol_type = other DNA
atgtgcatgtgccaagcctctccccccccagccgccttggctggatgtctcctgtctagctgcgtgcaacccgctagggagcatgggggcgccttctcaaaggcggagtggttaagtaattgtattaacaagtacggctcgccttacacgaagaattccgggtttgccacatgcgtgcagaatttgccagatcagtgcaccccgaacccgtgtgataggaagggaacccaggcatgccaggatttaatgggaaactttttctgtctctgtaaggcgggctgggggggacggctttgcgataaggatgtgaatgaatgcagccaagagaacggaggctgccttcagatttgccacaataagccgggtagcttccactgttcctgtcattcgggtttcgaactcagttccgatgggcgcacttgccaagacatcgatgaatgtgcagacagtgaggcctgcggagaggcacgttgcaagaatttgcctggctcttacagctgcctgtgcgatgaaggctttgcctactcctcccaggagaaggcatgcagggacgtggatgagtgcctgcagggacgctgtgaacaggtctgtgtgaactcccccggcagctatacatgccactgcgatgggaggggtggcctgaaattgtcccaggacatggacacgtgtgaagacatcctcccatgcgtgccatttagtgtggccaaaagtgtaaaaagcctatacttgggcaggatgttctccgggacacccgtgattcgactaagatttaaacggttgcaaccaacccgattggtggccgaattcgattttaggaccttcgatccagagggaatattgctcttcgcagggggccatcaggacagtacatggatagtgctcgctctgagggctggacgattagagctacagttgagatacaacggtgtgggtagggtgaccagctccggccctgtgattaatcatggcatgtggcagaccatttcagtggaagagctcgctcgaaatctggtgatcaaagttaaccgtgatgccgtcatgaagattgctgtggccggggatctgttccagcccgaaagaggactgtaccatctgaacctcacagtggggggaatcccctttcacgaaaaagacctggtgcagcctattaaccctcgcctggatggctgcatgcggagttggaattggcttaacggggaggataccacgatccaggaaaccgtcaaagtcaacaccaggatgcagtgcttttccgtgacagaacgtggttcgttctatccgggttcgggctttgccttttatagcctagactatatgaggaccccactggatgtgggcacggagtcaacctgggaagtggaagtagtggctcatattcgcccagcagccgatactggcgtactttttgctctatgggctcccgatctgcgagctgttccactgagcgtggccctggtcgattatcactcgacaaaaaaactgaaaaaacagctggttgtcctcgctgttgagcacactgcccttgccctcatggagataaaggtctgtgacggccaggagcacgtggtgacagtgtctctgagagatggcgaagccactctggaggtcgacggaactagaggacagagcgaggtatcagctgcccagttacaggaacggctagctgtcctggagcgacacttacgttcgccggtcttaaccttcgctgggggccttcccgatgtacccgttacctctgcgccagtcactgcattttatagaggttgtatgacccttgaagtcaatcggcgacttttggatctcgatgaggccgcatataagcactccgacataaccgctcactcatgcccacctgttgaacctgccgctgcctag

SEQ ID NO: 119091 - DNA, 2166 bp, synthetic construct
  misc_feature 1..2166: note = Description of Artificial Sequence: Synthetic coding sequence
  source 1..2166: mol_type = other DNA
atggccccttcgctgagccccggcccagccgccttaaggcgcgccccacagttactgctgctgcttctcgcagcagagtgcgccttggccgcactgttgcctgcaagggaggcaacccaattccttagacctagacagcgaagagctttccaagttttcgaagaagccaaacagggccatttagaaagggagtgtgtggaggaactttgtagtagggaggaagcacgggaagtgtttgaaaatgaccccgaaactgattatttttaccctaggtatcttgattgtatcaacaagtatggatctccctatactaagaatagcggttttgctacttgcgtgcagaacctgccagaccagtgcacgcctaacccttgtgacagaaaaggtactcaggcatgccaggatttaatgggcaattttttctgtctctgcaaggcaggctggggcgggagactctgcgataaagacgtgaacgagtgcagtcaggagaacggtggctgcttgcagatatgtcacaacaagccagggtccttccattgttcctgccatagtgggttcgagctatctagcgacggcagaacatgccaggatattgatgagtgtgccgattctgaggcctgtggggaggcccgttgcaagaacctgcccggaagctacagctgcctgtgcgacgaagggtttgcctatagctcccaagagaaggcatgcagggatgtggatgagtgcttacagggtcgctgcgaacaagtgtgcgtcaatagccccggatcatacacctgtcactgtgacgggcgcggggggctaaagttgagtcaggacatggatacttgcgagctggaggcggggtggccacttccgcggcaccgacgtgacagtgggcctgccgccaggcctggccgcggggcacagggttcacggtcagaaggtcacatccccgataggagaggccccagaccatggcaggacatcctcccatgtgtcccctttagcgtggccaaaagtgtgaagtccctgtatttgggccgaatgttctcaggcacccctgtgatacggctgagattcaaaagacttcaaccaactagactggtggccgaatttgacttcaggacttttgatccagaggggattctgctgttcgccggcggtcaccaagacagtacttggatcgtgttggccttgcgggctgggcgtctcgagctccagcttcgatataatggtgtcggccgcgttaccagctcaggccctgtcatcaatcacggcatgtggcagaccatcagtgtggaggagctggctcgtaatctggtcatcaaggtgaatcgagacgctgtaatgaagatagcggttgctggcgacctgtttcagccagaaaggggcctctaccacctgaatcttacggtcggcggcatcccctttcatgagaaagacctagttcagcctattaaccctcgactggacggatgcatgaggagttggaattggctgaacggcgaggataccactatccaggaaacagtgaaggtaaatacacggatgcagtgcttttcggtcacagagagaggatcattctatccaggctcagggtttgccttctattcattagactatatgagaactccactggatgtgggaaccgaaagtacgtgggaggtggaagtcgtggcgcacattaggcccgccgcagacactggagtgcttttcgcgttgtgggctcctgatcttagagctgtgcccctctccgtggctctggttgattaccattcgaccaaaaagctgaaaaaacaactggtcgttctggccgttgaacacactgccctcgccctgatggagataaaggtgtgtgacgggcaagagcatgtggtgacggtgtccctgagagatggtgaggcaaccttagaggtggatgggacccgcggccagtccgaggtgagtgctgctcaactgcaagaacgtctggccgtccttgagcgccaccttaggtcccctgtactgactttcgctgggggtcttcctgatgtgccagtcacttcagcacccgtaaccgccttctatagagggtgcatgacgcttgaagttaacagacggttacttgatctggatgaagccgcctataagcacagcgatattactgcgcacagttgcccacccgttgaacctgccgctgcttag

SEQ ID NO: 119092 - DNA, 1140 bp, synthetic construct
  misc_feature 1..1140: note = Description of Artificial Sequence: Synthetic coding sequence
  source 1..1140: mol_type = other DNA
atgttctccggtacccctgtcatccggcttagattcaagcggttacagcccactcgactagtggcagagtttgattttagaaccttcgaccccgaggggatactgcttttcgccgggggtcatcaggactcaacttggattgtacttgctctgcgggccggacgactggaactacagttgcggtacaatggagtcgggagggttactagctcgggcccagttattaatcacggaatgtggcaaactatcagcgtcgaggagcttgccaggaacttggtcattaaagtgaatagggacgccgtgatgaagattgccgtggcgggtgacctttttcagcctgaaaggggcctctaccacctgaacttaacagttggaggtatacctttccatgagaaagatctcgtccaacccataaacccccggctggatgggtgtatgagatcctggaattggctaaatggagaagatacgacaatccaggaaacagttaaggtgaataccaggatgcagtgctttagcgtcactgagagagggagtttctatcccggaagtggcttcgctttttattccctagactatatgagaacccccttagatgtgggaaccgagagtacctgggaggttgaggtggtagcacacatccggccggccgctgacacaggcgtgttattcgcgttgtgggcccctgacctgagggcggttccactgagtgttgcactggtcgactatcactccactaagaaattaaaaaaacaacttgtcgttttagctgttgaacacacagcacttgcactcatggagattaaggtctgcgacgggcaggaacacgtggtaaccgtatccctgagagacggggaggccactttagaagtggacgggacaagaggccaatctgaagtctccgcagctcagttgcaggagcgcctggcagtgctcgaacgtcacctgcgaagccccgtgctgaccttcgcaggcggccttcctgatgtacctgttacctctgcccccgtcacggctttttatagaggatgcatgactctcgaggtgaatagacgcctcctggatctagacgaagcagcttacaaacatagcgatattacagcacacagttgccccccagtggagccagccgctgcctag

SEQ ID NO: 119093 - DNA, 1218 bp, synthetic construct
  misc_feature 1..1218: note = Description of Artificial Sequence: Synthetic coding sequence
  source 1..1218: mol_type = other DNA
atggacacttgcgaggacatccttccttgtgtgccatttagtgtggccaagagtgtgaagagcctgtacctggggcgtatgttcagcgggactcctgtaatccgcctgagattcaagaggcttcaacctactcgactggtggctgagttcgattttagaacgttcgatcctgaaggcatcctacttttcgccggcgggcatcaggattctacatggatcgtcctagctctccgggcaggccgccttgagcttcaacttcgatacaacggagttggtcgggtgacgagtagtggacctgtaatcaatcatggcatgtggcagacgatttccgttgaagagctggcacgtaatctggtcatcaaggtcaatagggacgccgtcatgaaaatcgccgtcgccggagatctatttcagcccgaacggggactttaccatttgaacttaacagtaggtgggattccatttcatgagaaagatctggttcagccaattaaccctaggctggatggctgcatgcggtcttggaactggcttaatggggaggatacaaccattcaagagactgttaaggtaaacacgcgaatgcagtgtttttccgtgactgagcggggttccttttatccagggtccggatttgccttctactctcttgactacatgaggacccccttagacgtggggacggaaagcacgtgggaagtggaagtagtcgcccatattcggccagccgcggacactggagtcttatttgcactctgggcaccggaccttcgcgccgtccctctcagtgtagctctggtggattaccattctacaaaaaagcttaagaagcagctcgtggtccttgcagtcgagcacactgccctagctcttatggaaataaaggtctgcgatgggcaggagcacgtcgttaccgtgagccttagggacggcgaggcaactctagaagtagacggcactagagggcagtctgaggtatctgccgcacagcttcaggagcgccttgcagtgttggagcggcatctccgcagccctgtgctcacttttgctggtggcctccccgacgttccagtaacctctgccccagtcacggcattttacagggggtgcatgacacttgaggtgaaccgccgcttactcgacctggatgaggccgcgtataaacactccgatatcaccgctcattcatgtcccccggtggaacctgccgcagcttag

SEQ ID NO: 119094 - DNA, 1431 bp, synthetic construct
  misc_feature 1..1431: note = Description of Artificial Sequence: Synthetic coding sequence
  source 1..1431: mol_type = other DNA
atgagcggcgcccgctgtagaacactgtaccctttcagcggggagaggcacggccaggggctacggttcgccgccggagagcttatcaccttgctgcaggttcctgacggagggtggtgggagggggaaaaagaggacgggctacgtggatggttccccgctagctacgtacagctgctcgagaagcccggaatggttccgccccctcctggagaagaaagccagaccgtgatacttcctcccggatggcagagttatttgtctccgcaggggcggaggtattacgtcaataccactacaaacgagaccacttgggagcgaccttctagcagtccaggcataccagcctcacctggcagtcatcgcagtagcctgccccctactgtgaatggttaccatgctagcggcactccggcccaccccccggaaactgcccacatgagcgtgaggaagtccacaggagattcgcaaaacttagggagcagcagtccctccaaaaaacagtccaaagagaacaccatcacaatcaattgcgtgacatttccccatcccgacacaatgccagagcagcagctgcttaagcccacggaatggagctattgcgattacttttgggcagacaagaaggacccccagggaaatggaactgttgccgggtttgagcttctgctgcagaaacagctcaagggcaagcagatgcaaaaggaaatgtctgagttcatcagggaacgcattaaaatagaggaagattatgctaagaacctggcaaagctgtcacagaatagccttgcttcacaagaggaaggatcgttgggagaggcgtgggcacaagttaaaaagagtttggcggatgaagcggaagtccacctgaaattctctgctaaactccattccgaggttgagaaaccactgatgaacttcagggagaacttcaagaaggatatgaagaagtgtgaccaccatattgccgacctgaggaagcagcttgccagccgctacgctagcgtggaaaaagcgcgtaaagctctgaccgaacgccagcgcgaccttgagatgaaaacacagcagctcgagatcaagctgtcaaataaaactgaagaagacataaaaaaggcccggcggaagtctacccaagctggagacgacttgatgaggtgcgtggatctgtacaaccaggcacagtctaaatggtttgaggagatggtcactaccacccttgaactggaacgattggaggtggaaagggtcgagatgatccgtcaacatttgtgccagtacacccagctccggcatgagacagacatgtttaaccagagcactgtcgagccggtggaccaactactccgcaaggtggacccagcaaaggatcgcgagttgtgggtgcgcgaacataaaacgggtaacattcggcctgtggatatggaaatctag

SEQ ID NO: 119095 - DNA, 1251 bp, synthetic construct
  misc_feature 1..1251: note = Description of Artificial Sequence: Synthetic coding sequence
  source 1..1251: mol_type = other DNA
atgaagccaggcatggtgcccccgcccccaggagaggaaagccagactgtgatccttccccctggttggcaatcctacttgtcgcctcaaggacgcaggtattatgttaataccacgaccaacgagactacctgggaacgcccctcctctagcccaggaatccccgcttcacctggatcacaccgctcatccctgccgcccaccgtcaacggataccatgccagcggcacccccgcacatccacccgagacggcccacatgagtgtgaggaaatctaccggggatagccagaatcttggatcttctagtccctcaaagaagcagtccaaggaaaacacaattactatcaactgtgttacctttccccatcccgatactatgcctgaacaacagctgctcaagcccacagaatggagttattgcgattacttttgggcagataaaaaggaccctcagggaaacggaacggtggccggctttgaactgttgctgcaaaagcagttgaaaggcaagcaaatgcagaaagaaatgtctgaattcattcgagagaggatcaagattgaagaagactatgcaaagaatctggccaagctgagtcagaattccctggccagccaagaggagggcagcctgggcgaggcctgggcccaggtcaagaaatctctcgcagacgaggcagaagtccatttgaagttctcagcgaaactgcacagcgaggtcgaaaaacctctaatgaattttcgcgagaatttcaaaaaagacatgaagaagtgcgaccaccatatcgccgacctacggaaacagctcgccagcaggtacgcctccgtggaaaaggcacggaaagcgcttaccgagagacaaagggacctggaaatgaaaacccagcaattagaaatcaagctgtccaacaaaacggaagaagatatcaagaaagctcgccggaaaagtactcaggccggagacgatctcatgcgctgcgtggacctgtataatcaagcccagagcaaatggttcgaggagatggtgacaaccacgctcgagcttgaaaggttggaagtggaaagagtggagatgattaggcagcatctgtgtcagtacactcagcttaggcacgaaacagacatgttcaatcagagcacagtcgagcctgttgatcagctgcttcggaaagtggatcctgctaaggacagagagctctgggttcgggagcataagacaggcaacatccgaccagtcgatatggaaatctag

SEQ ID NO: 119096 - DNA, 1011 bp, synthetic construct
  misc_feature 1..1011: note = Description of Artificial Sequence: Synthetic coding sequence
  source 1..1011: mol_type = other DNA
atgtccaatatggagaattcgtttgacgatgtgtcatgccttagcccacagaacctgggctcctcatcgccctctaagaagcaaagcaaagagaacacaatcactatcaattgtgtgacattcccccatccagacacgatgccagagcagcagctactgaaacccacagagtggtcttattgcgattacttttgggcggacaaaaaggatccccagggcaatggaacagtggcaggcttcgagctgctgcttcaaaagcagcttaaaggaaaacagatgcagaaggagatgtccgagtttattagagagaggatcaaaattgaagaagactacgccaagaatctggccaagctctcacagaactctctcgccagccaggaggaaggaagcctaggagaggcgtgggcgcaagtgaaaaagtccctggccgacgaagccgaagtgcacctgaaattctcagctaagctgcatagcgaagtggagaaacctctgatgaacttccgggaaaattttaaaaaggacatgaagaaatgtgaccatcatattgcagacctgcgcaagcagctggccagcaggtacgcatccgttgagaaagcgaggaaggccctgacagaacgacaaagagacctcgaaatgaagacccaacagctggagatcaaacttagcaacaaaacagaggaggacatcaagaaagcacgccgcaaaagcactcaagccggcgatgacttgatgaggtgcgtggatctatataaccaggcgcagtctaaatggttcgaagagatggtaacaaccacactagaactcgagaggctggaggtagagagagtcgagatgatccggcagcacctttgtcagtatacacaactgagacatgagacagatatgtttaatcagtccaccgtggaacctgtcgatcaactcttacggaaagtcgacccggcaaaagatagggaactttgggttcgggagcacaaaaccgggaatattaggccagtggacatggagatctag

SEQ ID NO: 119097 - DNA, 1248 bp, synthetic construct
  misc_feature 1..1248: note = Description of Artificial Sequence: Synthetic coding sequence
  source 1..1248: mol_type = other DNA
aagcccggcatggtgccccctccacctggggaggaatcacagactgtgatcttgcctccaggatggcagtcctacctaagtcctcagggccgccgctactacgttaataccacaaccaacgaaaccacttgggaacggccgtcctccagcccgggcatccctgcgtctcccggcagccacaggagttcactgcctccaacagttaacgggtaccacgcatctggtacacccgcccaccctcccgagaccgcgcacatgagtgtgcgcaagtccacaggcgactcccagaatctgggctctagcagccccagtaaaaagcagtctaaggaaaacacaattaccatcaattgcgtcaccttcccccacccggataccatgcccgaacagcagctgctcaagccgacggagtggagctattgtgattacttttgggctgataaaaaagatccccagggcaacggcacagtcgccggttttgagctcttgctacagaagcagctgaaggggaaacagatgcagaaggagatgagcgaattcattcgagaaagaataaaaatagaagaggactacgccaagaatctcgccaagttgagccagaacagtcttgcatctcaagaggaggggtcacttggcgaggcctgggcccaggtgaagaagtctttggcagatgaagccgaagtgcatctgaagttcagcgctaagcttcattcggaagttgagaagcccttgatgaattttagagaaaatttcaaaaaagacatgaaaaaatgcgatcaccatattgctgacctgcgcaagcaattggcttctagatatgcctctgtggagaaggcaaggaaggccttaaccgagcgccagagagatcttgaaatgaagacccaacagctggaaattaagctcagcaacaaaaccgaagaagatataaagaaagcccgcaggaaaagcactcaggccggcgacgacctgatgaggtgcgtggacctctataatcaggcccagagcaagtggtttgaagaaatggtcacaacaacactggagctggagaggcttgaagttgaacgcgttgagatgattcgccagcacctatgccagtacacccagctgagacacgaaacggatatgtttaaccaaagcactgtcgagcctgtagatcagctccttaggaaggtcgaccctgcaaaggatcgggagctgtgggtgagggaacataagacagggaacatacggcctgtggacatggagatctag

SEQ ID NO: 119098 - DNA, 1251 bp, synthetic construct
  misc_feature 1..1251: note = Description of Artificial Sequence: Synthetic coding sequence
  source 1..1251: mol_type = other DNA
atgaagcctgggatggtgccaccaccacctggagaggagagccagaccgtgattctgccccccggttggcagtcatatttgtcaccgcaaggacgtagatactacgtgaatacaacaaccaacgaaacaacttgggaacgaccttccagcagtccggggataccggcctctcccgggagccatcggagctccctgcctcctacagtgaacggctaccacgctagcgggaccccagcccacccacccgaaaccgcccatatgtctgtaagaaagagcactggtgactcacagaaccttggaagctcaagtcccagtaagaagcagtcaaaagagaataccattactattaactgcgtaacctttccacatcccgatacgatgcccgaacagcagctgttgaaacccactgagtggagttattgtgattacttctgggccgataaaaaggatccccaggggaatggtactgtggcaggattcgagctcctcctgcaaaagcagttgaaagggaagcagatgcaaaaagagatgagcgaatttatacgtgagaggatcaagattgaagaagattacgccaaaaaccttgcaaagttgtctcagaactccctagcgagccaggaggagggcagcctcggcgaggcctgggctcaagtcaaaaagtcgttggccgacgaggcagaagttcacctcaaattctctgctaaactgcattccgaggtggagaaacccctgatgaactttagagagaatttcaagaaagatatgaagaaatgcgaccaccatatcgccgacctcaggaaacagctggcttctagatacgcttctgttgagaaggcccgaaaagccctgacagaaagacagagagaccttgagatgaagacacagcagcttgagattaagctgagcaacaagaccgaggaggacattaaaaaagcaaggcgaaagagcacacaggctggagacgatttgatgagatgcgtggatttatacaaccaggctcagtcgaagtggtttgaggagatggtaacaaccacccttgagctggagaggctggaggtggaaagggtcgaaatgatccggcaacacctatgtcagtatactcaactgcgccatgagacagacatgtttaatcagtcaacggtagagcctgtggaccagctgcttcgcaaagtggatccggctaaagaccgtgagctctgggtaagagaacataaaacaggcaacatacgccccgtggacatggagatatag

SEQ ID NO: 119099 - DNA, 546 bp, synthetic construct
  misc_feature 1..546: note = Description of Artificial Sequence: Synthetic coding sequence
  source 1..546: mol_type = other DNA
atggtgcctccacccccaggggaggaatctcagactgttatcttacctcccggctggcagagctacttgagtccacaggggagacgctattacgtgaacaccactacaaacgagactacatgggagaggccctcttcctcaccgggtatacccgccagccctgggtctcacagatcaagtctgccacccactgtgaatggctaccatgcttccggaacacctgctcatccccctgagacagctcacatgtccgtgaggaagagcacaggagactcccagaacctggggagcagtagcccatcaaagaagcagagtaaggaaaacacaatcactgaactggaaaggctggaggtcgaacgcgtcgagatgatccgccagcacctgtgccagtatactcaactgaggcacgagaccgatatgttcaatcagtccactgtggagcctgtcgaccagttacttcgtaaggtggacccggccaaggatagagaactctgggtcagggagcataagaccggaaatattcggcccgtagacatggaaatctag

SEQ ID NO: 119100 - DNA, 873 bp, synthetic construct
  misc_feature 1..873: note = Description of Artificial Sequence: Synthetic coding sequence
  source 1..873: mol_type = other DNA
atgccagaacagcagctgctgaaacctacagaatggtcgtattgcgattatttctgggcggacaaaaaagaccctcaggggaatggtacagtggccggattcgagctgctgctccagaagcagctgaaaggaaaacagatgcagaaggagatgagcgaatttattagagagagaattaagatcgaagaagattatgccaaaaatctggctaaactgagccaaaacagcctggccagccaggaggagggctcactgggagaggcttgggcccaagtgaaaaaatctctggccgacgaggcagaggtccacctgaagttcagtgctaaacttcacagtgaagtcgaaaagccgctgatgaacttccgggagaacttcaaaaaggacatgaaaaagtgcgaccatcacattgctgatctgaggaagcagctcgcaagcagatacgccagcgtggaaaaagcacggaaagcattaacagagaggcagagagacctagaaatgaaaacccagcagctggagattaagcttagtaataagaccgaagaagacatcaaaaaggcacggcgcaaatctacccaggccggagacgatttaatgcgatgcgtagatttatataaccaggcccagtccaagtggttcgaggaaatggtgaccaccaccttagagctcgaacggttagaggttgaacgtgtagagatgattcggcagcacctctgccagtatacacagttgcgtcatgagacagatatgtttaatcaatctactgtggaacccgtagatcagctgttaagaaaggtggatccagcaaaggatcgcgaactttgggtgcgcgagcataaaactggaaacattagacccgtggacatggagatatag

SEQ ID NO: 119101 - DNA, 378 bp, synthetic construct
  misc_feature 1..378: note = Description of Artificial Sequence: Synthetic coding sequence
  source 1..378: mol_type = other DNA
atgaagactcaacagctggaaataaaattgtccaacaaaactgaagaagacatcaagaaggctaggcgcaaaagcacacaagcaggcgatgatcttatgcggtgcgtggatttatacaatcaggcgcaatctaaatggttcgaggagatggttaccaccacactggagctcgagagattggaggtggagcgggtagagatgatcagacaacacctctgccaatatacacaactgcgacatgagactgatatgttcaatcagtccacagttgaacccgtcgatcagttactgcgaaaagtggaccctgccaaggaccgggagttgtgggtaagagaacataagaccggaaacattcgcccagtagatatggagatttag

SEQ ID NO: 119102 - DNA, 1011 bp, synthetic construct
  misc_feature 1..1011: note = Description of Artificial Sequence: Synthetic coding sequence
  source 1..1011: mol_type = other DNA
atgagtaacatggagaactctttcgacgatgtttcttgcttgagtcctcagaatttaggcagttcttcaccatcaaaaaaacagagcaaagaaaatactatcactatcaattgcgtgacgttcccccatcccgacaccatgccggagcaacagcttctgaagcctacagaatggtcctactgcgattatttttgggctgacaagaaagatccccagggtaatggcaccgtagccgggtttgagcttttgctccagaagcagctcaaggggaaacaaatgcaaaaagaaatgtccgagttcatccgcgagagaattaagattgaagaggattacgctaagaacctggctaagttatcacagaacagtctcgcaagccaggaagagggttcacttggtgaggcttgggcccaagtgaaaaagtcactggctgatgaggcagaagtacatcttaagtttagtgccaaactgcactctgaggtggagaaaccgttaatgaattttagggaaaactttaagaaagatatgaaaaagtgtgaccaccatattgctgatctccgtaaacaattggcctcccgttatgcaagcgtggagaaggccaggaaggcactgacagaaagacaacgtgatctggagatgaaaacccagcagctcgaaatcaaactgagcaataagacagaggaggacatcaagaaggcgaggcgtaagagtactcaagccggcgacgatctgatgcggtgcgtagatttgtataaccaggctcagtccaagtggtttgaagagatggttaccaccaccttagagttggagaggttagaagtggaaagggtggaaatgatccgccagcacctctgtcaatatactcagctgaggcacgagaccgacatgttcaaccaaagtacggtagagcccgtcgatcagctgctgagaaaagtggatcctgccaaggatagagaactgtgggtcagggagcataagactgggaatatccgccctgtcgacatggaaatctag

SEQ ID NO: 119103 - DNA, 1437 bp, synthetic construct
  misc_feature 1..1437: note = Description of Artificial Sequence: Synthetic coding sequence
  source 1..1437: mol_type = other DNA
atggcgccaaagaaaaaaggtaaaaagggaaaagcgaaaggaacgcctatcgtcgatggactggctcctgaagacatgtcaaaggagcaggtggaagaacatgtgtcaaggatcagagaagagctcgacagggagagggaagagaggaattacttccaattggagcgagacaagatccacacattttgggagatcactagaaggcagcttgaagaaaagaaggccgaactgcggaacaaagatcgagaaatggaggaggccgaggagaggcaccaggtggagatcaaagtttacaagcagaaagtaaagcacctgctgtatgaacatcaaaacaatctcactgagatgaaggctgaaggcactgttgttatgaaactggctcagaaagaacaccgaatccaagagtccgtacttcgaaaagatatgcgggccttgaaggtggagctgaaggaacaggagctcgcaagcgaggtggtggtgaaaaatctgcgcctaaagcacacagaggagattactaggatgcgcaacgattttgagagacaggtgagagaaatcgaagcgaaatacgataagaagatgaaaatgctgcgggatgagctagatctgcgccggaagaccgagctgcacgaagtggaagagcgtaagaatggccaaattcacaccctgatgcagaggcatgaggaggcctttaccgatataaaaaattactataacgatattaccttaaacaacctggcactgataaatagtcttaaggaacagatggaagatatgaggaaaaaagaggaccaccttgagcgagagatggcggaagtctccggacagaataagaggctggcggacccccttcaaaaggctagggaggaaatgtctgaaatgcagaaacaactcgccaactacgagcgcgataagcaaatccttttatgtactaaggcaagattgaaagtccgggaaaaagaactgaaagacctgcagtgggagcatgaagtgctcgagcagaggttcactaaggtccaacaggaaagggacgagctgtatagaaaatttaccgctgctatccaagaagtgcagcagaaaactggcttcaagaaccttgttcttgaaaggaagctacaggccttaagtgccgcggttgaaaagaaggaagtacagttcaacgaagttctagctgcatccaacctcgatcctgctgccctgactttagtctcacgtaagctggaggatgtgcttgaatcaaagaactccacaatcaaggacctccagtatgagttagcccaggtctgcaaggcccacaacgatctgttaaggacgtacgaggcaaagctgctcgcgtttggaatccccctggacaatgtcggctttaagcccctcgaaactgcagtcataggacagacactcggacaggggccagccgggttagtgggtacacccacttag

SEQ ID NO: 119104 - DNA, 1362 bp, synthetic construct
  misc_feature 1..1362: note = Description of Artificial Sequence: Synthetic coding sequence
  source 1..1362: mol_type = other DNA
atgtctaaagagcaggtcgaggagcatgtctccaggattagggaggaactggacagggaacgggaggaacgaaactacttccagttagaacgagacaagatccacactttctgggagataacaaggcgccagctggaagagaagaaggcagagttgcgtaacaaagaccgcgagatggaggaggctgaggagcggcatcaggtggagatcaaggtgtataagcaaaaggtcaaacacttgctgtacgaacaccagaacaacctgacagaaatgaaagctgaaggaacagtcgtgatgaagctggcgcagaaggagcatcgtatccaggaatctgtgttacgcaaggatatgagggcgctgaaagtcgaattgaaggagcaggaactggcatccgaggtggtggttaaaaatctcagattgaagcataccgaggaaatcacccggatgcgcaacgatttcgagcggcaggtccgtgaaatcgaagccaaatacgacaaaaaaatgaagatgctgcgggacgaattagacctgcggcgaaaaacagagctacacgaggttgaggaacgtaagaacgggcagatacataccctgatgcaaaggcacgaggaagctttcacagacattaagaattattataacgacatcaccctcaataacttagccctcatcaattcactgaaagagcagatggaggacatgagaaaaaaggaagatcatttagagcgggagatggccgaagttagtggccagaacaagcggctagccgatcctctccagaaggcccgggaagaaatgagcgagatgcaaaagcagctcgctaattatgagcgggataaacagattcttctttgtacaaaagctcgcctcaaggttagggagaaagagcttaaggatctccagtgggagcatgaggtgctcgaacaaaggtttactaaggtacagcaggagcgtgacgaactttataggaagttcacagctgcaattcaggaagtccagcagaaaaccgggtttaagaacctggtgctcgagaggaaactccaagctctgagtgctgcagtggaaaagaaagaggttcaattcaacgaggtgcttgccgcctctaacttggatcctgctgcgctcaccctggtctcaaggaaactggaagatgtcctggagagcaagaattctaccattaaagacctccaatacgaattggcccaggtgtgtaaggctcacaacgatctgctgcgtacttatgaagcgaagttgctggcctttggcattccgctggacaatgtcggattcaagcctctcgaaaccgctgtaatagggcaaaccctcgggcaggggcccgcaggcctcgtcgggacacccacctag

SEQ ID NO: 119105 - DNA, 525 bp, synthetic construct
  misc_feature 1..525: note = Description of Artificial Sequence: Synthetic coding sequence
  source 1..525: mol_type = other DNA
atggcccccaagaagaaggggaagaaagggaaagccaaagggacacctatcgtggatggcctcgcccccgaggacatgtccaaggagcaggttgaggaacacgtcagcagaataagggaagagctcgatcgcgaaagagaggaacggaactattttcagctcgaaagggataaaatacatactttttgggagataacccgccggcagctggaagagaagaaggcagaacttcgcaacaaagaccgagaaatggaagaggcggaagagagacaccaggtcgaaataaaggtgtacaagcaaaaggtgaaacacctgctctacgaacaccagaataatctcacagagatgaaggctgagggtacggtggtgatgaaattagcacaaaaggaacaccggattcaggagagtgtcctgaggaaggacatgagagcactgaaggttgaactcaaggaacaggagctagccagcgaagtggtggtaaagaacctccggctgaagctgcgaccctctatgatcaggcgatag

SEQ ID NO: 119106 - DNA, 1149 bp, synthetic construct
  misc_feature 1..1149: note = Description of Artificial Sequence: Synthetic coding sequence
  source 1..1149: mol_type = other DNA
atggtcgaggagcacgtttcccggatccgggaggagttagatagagagcgtgaggaacgtaattacttccaactggagcgggacaaaattcacactttttgggagattaccagacgtcaattagaagagaagaaggctgaactcaggaacaaagacagggagatggaggaggcggaagagcggcatcaggtggaaataaaagtttataaacaaaaggtaaagcatctgctgtacgaacaccaaaataatcttacagagatgaaagccgaaggaaccgttgtgatgaagctcgcccagaaagagcatcgtattcaggagagtgtgttgagaaaggacatgcgggcattaaaagtggagctgaaagaacaggagctggcgagcgaggtggtcgtgaaaaacctgaggctcaagcacactgaagagatcaccaggatgcgcaacgatttcgagcgccaggttcgcgagatcgaagcaaagtacgataagaagatgaaaatgttacgtgacgaactagatctgagaaggaagacagaactgcatgaagtagaagaacgaaaaaacgggcagatacatactttgatgcagcggcacgaagaggcattcacagacattaaaaattattacaatgacatcacacttaacaacctagcattaatcaattcccttaaagagcagatggaagatatgagaaagaaagaagaccacttggaacgggagatggccgaggtgagtggccaaaacaagagactggcggatcccctccaaaaagcacgagaggaaatgtcagaaatgcagaaacagctggccaattacgagagagataagcagattcttttgtgcaccaaggctcgtttgaaggtgcgagagaaagaattgaaggatcttcaatgggagcacgaggtcttggaacagcggttcacaaaggtccagcaggagagggatgagctgtataggaagttcacagcagctatccaggaagtgcagcaaaagacaggatttaaaaatttggtcctcgagaggaaattacaggcattaagcgctgccgtcgagaagaaagaagtgcaatttaacgaggtacttgcagcatccaacctggaccctgctgccctgaccttggtgtcacgcaagctcgaaacgtttttctgctag

SEQ ID NO: 119107 - DNA, 717 bp, synthetic construct
  misc_feature 1..717: note = Description of Artificial Sequence: Synthetic coding sequence
  source 1..717: mol_type = other DNA
atgctctgctgtatgcggagaactaaacaggtggagaaaaacgacgacgaccagaagatagagcaggatggcatcaaacccgaagataaggcccacaaggctgctaccaagatccaggcgagcttcaggggacacattaccagaaaaaagctgaaaggcgaaaagaaagacgacgtccaagctgcggaggccgaagccaacaaaaaggatgaagccccggtcgccgacggcgtggagaagaaaggggaaggcacaactacggctgaggccgctccagccactggcagtaaacctgacgagcccggcaaggccggcgagactcctagtgaggagaagaagggagagggcgatgctgcaactgagcaggccgccccacaggctcctgctagcagcgaagaaaaggcgggctctgcagaaacagagtcagcaactaaggcttcgacggataattcacccagttcaaaagcggaagatgcccccgcgaaagaggagcctaaacaagctgacgtccctgctgctgtgaccgcagctgccgccaccacccccgccgcagaggacgccgccgccaaagcaaccgctcagccacctactgagacaggtgagagcagtcaggccgaggagaacatcgaggccgtcgacgaaactaagcccaaggagtctgccagacaggacgaagggaaggaggaggagcctgaagctgatcaggaacacgcctag

SEQ ID NO: 119108 - DNA, 825 bp, synthetic construct
  misc_feature 1..825: note = Description of Artificial Sequence: Synthetic coding sequence
  source 1..825: mol_type = other DNA
atgacgaaatcatgcagtgagttatgtcaccctgccctgcactttctaccttgcttggggggacttcggaagaacctgcagcgcgctgtgagaccttctccctattcgctgggatttctcacgttctggatcagtcgggttgaaaagaatgatgacgatcaaaagattgaacaagatggtatcaaaccagaggacaaagcccacaaggcagctaccaagattcaggcatcttttcggggtcatattacaaggaagaagctgaagggcgaaaaaaaagatgatgttcaggcagccgaggcagaggccaataaaaaggatgaagcgcccgtcgctgatggtgtggaaaaaaaaggggagggaacgacaacggcggaggccgctcccgctaccggctccaagccagatgagccaggcaaagcaggggagacaccgtccgaggaaaagaaaggggaaggtgatgccgcaaccgagcaggctgctcctcaggcccctgctagctcagaagagaaagctgggagcgccgagaccgagtctgctacgaaggccagtaccgataattccccctccagcaaggctgaggatgcgcccgccaaggaagaaccgaaacaggccgatgtgccagccgctgttacagctgctgcggccacaacacctgccgcagaagatgcagccgccaaggctaccgcccagccacctactgaaaccggagagtcaagtcaggccgaggagaatatcgaagccgtggacgagaccaaaccaaaggaaagcgcacggcaggacgaggggaaggaggaagagcccgaagccgaccaggagcatgcatag

SEQ ID NO: 119109 - DNA, 1119 bp, synthetic construct
  misc_feature 1..1119: note = Description of Artificial Sequence: Synthetic coding sequence
  source 1..1119: mol_type = other DNA
atgccgcccccccagcaggggccatgcggccatcacctgttgctgttactcgccctcctgttgcctagcctaccgcttacccgcgctccagtcccacccgggcctgcggccgccctactgcaggccttggggttacgcgatgaaccacagggtgccccgaggctgcgaccagttccccctgtgatgtggaggcttttcagacggagggacccccaagagactcgatctgggtcacggcggacttcacctggggtaacactgcaaccttgccatgtagaagagctgggggtagctggaaatatagtgaggcatatcccggatcgcggtgctcccacgagggctagtgaacccgctagtgccgcaggccactgtcctgaatggaccgttgtctttgacttgtctgctgtcgagcccgcagagagacccagccgtgccaggctagagctccgcttcgcggccgccgctgccgccgcgcctgagggcggatgggaactgagtgtggcgcaagccggacagggcgctggcgccgacccggggccggtcctccttcggcaactggtccccgccctaggccctcctgttcgagccgagctgctcggtgctgcgtgggcaagaaacgcctcttggccacggagtctgcgccttgccctcgcccttagacctcgcgcacctgcagcatgcgccaggttagccgaagcttctctgctcttagtgactcttgatccgagattgtgccatccgttagcccggccccgcagagatgctgaaccagtgttagggggcggtccggggggggcttgtcgagcgagaagattgtatgtgtccttccgtgaagtcggatggcatcggtgggtcatcgcccctagagggttcttggccaattattgccagggccagtgcgcgctccccgtcgccctctccggatcaggaggtcctcccgcccttaaccacgcagtgctgcgggccctaatgcatgccgccgctccaggcgccgctgacctgccatgttgtgtcccagcgcggctcagccctatttctgtcctgttttttgacaactcagacaacgtggttctgaggcagtacgaggatatggtggtcgacgagtgtgggtgcaggtag

SEQ ID NO: 119110 - DNA, 1224 bp, synthetic construct
  misc_feature 1..1224: note = Description of Artificial Sequence: Synthetic coding sequence
  source 1..1224: mol_type = other DNA
atggtgctggcagcaccccttctgttgggattcctgctgctggccctcgagctcaggcccaggggcgaagccgcagaaggccccgccgctgcagcggccgcagccgccgccgccgctgccgccggtgtcggaggcgaacggtcctctcgtccagcacctagtgtcgctccagagcctgacgggtgccccgtgtgtgtttggagacagcacagtcgtgagctcaggcttgaaagcattaagagccagatcctttccaagttacgcctgaaagaagcaccgaatatctccagggaggtcgtgaagcagctcctccccaaggcacctcctcttcaacagatcctggaccttcacgatttccagggagacgcattgcagccagaggattttctcgaggaagacgaataccatgcaactacagaaactgttatatccatggcgcaggagacggatccagctgtacagaccgacggtagccctctgtgctgtcattttcacttcagcccgaaagtcatgttcacaaaagtgctgaaggcacagctttgggtgtacctgcgtcccgtgcccaggcctgctacagtgtatttgcagatcttgagactgaagccattgacaggagagggcaccgctggcggagggggggggggaagaagacacatacgtattcgaagtctgaagattgagctgcactcccgaagcggccactggcagtctatcgacttcaagcaggtactgcactcttggtttcgccagccgcaatccaattggggcatagaaatcaatgcatttgacccgagcggaacagacctggccgtgaccagcctgggacctggagcagagggcctccatccttttatggagcttagggttctggaaaacaccaaacggtcacgccggaacctcggactggactgtgatgagcattctagcgagagcaggtgttgccgttaccccctgaccgtggactttgaagcttttgggtgggactggattattgctcctaaacgttataaggccaactactgttcaggtcaatgtgagtacatgttcatgcagaagtatccgcacacacacctggtgcagcaggcaaaccctcgcggatcagccggcccatgctgtacaccgacaaaaatgtcaccgatcaacatgctgtacttcaatgacaagcagcaaatcatatatggaaaaatccctggaatggtcgtcgacagatgtggttgcagctag

SEQ ID NO: 119111 - DNA, 1143 bp, synthetic construct
  misc_feature 1..1143: note = Description of Artificial Sequence: Synthetic coding sequence
  source 1..1143: mol_type = other DNA
taggccgcggctgcagccgccgccgctgcggccgccgcagccggagtcggcggtgaacggagttctcgtccagcaccatccgtagcccctgagcccgatggatgccctgtgtgcgtgtggagacaacactcccgggaactcaggctggagtcaatcaagagccaaatcctgtccaagctaagacttaaagaggcccctaatatcagcagagaagtggtaaagcagctcctgccaaaagccccaccccttcagcagatcctcgaccttcacgacttccagggagatgccctgcagccagaagactttctcgaggaggacgagtaccatgccactacggagactgttatttcaatggcgcaggaaaccgatcctgccgtacagaccgacgggagccccctttgttgccattttcatttctcccccaaggttatgtttactaaggtgctgaaggcccagctctgggtttatctgcgtcctgttccacggcccgccacagtgtacctgcaaatactacgcttgaaaccattaactggcgaaggcactgcaggcgggggaggagggggtagacgacacatcaggatacgatccctgaaaattgaactgcacagcaggtctggccactggcagtccattgactttaaacaggtgctgcattcctggttccgccaaccacaaagcaattggggtattgaaatcaacgcgttcgaccccagtggaactgatttggccgtaacctccctaggccctggcgctgagggcttacacccctttatggagctgcgcgtcctggagaacacaaaacggtcaagacggaaccttggcctggactgtgatgagcactcatcagagtcacggtgttgtagatatcccctgaccgtggatttcgaggcttttggttgggactggatcatcgctccgaagaggtacaaagccaactattgttcgggccaatgtgaatacatgtttatgcagaaatacccccacacgcaccttgtgcaacaagctaaccctcggggtagcgctggtccttgttgtacccccacaaaaatgagtcccattaacatgctgtacttcaatgataagcagcagatcatatatggcaagatccccggaatggtcgtcgacaggtgcggttgcagttag

SEQ ID NO: 119112 - DNA, 927 bp, synthetic construct
  misc_feature 1..927: note = Description of Artificial Sequence: Synthetic coding sequence
  source 1..927: mol_type = other DNA
atgccagggcaggagctccgtaccgtcaacggatcccagatgctccttgtgctgctggtgcttagctggctgcctcacggtggggccctctcgttggcagaagccagcagggcctccttcccaggcccatccgagctacacagcgaggatagcaggtttcgcgaactgaggaagcgctacgaggatctgctgacgcggctgcgcgcgaatcagtcctgggaggactctaataccgatctggttcctgcccccgccgtgcggatcctgacacctgaagtccggctggggtctggaggccacctgcatctgagaattagcagggccgcccttcctgagggcctgccggaggctagccgactgcacagggctttgtttcggctgagcccaactgccagccggtcgtgggatgtaactaggccactgaggcgacagctttcgctcgctcgcccccaggctcctgcattgcacctgcgcttgtctccccccccatcccagtctgaccagttgctagcggaatcatcatcagcccggccgcagctggagctgcacctgaggccccaggccgcgcgtggccgcagacgggcacgcgcccgaaacggggaccactgtcctctgggacccggaagatgttgccgacttcacaccgtgagagccagtctggaggatctgggctgggcagactgggtgctctcacccagggaggtacaagtcacgatgtgtattggtgcgtgtccatctcagttccgggccgcgaacatgcacgctcagattaaaacttcactccataggctgaaaccagacactgttcccgctccatgctgtgtgccagcctcatacaaccctatggtgctgattcaaaagactgacacgggtgtcagcctgcagacgtacgacgaccttctcgcaaaagactgccattgcatttag

SEQ ID NO: 119113 - DNA, 927 bp, synthetic construct
  misc_feature 1..927: note = Description of Artificial Sequence: Synthetic coding sequence
  source 1..927: mol_type = other DNA
atgcccggccaggaactccgcaccgtcaatggaagccagatgctgcttgtgctgctcgttctgagttggttgcctcacggaggcgccttgtctttagccgaagcctcccgtgcttctttcccaggaccctcagaactacacagtgaagattctaggtttcgggaattgaggaaacgctacgaggacctgctgactcgtctcagggcaaaccagtcttgggaagactccaacactgacctggtccctgccccagccgtaagaatcctgactcctgaagtccgcttgggtagcggagggcacctccacctccgaatctctcgagcggctttacccgagggcctacctgaggcttcccggctgcacagggcattgttcagactgagccctaccgcttctcggtcctgggatgtgacccgacccctgcgtcggcagctaagcctggcgagaccgcaggccccagctctccacctgcgcttaagccccccaccatcgcagtccgaccaattgctcgctgagtcttccagcgcaaggccccaattagagctacacctacgccctcaggccgctaggggcagacggagagccagagctcgcaatggggaccactgccccttgggtccgggaaggtgttgccgcctccataccgtgcgcgcctctctcgaggacctgggctgggccgattgggttctgagtcccagggaagtccaggtgacaatgtgcatcggcgcgtgtccctcccaattccgggctgcaaacatgcatgcacagataaagacaagcctgcaccgactgaaacctgatacagtacccgcgccttgttgcgttcctgctagttacaatcctatggtcctcatccagaaaactgacaccggcgtttccttgcaaacgtacgatgatctgcttgccaaggactgccactgcatctag

SEQ ID NO: 119114 - DNA, 1290 bp, synthetic construct
  misc_feature 1..1290: note = Description of Artificial Sequence: Synthetic coding sequence
  source 1..1290: mol_type = other DNA
atgtgccccggcgccctgtgggtcgctcttcccctactaagccttcttgccggatctctgcaaggaaagcctcttcaatcatgggggcgcggatccgccggggggaacgctcactccccgttgggtgtcccaggtggaggactcccagaacatactttcaacctgaaaatgttccttgagaacgtgaaagttgatttcctgagaagcctgaatctctccggggtgccctctcaggacaagacacgggtggagcctccacagtacatgatcgatctgtacaataggtacactagcgataagtcgaccacccctgcttctaatattgtccgcagcttcagcatggaggacgcaatctccatcaccgccactgaagatttcccctttcagaagcacatcctgctgttcaacattagcatcccaagacacgaacagattactagagctgagctgcgcctttatgtctcctgccagaatcatgttgatccttctcacgacctgaaaggctccgttgtgatttatgacgtcctcgatggtactgacgcctgggatagtgcgaccgagactaagactttcttagtgagtcaggacatccaagatgaggggtgggagacgctggaagtgtctagcgcagtcaaaaggtgggtgagatcggatagtacaaaaagcaaaaacaagttggaggtaaccgtcgagagccatcgaaaggggtgtgacacattggatatatcagtcccaccaggatccagaaacctcccattttttgtggtgttttccaacgatcattcaagcggtactaaggaaaccaggctggagctccgtgaaatgataagtcacgagcaggagagtgtgctgaaaaagctgtcaaaagacggtagcactgaagccggagaatccagccatgaggaagataccgatgggcacgttgcagcgggatctacccttgcaagacggaagagatccgccggagctggtagccactgccaaaagacgtctttgcgcgtaaattttgaggatatcggatgggatagttggataatagccccgaaggagtatgaggcctacgagtgtaagggcggctgtttcttcccactcgctgatgacgttacccctacgaaacacgctattgtacaaaccctggtgcaccttaagttccctactaaggtcggaaaagcatgttgcgttcccaccaagctgagtcctatatctgtgctgtataaagacgacatgggcgtcccaacactcaagtatcactacgagggtatgagtgttgctgagtgcgggtgtcgctag

SEQ ID NO: 119115 - DNA, 1095 bp, synthetic construct
  misc_feature 1..1095: note = Description of Artificial Sequence: Synthetic coding sequence
  source 1..1095: mol_type = other DNA
atgctgagattcctgcctgacctggcttttagctttcttctgattctggcgttgggccaggcggtgcagtttcaggagtatgtattcctgcagttccttggtctagacaaagcacccagcccacagaaatttcaacccgtgccgtacattctcaaaaaaatcttccaagaccgggaagctgcggcgaccaccggcgtgagtagggacctttgttatgtaaaggagctcggcgtgcgtgggaacgtgttgcgcttcctgcccgaccagggcttttttttgtatcctaagaaaatctcccaagcctcgtcatgcctccagaaactgctttattttaacctctccgcaattaaagaaagagaacaactgactcttgcccaactcgggctggatctgggcccaaacagctactataatcttggccccgaattggaactcgccctattcctcgtacaggaacctcatgtatggggccagactacccccaaacctggaaaaatgttcgtcttaagatctgtcccttggcctcaaggggccgtgcacttcaatctgttagatgtggctaaagactggaacgacaatccgcgcaaaaattttggcctttttttggagatcctggtcaaagaagatagggatagcggcgtgaacttccaacctgaagacacgtgtgcaagattgcggtgcagtctgcatgcctcccttctcgtggtgacactgaatccagaccagtgccatccttctcgtaagagacgcgctgccatccctgttcccaagctgtcctgcaaaaatctctgccaccgtcaccagctgttcataaactttagagacctgggctggcacaaatggataatagcaccaaagggctttatggcgaactattgtcacggagaatgtccgttcagccttaccatcagtctcaactcatctaactacgcttttatgcaggcactgatgcatgccgtggatccagaaataccccaggctgtgtgcatccccaccaaactgagtcctatctctatgctgtatcaagacaataatgataacgtcattctgagacactacgaagacatggtggtggacgaatgtggctgcggctag

SEQ ID NO: 119116 - DNA, 1506 bp, synthetic construct
  misc_feature 1..1506: note = Description of Artificial Sequence: Synthetic coding sequence
  source 1..1506: mol_type = other DNA
atgaggctgccgaaactgctgacattcctgctgtggtacctggcttggctcgacctcgagttcatctgcacagtcttaggggcacctgaccttggccagagacctcaaggaacacgtccagggctagcgaaagccgaagctaaagagagacctcccctggcacgaaacgtctttcgaccaggagggcatagctacggcgggggggccaccaatgcgaacgcccgggctaagggcggtacgggccagactggggggctgacccagccaaaaaaggatgagcctaaaaaactacctccgagaccaggtgggccagaacccaaacctggtcatccgcctcagactcgacaggccactgcccggacggttacacccaagggccagctgcctgggggtaaagctcctccaaaagcaggcagcgtgccctcaagctttctgttgaaaaaggctcgtgagcccggtccaccaagagagcctaaggagccatttcgcccacctcccatcacgcctcacgagtacatgttgagtctgtaccggaccctctcagatgctgatagaaaaggtggcaatagcagcgtgaaattggaagccggcctggctaacacaataaccagcttcatcgataaaggccaggacgataggggacctgtggttcgcaagcagcggtacgtatttgacatttccgcactcgaaaaggatggcctgctgggcgccgaactgagaattttgcggaagaaaccttccgacaccgccaaacccgccgcccccggtggcggcagggcagcgcagttaaaactctcttcctgcccgtccggtaggcaaccagccagcttactggacgtccgctctgttccaggcctggatggctccggatgggaagttttcgatatttggaagttatttcgaaattttaaaaattctgcccagctgtgtctggagctggaggcgtgggaacgcggcagagctgtcgatctcaggggtctcggttttgaccgagccgctcgccaggttcatgaaaaagccctgttcctggtcttcggccgaacaaagaagcgtgacctgttcttcaatgagatcaaggccagaagtgggcaggacgacaaaacggtatacgaatatctgtttagccagcgacggaagcgcagggctcccctggcaactaggcaggggaaaagacccagcaagaacctaaaagctaggtgtagtcgcaaagcgctgcatgtgaatttcaaggatatgggctgggatgattggattattgcacctcttgagtatgaggccttccattgtgaggggctgtgcgaatttcccctacgctcacacctcgagcccacaaatcacgccgtgattcagacgttaatgaatagcatggacccggagagtacaccaccgacatgttgcgtgccaactcgtctaagtccaattagtattctgtttatcgattcggctaacaatgtggtctacaagcaatacgaagacatggtggtggaatcctgtggctgtcgatag

SEQ ID NO: 119117 - DNA, 1506 bp, synthetic construct
  misc_feature 1..1506: note = Description of Artificial Sequence: Synthetic coding sequence
  source 1..1506: mol_type = other DNA
atgcgactgccaaagcttctcacattcttgctctggtatttagcctggctcgacctggaattcatttgcacagttctcggtgcccccgacctggggcagcggcctcagggcacacgtccggggctggcaaaagctgaggctaaagagagacctcccctggcacggaatgtgtttcgccccggaggtcattcctacggcggcggcgcaacgaatgcgaatgcccgagctaagggaggtacaggtcagacgggcgggctaacacagcccaaaaaggatgagccaaaaaagctgccacctcggcccggaggacccgaacctaagcccggtcaccctccccagacacgtcaagcaaccgcgcgaaccgtcacccctaagggacaactgcccggcggcaaggcaccacccaaggccggctccgttccgtccagcttcttgctgaagaaggctagagagccaggacccccaagagagcccaaagaaccctttcggccaccccccataaccccccatgaatacatgttgtcactgtaccggacactgagtgacgccgaccgcaaaggcgggaattcttccgtgaagctagaggccggtctcgccaataccatcacctcattcatcgataaaggccaggacgaccgggggccggttgtacgaaaacagagatacgtcttcgacatatctgccctggagaaagacggcctcctgggagcagaactgcgaattcttcgaaagaagccgtccgatacagccaagcccgccgctcccgggggcggccgggccgcacagcttaaattgtctagttgcccctcaggcaggcaacctgccagcctcctggatgtgcgctctgtgcccggcctagatggctccggctgggaggtcttcgacatctggaaactctttagaaatttcaaaaacagcgctcaactgtgtctggaactggaagcctgggagcgaggaagagcagtggatctccggggactggggttcgaccgggcagccaggcaggtacacgaaaaagccttgttcctggtgtttggccgtactaagaagagggatctattctttaatgaaataaaagcgcgcagcggacaggacgataagactgtgtatgagtacctgttctcccaacgacggaagaggcgagcaccactggccactagacagggtaaaagaccctcaaagaatcttaaggcccgttgttcacggaaggcgctacatgtaaatttcaaagacatgggttgggatgactggattatagctccactggagtatgaggcgtttcattgcgaaggcttatgtgagtttcctctgaggtcccatcttgagccaacgaaccacgccgtgattcagactctgatgaattcaatggatcctgagagcacacctccaacttgctgtgtgcccactcgtttgtccccaatctcaatcctgtttattgatagtgcaaataatgtggtttacaagcagtacgaagatatggtagtcgaaagttgcgggtgtcggtag

SEQ ID NO: 119118 - DNA, 1368 bp, synthetic construct
  misc_feature 1..1368: note = Description of Artificial Sequence: Synthetic coding sequence
  source 1..1368: mol_type = other DNA
atggacacgccaagggtgttattatccgccgtgttcctcatcagcttcctgtgggatctcccaggcttccagcaggctagcatatccagctcctctagctcagcggaattaggctcgacgaagggcatgcgatcacgaaaagagggcaaaatgcagagagcgccacgggactcggatgctggaagagagggacaagaacctcagccgcggcctcaggatgagccccgagctcagcagcctagggcccaggagccacccggccggggccctagggtcgtgccccatgaatacatgttgtctatttacagaacctacagtattgcagaaaaactgggcattaacgcgtcatttttccaaagtagtaaaagcgctaatacaattactagctttgtggatagaggattagatgatctctcccatactcctcttaggcgccaaaagtacctctttgatgtgtccatgctgtccgataaggaggaacttgttggagccgaactccgtctcttcagacaagcaccttcagccccttggggcccaccagctgggcccctacatgttcagctgttcccatgtctgtccccgcttctgctggacgcccgcaccttggacccacagggggccccgccggccggctgggaggtttttgacgtgtggcagggactgcgccaccagccttggaaacagctgtgtctggagctgcgggccgcttggggggagctggatgctggcgaagccgaagcccgagctaggggtccacagcagcccccccctcctgatctgagatccttggggtttggccgacgtgtgagacccccacaggaaagggccctgcttgtggtgttcacaagaagtcagagaaagaatctctttgctgagatgcgcgaacaacttggatctgccgaagccgccgggcccggagcaggggccgagggcagctggccgccgccctcaggcgctcccgacgccagaccctggttaccctcacctgggaggagaaggcgcagaaccgcctttgcttcacggcatggtaagcgacacggtaaaaagagtcggctgcgatgtagcaagaaaccactccacgttaattttaaagagttgggttgggacgattggattattgctccactcgagtacgaagcgtatcactgtgaaggcgtttgtgattttccactacgatcgcacctggagcccacaaatcatgcgataattcagaccttaatgaattccatggaccctggctctactcctccttcctgttgtgtgccaaccaagctcacccccatttcgatcctttacatcgatgccggcaataacgttgtctacaagcagtatgaagatatggttgtggagtcctgtggctgtcggtag

SEQ ID NO: 119119 - DNA, 1062 bp, synthetic construct
  misc_feature 1..1062: note = Description of Artificial Sequence: Synthetic coding sequence
  source 1..1062: mol_type = other DNA
atggacacccctcgcgtcctactgtccgctgttttcctgattagtttcctctgggaccttcccggtttccagcaggcaagcatatcttctagctctagcagtgcagaactgggaagtactaaagggatgaggtctagaaaagagggcaaaatgcagagggcccctcgggattctgatgctggccgggagggccaggagccacagccgcgaccacaggatgagccccgtgcccaacagccacgtgcccaggagccaccaggaagagggcctagggtggtgccacacgaatatatgctaagcatttatcgcacctacagtatcgctgaaaagctagggatcaatgccagcttcttccagtcttcaaagagtgctaataccattacctcctttgtcgatcgcggcttggatgatctgtcccataccccacttagaaggcagaaatacttatttgacgtgtctatgctctcagataaggaggaattagttggtgctgagctgaggttgtttcggcaagcaccatccgctccttggggtcctcctgccggtccgctgcacgtccagctctttccttgcctgtcaccgctgctgcttgatgcacgcactttagacccccagggcgctccgccagcagggtgggaggtctttgacgtgtggcagggactcaggcaccagccatggaaacagctgtgccttgaactcagagcggcctggggcgagctagatgctggcgaagcggaggccagagctaggggtcctcagcagccacccccaccagatctccgcagcctgggattcggacggcgtgtgcggcctcctcaggaacgagctctcctggtggtgtttacgaggagtcagaggaaaaacctctttgcccccggtgtcagaggtctgtctcttcgcgggtgtatgcgcttaccggcagctctcgcacccggcgcacaccagccccgtcaccacccagatgcagatgagcttcatggccctcggcttcacccagcgcagctcctccgtgcacaccagatagactcacaccagcacagcattcacagacgtggccagtag

SEQ ID NO: 119120 - DNA, 816 bp, synthetic construct
  misc_feature 1..816: note = Description of Artificial Sequence: Synthetic coding sequence
  source 1..816: mol_type = other DNA
atggatacaccccgtgtgctgctgagcgcggttttcttgattagctttctgtgggatctacctggatttcaacaggccagtatctctagtagttcgagctcggccgagttgggctccactaagggtatgagaagcagaaaggaaggtaaaatgcaaagagcacctagagattctgacgctggacgagaaggtcaggagcctcaaccgcgtccgcaagacgagccacgggcccagcagcccagagcacaagagccccccggtaggggaccccgcgtcgtccctcatgaatacatgctttccatctaccgaacctatagcattgcagagaagctggggatcaatgcatctttttttcagagcagcaaaagcgcgaatacaattacgtcctttgtcgacagggggcttgatgacctgagtcacactccgctcaggaggcagaaatacctattcgatgtgtcaatgctgagcgataaggaagagctggtcggagctgagctcaggcttttccgacaggcaccctctgcaccttggggtccgcccgcaggccccctgcatgtgcagcttttcccctgtctgtcccctcttttgcttgatgctagaacactggatccccagggtgcaccacccgccggttgggaggtcttcgacgtgtggcagggcttacgccatcagccttggaaacagttgtgtttggaactccgtgccgctcccggcccggccgagtcaggcctgcgacctgaaggcgcagcctctccgggtgccgggcccgccgggggaatccaccagataccggctgccgcttgcccgcccaactag

SEQ ID NO: 119121 - DNA, 1353 bp, synthetic construct
  misc_feature 1..1353: note = Description of Artificial Sequence: Synthetic coding sequence
  source 1..1353: mol_type = other DNA
atggacttgagtgccgcagccgccctttgcctctggctcttgagtgcttgcagacctcgggacggcttagaggccgcagctgtcctccgggcagcgggtgctggacccgtcagaagccctggcggcggcggaggcggcggtgggggaggcaggactctagcccaagcagccggagccgctgctgtccctgcagccgcagtgccccgcgcacgggccgccagacgggccgctggatcaggctttagaaacggctcggtcgtccctcatcattttatgatgtcgttgtaccgatccctggcaggacgcgcaccagccggggcagcagccgtcagcgcctccggccatgggcgcgctgatacaataactggcttcactgaccaggccacacaggacgagtccgcagccgagacaggtcagtctttcctgttcgatgtttctagtttgaacgatgccgacgaggtcgtgggcgcagagctgcgcgtgctaaggcggggaagcccggaaagtggccccggctcgtggacaagtccaccactgttgctgctgtcaacatgccccggtgctgcaagagcccccagactgctgtacagccgagcagccgagcctctggttggtcagcgttgggaagcctttgatgtcgccgacgccatgcgtagacaccggcgcgagcctcgccctccacgcgcattctgtctgctgctgcgcgcggtggctggcccagttccaagccccttagcattacgacgacttggatttggctggccgggaggcggcggaagcgccgccgaggagagagccgtgctggtcgtcagttcgcggacacagagaaaagaatccctttttcgtgaaatccgggctcaagccagagctctgggcgcagccctggcctcagaacctttacctgacccaggaacagggactgcctcgcccagagccgtcattggtggtcgccgcaggcgcagaactgcccttgccggaacccgtacagcgcaaggctctggcggaggagctggcagaggacacggacgccgaggaaggtcccgctgctcgagaaaaccactgcacgtcgactttaaagagctggggtgggacgactggattatcgcacccttagactacgaggcgtatcactgcgaaggtttgtgcgacttccccctccgctctcacctagagccaacaaatcacgcaatcatccagacgctgcttaattccatggcccccgacgcagcgccagctagttgttgcgtcccagctcgattgtcccctattagcattctgtacatagacgctgccaataacgtcgtgtataagcagtatgaagatatggtggtagaggcgtgtgggtgccgctag

SEQ ID NO: 119122 - DNA, 1269 bp, synthetic construct
  misc_feature 1..1269: note = Description of Artificial Sequence: Synthetic coding sequence
  source 1..1269: mol_type = other DNA
atgccccgaagcttcctggtgaaatctaagaaagcacattcatatcaccagccgcgcagccccggtccagattacagtcttcggcttgaaaacgtacccgctccgagccgggcagatagcacgtcaaacgcaggcggagccaaggccgaacctcgcgaccgccttagtccagagtcccagcttactgaagcccctgatagagcgtccgcctcccccgattcctgtgagggttccgtgtgtgagaggtcttctgagtttgaagatttctggcgccctccttcaccttctgcctcaccagcctccgagaaaagcatgtgcccgtcattagacgaagcccaaccttttccacttccattcaagccttacagttggtccggtctggcgggctccgatttgcggcacttggttcagtcctatcggccatgtggcgctctggagaggggcgcaggtctggggttattctgtgagccagccccggagcccgggcatcccgctgctctctatggaccaaaacgagccgccgggggggctggggccggtgctccaggtagctgcagcgccggggctggggctacagccgggccaggacttggcctgtacggggatttcggcagcgccgccgccggcctctatgagagacctacagctgcagctgggctgttgtacccagagcgaggacatggactgcatgccgataagggagctggtgtcaaagtggagtctgagctcctgtgtactagactgttactcggcggaggctcttacaaatgcataaagtgtagtaaggtgttctccacccctcacgggcttgaggtgcacgtgcgtcggtctcactcggggacgcggccatttgcctgtgaaatgtgcggtaaaacttttggccacgctgtctccctcgaacagcacaaagcagtgcattcccaggagcgcagctttgattgcaagatatgcggcaaatcgttcaaaaggagcagtacgttgagcacacatcttcttatacactctgatacgagaccttacccatgtcaatattgcggcaaaagattccatcagaagtccgatatgaaaaaacacaccttcattcacactggtgagaaaccacacaagtgtcaggtgtgcggaaaagccttttcccagtcatcaaatctcatcacacacagtcgaaagcatacaggcttcaaaccgtttggatgtgatttgtgcggaaaagggttccaacgcaaggttgacctcaggcgacaccgagagacacagcatggcctcaaatag

SEQ ID NO: 119123 - DNA, 1269 bp, synthetic construct
  misc_feature 1..1269: note = Description of Artificial Sequence: Synthetic coding sequence
  source 1..1269: mol_type = other DNA
atgcctcggagcttcctggtaaagtcaaaaaaggcccattcatatcatcagccaagatcacctgggcctgattactccctccggctggaaaacgttccagccccgtcgagggctgacagcaccagcaacgccggaggggcgaaggccgagcctcgggatcgccttagccctgagtcccagcttactgaggctccagaccgggcaagcgctagccctgattcctgcgagggttccgtttgtgaaagaagtagcgagttcgaggacttttggaggccgccttccccttcagcctctcctgcttccgaaaagtccatgtgtccctctctggatgaggcccaaccattcccacttccattcaagccctattcatggtctggcctggctggctctgacctacgccatctcgtgcagtcgtatcgcccttgcggtgctctggagcggggcgctgggcttggcctgttttgcgaacccgcccccgaacccggtcacccggcagcgttgtacgggccaaaaagagctgcaggtggggcaggtgcgggagctcccggatcctgcagtgcaggcgccggagccacggcgggaccgggtcttgggctgtatggcgacttcggctccgcagctgccgggttgtacgaaaggcccacagcagcggcaggcctgctctaccctgaacgaggacacggactgcatgccgacaaaggtgctggtgtgaaagtggaaagtgagttgctctgcacgaggctgctgttggggggtggctcatataaatgcatcaagtgtagtaaagtgttcagcactccacacggtctcgaggtgcacgtaagaaggtctcacagcggtacgaggccattcgcatgtgagatgtgtgggaaaaccttcgggcatgcagtgagcctggaacagcataaggccgttcattctcaggagcgttcttttgactgtaagatttgcggaaagtccttcaaaaggagctcgactttgagtactcatctgctgatccatagcgacactagaccatacccgtgtcagtactgcggtaaacgatttcatcagaaatctgatatgaaaaaacacacttttatacacactggagaaaaaccacacaaatgccaggtgtgtggtaaggccttttctcagtcttctaatctgatcacccattcccgaaagcacaccggctttaagccctttggatgcgatctctgtgggaaggggttccagagaaaagttgacctgaggcgccatcgggaaactcagcatggactgaaatag

SEQ ID NO: 119124 - DNA, 1269 bp, synthetic construct
  misc_feature 1..1269: note = Description of Artificial Sequence: Synthetic coding sequence
  source 1..1269: mol_type = other DNA
atgccaaggtcatttctggtgaagtctaaaaaagcacactcctatcatcagccgcggtcacctggacccgactattccctgaggctggagaatgtgccggccccttcgagagccgattccacgtcaaacgcaggtggggctaaggctgagcctcgcgacagattaagccctgagagccagctgacggaagctccagatcgagcctccgcctctccagactcctgtgagggcagcgtctgtgaacgcagcagcgaattcgaggacttctggcgccctccttctccctcggcctctcccgcaagcgagaagtccatgtgcccgagcctcgacgaggcgcagccctttccccttccattcaaaccatactcctggtccgggcttgcagggtccgacttacgacatctggtccagtcgtacaggccctgcggcgctttggagagaggtgcgggtctggggctattttgtgagcccgcgccagagccaggtcacccagcagccctgtacggcccaaagcgggctgcaggtggagcgggcgcaggtgcacctggttcctgctctgcgggggcaggggctacggcaggcccagggctgggactgtatggggacttcggctccgccgcggcaggactatatgagcgacctacagcagcagcgggcctgctgtatcccgaacgcggtcacgggttacacgcagataagggggccggagtgaaggtcgaaagcgaacttctgtgtacccgcctgttgctggggggcggatcttataagtgcatcaagtgctctaaggtctttagcaccccacacggactcgaagtgcatgtgcgcagatcccacagtggcacccggccatttgcttgcgagatgtgtgggaagacctttggtcatgccgtgagcctggagcaacataaagccgtgcactcacaggaaagatctttcgattgtaaaatatgtgggaagagtttcaagcgttcctctacactgtcgacccatctgttgatccattccgataccagaccctacccttgtcagtattgtggaaagcggtttcatcagaaatccgacatgaaaaaacatacattcatccacacgggtgaaaaaccacacaagtgccaggtctgcggtaaagccttttcacagagctctaatctcatcacacactctcgcaagcataccggctttaagccatttgggtgtgatctctgcggcaagggcttccagaggaaggtagaccttaggagacatcgagagacccagcacggattaaaatag

SEQ ID NO: 119125 - DNA, 993 bp, synthetic construct
  misc_feature 1..993: note = Description of Artificial Sequence: Synthetic coding sequence
  source 1..993: mol_type = other DNA
atgccgcgatcctttctcgtgaagtccaaaaaggctcatacatatcatcagccacgggtccaggaggacgaacccttatggccccctgccctcactcctgtccctagggatcaggctccctcgaactcaccggttctgtctacattgtttccgaatcagtgcctcgattggactaacttgaaacgcgagccagagctagaacaagaccagaatctggctagaatggcccccgctccagagggaccaatcgtactatccaggccgcaggacggtgactctcctctgtccgattcccctccattctataagcctagtttcagctgggatacgctcgccaccacctatggccattcatataggcaggccccttctactatgcaaagcgcattcctcgaacattcagtatctctgtacggatcacccttagtgccatctacagagcctgccctcgactttagtcttcggtactcgcccggcatggacgcataccactgcgtcaagtgtaacaaagtattctctacgccccatggcctggaagtgcacgtgcgacggagtcacagtggaactagacctttcgcatgtgatatttgcggtaagacctttgggcatgccgtgtccttagagcagcacactcatgtccatagtcaagagcgaagcttcgaatgtcgtatgtgtgggaaagctttcaaacgctcatctacactctctacacacctactgatccatagtgacactcggccatacccctgtcagttctgtggcaaaaggttccaccagaagagcgacatgaagaaacacacctatattcacacaggggagaaacctcacaaatgtcaggtttgcggaaaggccttcagccagtcatccaacttaataacccacagcagaaagcacactggctttaaaccattctcctgcgagctgtgtactaagggtttccagaggaaggtcgacctcagaagacaccgggagtcgcagcataatctgaagtag

SEQ ID NO: 119126 - DNA, 993 bp, synthetic construct
  misc_feature 1..993: note = Description of Artificial Sequence: Synthetic coding sequence
  source 1..993: mol_type = other DNA
atgccgcgaagctttttagtgaagtccaagaaggctcacacttaccaccaacctcgagtacaggaggacgagcctctgtggccacccgctcttacgcccgtgcccagggatcaggctccctcaaattcccctgtcctgagcaccctgtttcctaatcaatgcttggattggacaaatctaaagcgggagcctgagttagagcaggaccagaacctcgcgagaatggcccccgctccagaagggcccatcgtgttaagtcgcccacaggatggcgacagtcccctcagcgattcacctcccttctataaacctagcttctcatgggacacactggccacaacatacggacattcctacagacaggcaccttccaccatgcagagcgccttcctggaacacagtgtgtccctgtacggatccccattggtgccgtcgacagagcctgccctcgatttctccctgcggtactctcctggaatggacgcgtaccactgcgttaagtgcaacaaagtgttcagcacgccacacggactggaagtccacgttcggcggtctcatagcgggacccgcccatttgcttgtgatatttgcggaaagaccttcggccacgccgtgtccctcgagcaacatacgcatgtgcatagccaggagcgatcctttgagtgtcggatgtgtggcaaggcctttaaacggtcctccacgctgagcacacacttgctgattcactccgacacaaggccctacccatgtcaattttgcggcaagcgcttccaccagaagtccgacatgaaaaagcatacatatatccacaccggggagaagccacacaagtgtcaggtttgcggaaaggccttttcacaatcatcaaacttgattactcattcccgtaagcatacaggatttaaacccttttcctgtgagctttgcaccaaagggtttcagcgaaaagtagacctgaggagacatcgcgagtcccagcacaacctgaagtag

SEQ ID NO: 119127 - DNA, 855 bp, synthetic construct
  misc_feature 1..855: note = Description of Artificial Sequence: Synthetic coding sequence
  source 1..855: mol_type = other DNA
atgccccgctccttcctggttaagtctaagaaagcccacacataccaccagccaagagtgcaggaagacgagccactgtggccgccagctctgacgcctgtccctagggaccaggccccttcgaacagcccggtgctatcaacactgtttccaaaccagtgtcttgattggacaaatttaaaacgggagcctgagctggaacaggaccagaatttagcgaggatggcccctgcacctgagggccccatcgtgctttctcggcctcaggatggcgattcacccctgtctgactctccacccttctacaaaccctctttctcatgggacacattggccaccacttacggacactcttacagacaggccccctccactatgcaaagtgcatttcttgagcacagcgtgtccctctatgggagccctttagtgcctagtactgagcctgctctcgacttctccttgcgatactcccccgggatggatgcctatcactgcgtgaagtgcaataaagagcgctcctttgagtgtcgcatgtgcggcaaagcctttaaacgaagctctacattgagcactcacctgttgatccatagtgacacccgcccctatccttgtcagttctgcggaaagcggttccaccaaaaatctgacatgaagaagcatacctacattcacacaggcgagaaaccacacaagtgtcaagtgtgcggtaaggcattctctcagtcaagtaatcttattacccactcccgcaaacacacgggatttaaaccgttttcatgcgagttgtgcaccaaaggttttcagaggaaagttgatcttcggaggcatagagaatcacaacacaacctgaaatag

SEQ ID NO: 119128 - DNA, 855 bp, synthetic construct
  misc_feature 1..855: note = Description of Artificial Sequence: Synthetic coding sequence
  source 1..855: mol_type = other DNA
atgccccggagcttcctcgtcaaaagtaagaaggcccacacctaccatcagccgagggtgcaggaggacgaacctctgtggccacccgctctcacgcctgttcctcgggatcaagcaccaagtaattcccccgtactgagcacactctttcctaatcagtgcctggattggacgaacttgaaaagagaacccgagctggagcaggaccagaatctcgcccggatggcaccggccccagagggaccaattgtcttgagtcgcccgcaggacggggattcccctctctcagattctccgcccttctataagccttcgttttcctgggacactctagcaaccacctatggacacagctaccggcaggctcctagcaccatgcagagcgccttcttggagcattcagttagcctgtacgggtctccactggttccatccaccgaaccggccctcgatttttcactgaggtactcaccggggatggatgcgtaccactgcgttaagtgcaataaagagcgttcttttgaatgtcgcatgtgcggaaaagccttcaagcgcagctctactctgagcacacacctgctcattcatagcgataccagaccctatccttgtcagttctgcggaaaaaggtttcaccagaaaagcgacatgaagaagcacacttatatacacacgggggaaaagccccataaatgtcaggtctgcgggaaagcattttcccagtctagcaacctgattacccacagcaggaagcacactggtttcaagccttttagctgcgaactttgcaccaagggcttccaacggaaggttgatctgcggcgacatagggagtcacaacacaacctcaagtag

SEQ ID NO: 119129 - DNA, 993 bp, synthetic construct
  misc_feature 1..993: note = Description of Artificial Sequence: Synthetic coding sequence
  source 1..993: mol_type = other DNA
atgccccgctcgttccttgtgaagtctaagaaagcccacacctatcatcagccgcgcgtgcaggaggatgagcccctgtggcctcccgccctgaccccagtgccacgcgaccaagccccttcgaacagtcccgtgctgtcgaccctgttccccaaccaatgtctggactggacgaacctgaagcgggagcctgagctggaacaggaccaaaatcttgctcggatggcccccgccccggaaggtccaatcgttctttccagaccccaggacggagatagtccactgtcagactcccccccattctataagccgtcttttagctgggacaccctggctacaacctatggccactcttataggcaggcaccctccaccatgcagtcagccttccttgaacattcagtctctctgtatggatcacctctcgttcccagtaccgagcccgctctagatttttctctgaggtattcacccggcatggatgcctaccattgtgtgaagtgcaacaaggtctttagcactcctcacggcctcgaggtgcacgtgcgcaggtcccactccggtacccgacctttcgcctgcgacatatgtggcaaaactttcggtcacgcagtttcactggagcagcacacccacgtgcattctcaggagcgttctttcgagtgtcgcatgtgtggtaaggcctttaagcggtcatccaccctaagcacccacctcctgatccattccgatacaagaccctatccgtgtcagttttgcggtaaacgattccatcagaagagcgacatgaagaagcacacttatatacacaccggcgaaaagccccacaagtgccaggtgtgcggaaaggcattttcccagtcaagtaacctcattacacacagtcgcaaacatacgggctttaaacccttttcctgcgagctatgtactaaaggcttccagaggaaggtggatttacgcaggcatcgggagagtcagcacaacctcaagtag

SEQ ID NO: 119130 - DNA, 855 bp, synthetic construct
  misc_feature 1..855: note = Description of Artificial Sequence: Synthetic coding sequence
  source 1..855: mol_type = other DNA
atgccccggtccttcttagtgaagtccaagaaggcgcacacctaccaccagcctcgggtccaggaagacgagccactgtggcctcccgccctgaccccagtccctcgagaccaggcacccagtaattcaccagtcctttcgaccctgttcccgaatcagtgccttgactggacaaacctcaaaagggaaccggagttggaacaggaccagaacttggctcggatggcccccgcccctgagggccctatagttctctctcgaccgcaggatggggactcacctctcagtgactcccccccattttataaacccagcttctcctgggataccctcgcaacaacctatggacacagctacaggcaggctcccagtaccatgcagtctgccttcctagagcattcggtatcattgtatggatcccccctcgtgccctcaaccgagccggccctggatttttccctccggtattctccaggaatggatgcctatcactgcgttaagtgtaacaaagagcgcagctttgaatgcaggatgtgcggcaaagccttcaaacgctctagtacattatccacccacctgctgatccacagcgatacgaggccttacccttgtcaattctgcggaaagaggttccatcagaagtctgacatgaaaaagcatacttatatccatactggggagaagccccacaagtgccaggtctgcggtaaggcctttagtcagtcctccaatctgataactcactcgaggaaacacaccggtttcaaacccttttcctgtgagctgtgcactaagggattccagcgcaaggtggatctccgcaggcaccgagagagccaacacaatctgaagtag

SEQ ID NO: 119131 - DNA, 1623 bp, synthetic construct
  misc_feature 1..1623: note = Description of Artificial Sequence: Synthetic coding sequence
  source 1..1623: mol_type = other DNA
atgaccacaagccttcaagatggccaatccgctgcttcacgcgctgctgctcgcgattccccgttggcggctcaagtgtgcggagctgcccagggccgcggtgatgcccacgacctggcaccagccccatggctccacgctagagcgctattgcctttacctgatggcactcgggggtgtgctgctgatcgcaggaaaaagaaagatcttgacgtgccagagatgcccagtatccctaaccctttccctgagctgtgctgctcacctttcacgtccgtccttagtgctgacctgttcccaaaagccaacagtagaaagaaacaagttattaaagtctactccgaggatgagacatcgcgcgctctggacgtgccctctgatattaccgcccgagatgtttgccagctactcatattaaaaaatcactacatcgatgatcactcatggaccctcttcgagcacctaccacatattggagtcgagaggactatcgaagatcacgaacttgtaattgaagtgttatcgaactggggcattgaggaagagaacaagttgtactttaggaaaaattacgctaagtacgaatttttcaagaacccaatgtacttttttcctgaacatatggtgagctttgcaacagagactaacggagaaatctctccgacccagatcctgcagatgtttctcagttccagcacttatccagaaattcacggatttctgcatgcaaaggagcaaggaaagaagtcttggaagaagatctacttcttcctgaggcgatctggactttacttttctacgaaaggaacctctaaggagccaaggcacctgcaattcttttcagagttcgggaattccgatatctacgtgagtctggctggtaagaaaaaacatggagctcccaccaattatgggttctgtttcaagcccaataaagccgggggccctcgcgatctcaagatgctttgcgccgaagaggagcagagccgcacatgctgggtgacagccatccggctcctgaagtatggtatgcagttgtatcaaaactacatgcatccatatcagggccgctcaggatgctcttcacagtccatttcacctatgcgctctataagcgagaactccctggtagcgatggatttcagcggccagaaaagcagagtgattgagaaccccacagaagcccttagcgtggctgttgaggaaggtctcgcctggagaaaaaagggttgcttgaggctggggactcacgggagccctactgcatcctcacaaagctcggccacaaacatggccattcacagatcacagccatggtttcaccacaagatcagtcgggacgaagcacagcggctaattatccagcaagggctcgtggacggcgttttcctcgtgagggactctcagtccaaccccaagacattcgtcctgtctatgagccatggtcagaaaatcaagcactttcaaatcatccccgtcgaggatgacggagaaatgttccacacgctcgacgatggccatactcggtttactgacctgattcagctggtggagttctatcagctgaataagggcgtgctcccttgtaagctcaaacattactgcgcacgaatagccttgtag

SEQ ID NO: 119132 - DNA, 1362 bp, synthetic construct
  misc_feature 1..1362: note = Description of Artificial Sequence: Synthetic coding sequence
  source 1..1362: mol_type = other DNA
atgtctttgtcagcaagaagggtaacactgcctgcaattaccccaattatcttacagaagcgggttattaaggtgtactcagaggacgagacaagccgagctctcgacgtgcccagcgacattacagcaagagatgtgtgtcagctccttattttgaagaaccactatattgatgatcattcatggacgctcttcgaacatcttccccatatcggcgtggagaggaccatcgaagaccatgaacttgttatcgaagtcctctcaaattggggcatcgaggaggagaacaaactctactttaggaagaattacgctaagtatgaatttttcaaaaatccaatgtacttttttccagagcacatggtttcctttgcaaccgagactaacggagagatctccccaactcagatcttgcagatgtttttgtcctcatcgacctaccctgagatacacgggttcctgcacgccaaagaacagggcaagaaatcctggaagaagatatactttttcctacggcgctccgggctgtacttttcgaccaagggtaccagtaaggaaccacgccatctgcagttcttttcagaatttggtaattcggacatatacgtgtctttggccggaaaaaagaaacatggagcacctactaattacgggttctgcttcaagccaaacaaagctgggggcccacgggatctcaaaatgttgtgcgcggaagaagagcagtcaaggacctgctgggttacggccatccggctcttgaaatacggcatgcagttgtaccagaattacatgcacccttaccagggacggtccggatgctcctcccagtccatcagccccatgcggagtatctccgagaactccctggtggcaatggacttctcaggtcagaagagccgcgtcatagagaatcctaccgaggccctatcggtcgctgttgaagagggtctcgcttggcggaaaaagggatgcttgcggcttggaacccacggctcccccacggcctccagtcagagctcagctactaatatggctatccacagaagtcaaccttggttccaccacaaaattagcagggatgaggctcagaggcttatcatacaacagggcctggtggacggtgtgtttttagtgcgcgattcccagtcgaaccccaaaacattcgtgctgagcatgagccatgggcagaagattaagcacttccagataatccctgtggaggacgatggcgaaatgttccacactctcgacgacggacatactcgttttacagatttgattcagttggtggagttctatcagcttaacaagggtgtgctgccttgtaagctgaagcattactgcgcccgaatcgcactgtag

SEQ ID NO: 119133 - DNA, 1599 bp, synthetic construct
  misc_feature 1..1599: note = Description of Artificial Sequence: Synthetic coding sequence
  source 1..1599: mol_type = other DNA
atggagttagacctgtcacctcctcatctgagctcttcccctgaagacttgtgtccagcacccggcaccccccccgggactcccagacctccagatacgccactccctgaagaggtcaagcgcagccagccattgctgatacccactacagggcgaaaactgcgagaggaagagaggagagctacgagtctcccctccatccccaaccctttccccgagctctgttctccgccctcacagagccctatattaggtgggccaagctccgctaggggcctgttacctcgagacgcaagccggccacacgtcgtgaaggtgtactccgaagacggggcttgcagaagtgttgaagtggcggctggcgctactgctagacatgtatgcgaaatgctggtccaaagggcccacgcgctgtcggatgaaacgtgggggttagtagaatgtcatccacatcttgctctggaaagaggccttgaggatcatgaaagtgttgtggaagtccaggcagcatggcctgtgggcggcgacagtagattcgtgttccgcaagaacttcgctaagtacgagctgtttaagtcaagtcctcacagcctcttccctgagaagatggtctctagctgcctggacgcgcacactgggatcagtcacgaagacctgatccaaaactttctaaatgctggcagtttccctgagattcaggggttcctgcagcttcggggatcagggagaaaattatggaaacgattcttctgtttcttacgcaggagcggtctttattactctacgaagggaactagcaaggacccccggcatctccagtatgtggccgacgtcaatgaaagtaatgtgtatgtagtcactcagggccggaagctgtatggaatgcccacagacttcgggttttgtgtaaagcccaataagctgcgcaacggacacaagggacttagaattttctgctccgaagacgaacagtctaggacatgctggcttgccgcgtttcggctcttcaaatacggagtgcaattatataaaaactatcagcaggcccagagccgccacctgcacccctcctgcttagggagcccaccattgcgaagcgcatccgacaacactcttgtagcaatggacttttctgggcacgccggacgcgtcattgagaatccgcgggaagccctctctgtggctctggaggaagctcaagcttggcggaaaaaaactaatcacagactctcactgcccatgccagccagtggcacgtcattgtctgcagcaatccacaggactcagctgtggtttcacgggcgcatttctcgtgaggagagtcagcgactgatcggacagcagggcctggtggatggcctgtttctagtgagagaaagtcagcggaacccacagggatttgtgctatcactgtgccatttacagaaggtgaaacattacctgatccttccgagtgaggaagaaggtagactgtacttcagcatggatgacggtcaaacccgattcacggatctgctccaactcgttgagtttcatcagttaaaccgggggattctgccatgccttcttcgccactgttgtactagagtagcattgtag

SEQ ID NO: 119134 - DNA, 1344 bp, synthetic construct
  misc_feature 1..1344: note = Description of Artificial Sequence: Synthetic coding sequence
  source 1..1344: mol_type = other DNA
atggagctcgacctgtcgccaccccacctctccagctccccagaggacctctgcccagcccccggaacaccccccggcacgcctcgaccgcccgacactccactgccagaagaggtcaaaaggagtcagcctctcctgattcctactaccggccgaaagttgcgagaggaagaacgccgcgcgacgtcccttccgtcgatcccaaaccctttcccagagctgtgttccccaccttctcagtctcctatactgggaggaccatcctcagcacggggcctgctgccccgagacgcctctagaccccatgtggtgaaggtgtatagcgaagatggcgcctgcagatccgtggaggtcgccgctggcgctaccgcccgacacgtttgtgaaatgctcgtgcagcgggcacatgccctctcagacgaaacttggggattagtcgaatgccatccccaccttgctctggaaagagggttggaggatcacgagtccgtggtggaagtgcaggccgcctggccagtaggaggtgacagtcggttcgtgtttagaaagaatttcgctaaatatgagctattcaagagcagcccgcacagtttatttccagagaaaatggtgagctcatgcttagacgcacatactggcatttcccacgaggacttaatccagaactttctgaacgccggctcatttcccgagatacagggcttcctgcaattgagagggagcgggcggaagctgtggaagagattcttctgcttcttgcgccgctccggactgtactacagtactaaggggaccagcaaggaccccagacatctgcaatacgtggcggatgttaatgagtccaatgtgtacgtggtgactcaaggtcgaaaattatacggaatgcctacagactttggcttctgcgtcaagcctaataagctcaggaacgggcataaaggtctgcggatcttctgttccgaagatgagcaaagccgcacttgttggcttgctgcttttcggttgtttaagtatggcgtccagttgtacaaaaactatcagcaggcccagtcccgtcacctgcacccttcatgcctagggtcccccccactgaggagcgcctctgataacaccctcgtcgcgatggacttcagtggtcacgcgggcagggtgatcgaaaatccccgtgaagccctctcagtcgccctcgaagaagcacaggcttggcggaaaaagactaatcaccgactctctctaccaatgccagcctctggtactagtttgtcagctgcatgcagctggtcaggacgggtttccggcacccctcgggcattatccagtctttgcgcaacgtgccgcaagtag

SEQ ID NO: 119135 - DNA, 1344 bp, synthetic construct
  misc_feature 1..1344: note = Description of Artificial Sequence: Synthetic coding sequence
  source 1..1344: mol_type = other DNA
atggaacttgacctgagtccacctcacctttccagctctccagaggatctttgccctgcacctggtaccccacccggcactccaaggcccccggacacccccttgcccgaggaggtgaagaggagccaaccattgctcatcccaactactgggcgtaagcttagggaggaggagaggcgggcgaccagcctaccttcaataccgaaccctttccccgaactgtgcagcccaccctcccagtcccctatcctggggggccctagttccgccaggggtctgctccctagagatgcttccaggccccatgtagttaaagtctatagcgaggacggcgcatgtcgctccgtggaggtggctgccggcgctacagcgcggcacgtgtgtgagatgctggtgcaacgcgcacatgctctgtcggacgagacctggggcctggtggaatgtcacccacatctcgcacttgagagagggctcgaggaccacgagtccgtcgtggaagtccaagccgcatggcccgtggggggggacagccgtttcgtcttcagaaagaatttcgccaagtacgaactgtttaagagctcgcctcactctttgttccccgaaaaaatggtcagttcttgcctggacgcccacaccggcatatctcacgaagacctcatccagaacttcctgaatgctggctcctttcctgaaattcagggattcttgcagctgcggggtagtggcagaaaactctggaagaggttcttttgctttttaaggcgctctggtctgtattattcaacaaaaggcacctccaaggatccccggcacctccagtacgtagcagacgtgaacgaatcaaatgtttacgtggtgacacagggaagaaaactttatgggatgcctaccgatttcgggttctgtgtgaaacccaacaaactgcggaacggccataagggcctgaggatcttctgttcggaagatgagcagagccgcacgtgctggctagctgcttttagactctttaagtatggcgtgcaactctacaagaattaccagcaggcccagagtagacatctgcatcctagctgtctcggctctccccctctgcgctctgccagtgataacactctggtggctatggatttttccggtcatgccggtagggtgatcgaaaacccccgtgaggcactgtcagtcgccctcgaggaggcgcaggcttggaggaaaaaaacaaaccaccgcctgagcttgccaatgcccgcaagtggtacttcattgtccgccgcatgttcttggagcgggagggtgagtggaactccacgcgcgctcagtagcctttgtgcgacttgtcgtaagtag

SEQ ID NO: 119136 - DNA, 1599 bp, synthetic construct
  misc_feature 1..1599: note = Description of Artificial Sequence: Synthetic coding sequence
  source 1..1599: mol_type = other DNA
atggaactggatttgagtccgccccatctttcctcctcgcccgaagacctctgtccagcaccgggtaccccccccggcacccctaggccgccagacactcctttgcccgaggaggtgaaacgatcacagccactcctgattcccactactggcagaaaactgcgggaggaggaaaggagggcaacgtcccttccttcgattccaaatcctttccccgaactttgtagtcctccttctcaatccccaatcctcgggggtcctagctcagcgaggggccttctgcctcgggacgccagccggcctcacgtggttaaagtttatagtgaggatggcgcgtgcagaagtgtagaggtggctgccggcgctaccgcgaggcacgtgtgtgagatgctcgtccagcgggcccacgctctgtctgacgagacctggggactggttgaatgccacccacacttagctctggagagaggcctggaagaccacgaatcagtcgtcgaagtgcaggctgcctggcctgtgggcggcgattcccgttttgtgtttcgtaagaactttgctaaatatgagctgtttaaaagcagcccccactcactgtttccggagaagatggtgtcctcctgtctggacgcccacactggaatcagtcatgaggacctcatccaaaattttctgaatgcaggaagctttcctgagatccaagggtttctacaattgagaggttctgggcggaagctctggaagcgcttcttttgcttcttgcggaggtccggcctctactattctactaaggggacttctaaagatccgaggcacctacagtatgtggccgatgttaacgagagcaacgtatacgttgttacccaaggaaggaaactctacggtatgcctaccgactttggtttctgcgtcaagcccaacaaactgagaaacgggcacaaggggctcagaattttctgctcagaagatgaacagagccggacgtgttggctggcagcattcaggcttttcaaatatggcgtgcagttgtacaagaattaccagcaagcccagagccgccatttacatccctcctgcttggggagccctccccttaggtctgccagcgataacacccttgtcgccatggacttttccggccacgcaggcagggttattgaaaatccccgcgaagcactgtccgtcgcgttagaggaagcacaggcttggagaaaaaagacaaaccaccgccttagtctacctatgcctgcttcaggaaccagcttgagtgcggccatccacaggacccagctctggttccatggcaggattagtcgtgaggagagccaacgcttgatcggtcagcagggcctggtggacgggctctttctcgtccgcgagtcacagagaaatccgcaaggctttgttctaagtctgtgtcacttacaaaaggttaagcactacctcattctcccttcagaggaggagggacgcctctatttttccatggatgatggacagactaggtttacagatcttctgcagttggtagagttccaccagctcaataggggaattctcccttgcctcctgaggcattgttgtacaagggtggccctctag

SEQ ID NO: 119137 - DNA, 1599 bp, synthetic construct
  misc_feature 1..1599: note = Description of Artificial Sequence: Synthetic coding sequence
  source 1..1599: mol_type = other DNA
atggaactggacctgagtccaccacatctctccagctctcctgaagacctgtgccctgcaccaggtacccccccagggacccctaggccacccgacacgccgctacccgaggaggtaaaacgttctcagccgctgttgattcccaccactgggcgcaaactgagggaggaagagagacgggccacctctttgccctcaatccccaatcccttcccagaactctgctctccacctagtcagtcccccattttagggggaccatctagcgcccgaggactccttcccagggacgctagtcgaccccacgttgtaaaggtctacagcgaggacggcgcttgccgaagcgtagaggttgccgcaggcgccacagcccgtcacgtttgcgagatgttagtacaaagggcgcatgccctttctgacgaaacctggggcttagtcgaatgtcaccctcacctggctctcgaacggggcttggaagatcacgaatctgtcgtagaggtgcaggccgcttggcctgtcggcggtgattcgaggttcgttttccgcaaaaatttcgctaaatacgaactcttcaagtcatcgccccattcactatttcccgaaaagatggtatcatcctgtcttgacgcccacaccggtatttctcatgaggatttaatacagaacttcttaaacgctggctctttcccagagattcaaggattcctgcagttacgcggcagcgggagaaaactttggaagaggtttttctgtttcctgcgccgctcagggctctattatagcactaaggggacttcaaaggaccctcgccacctgcaatatgtggccgatgtgaacgaatcaaatgtctacgtggtcacccagggcagaaaactgtatgggatgccaaccgactttggcttttgcgttaagccaaataagttacggaacggtcacaaaggtctgcgtattttttgctccgaagatgagcagtctaggacatgttggctcgccgcctttcgactttttaagtatggtgtgcagctttataaaaattaccagcaggcccagtcccgccatctgcatccctcatgtctgggatccccaccactgagatctgcaagtgacaacacactggttgcgatggacttcagcgggcatgcaggccgagtgattgagaaccccagagaagcattatctgtggctctggaggaggcacaggcttggaggaaaaagaccaatcatcgcctgtcgctaccgatgccggcctctggaacatctctgagcgccgccattcacagaacacagctctggtttcatggacgaataagtcgggaggagagtcagcgcttaattgggcagcaagggttggtggacggcttattcctcgtgagggagagccagagaaacccccaggggttcgtacttagcctctgccaccttcagaaagtcaagcactacctgatcctcccctccgaggaggaaggccgtttgtatttctcaatggacgacggccagaccagatttacggacctgctacagttggtagagttccatcaactcaaccgcggtatcctaccgtgtctgctgaggcattgctgcacacgcgtcgcactctag

SEQ ID NO: 119138 - DNA, 1668 bp, synthetic construct
  misc_feature 1..1668: note = Description of Artificial Sequence: Synthetic coding sequence
  source 1..1668: mol_type = other DNA
atgggcaagtggcgtccagggcagggtcacacaacgggaagtgtgaaacctctctcgtgctccgacgcaatggaactagatttgagcccaccacacctgtctagtagtcctgaagacttatgtcctgcacccggtactccaccgggaacccctcggccacccgatacccctctccccgaggaagttaaaagatcccaaccattgctgatcccaaccaccggccgtaaactccgcgaagaggaaaggagagcaacttccctgccctcgataccaaatcccttccccgagctctgctcaccccctagtcagagccccatcttgggcggtcctagttcggcaagggggctccttcctcgggacgcctcaaggccacacgttgttaaggtatactctgaagatggcgcgtgtcggagcgttgaagttgccgccggtgccacagcccgccatgtctgtgaaatgcttgttcagagagcgcacgcgctctccgacgagacttggggcctggtcgagtgtcatccacacctggcgctcgagcgcggcttggaagaccatgagtctgtcgtggaggttcaggccgcctggcctgttggtggggatagccgttttgtgtttaggaaaaattttgcgaaatacgagttgttcaaaagttccccacatagcctgttccccgagaaaatggtgagctcatgtctcgacgcccatacaggtatcagtcatgaggatttgatccaaaattttctgaatgcggggagttttccagaaattcagggctttctgcagctcagggggtcagggcgaaaactgtggaagcgattcttctgctttctgcggcggtctggcctgtattactcgacaaaagggacaagcaaagaccccaggcatctgcagtacgttgcggatgtgaatgaaagcaatgtctatgttgtgacccaaggccgcaaactatacggcatgcctaccgacttcgggttttgtgtgaagccgaacaaactccggaacggccacaaaggtctcagaatcttttgttccgaggatgagcagtcacgcacctgctggcttgcagcgtttaggttgtttaagtacggggtgcagctgtataaaaattaccagcaggcccagtctcgacacttgcacccctcctgcttgggctccccgccactgcgttccgcatccgataatacactggttgcaatggacttttccgggcacgcaggcagagttatcgagaacccccgcgaagctctatcagttgcccttgaagaagcccaggcatggcgcaaaaagactaatcaccgattatctcttccgatgcctgcgagcggcacctctctctccgcggccattcacaggacccagctgtggtttcatggccgcataagcagagaagagtctcagcggctcattgggcagcagggtctagtagacggcctgttcctagttagggagtcccagcgcaatcctcagggtttcgtcctgtctttatgccacctccagaaagtaaagcactacttgattttaccctccgaagaagaaggcaggctctatttttctatggacgatggccagacaagatttacagatctccttcagcttgtggagttccaccagctgaaccgcgggatactaccctgcctcttaaggcactgctgtacgcgcgtggccctgtag

SEQ ID NO: 119139 - DNA, 618 bp, synthetic construct
  misc_feature 1..618: note = Description of Artificial Sequence: Synthetic coding sequence
  source 1..618: mol_type = other DNA
atggctgctcctggggaaaggggccgtttccacggcggtaatttgttcttcctgccaggcggcgcaaggtctgagatgatggatgatctggccactgacgctcggggacgcggtgcaggaagacgtgacgcagccgccagcgcctctactcctgcgcaggctcccacctcagactctcctgtcgccgaggacgcatctcgccgaagaccctgtagagcttgcgtggatttcaagacctggatgaggacacagcagaaacgagacactaagttccgggaggactgtccgcctgacagggaggaattgggtcggcattcatgggctgtgctgcacacactcgcggcctattacccggaccttcctacgcccgagcagcagcaggacatggcgcagtttattcacttgttttcgaaattttacccatgcgaagaatgtgctgaggatctgagaaagcgcctgtgccgaaaccaccccgacacgcgtacccgtgcatgcttcacccaatggctgtgccatcttcacaatgaagtgaatcgaaaacttggcaaacccgattttgactgtagcaaggtagatgaacggtggcgggatggctggaaagatgggtcgtgcgactag

SEQ ID NO: 119140 - DNA, 285 bp, synthetic construct
  misc_feature 1..285: note = Description of Artificial Sequence: Synthetic coding sequence
  source 1..285: mol_type = other DNA
atgcgcacccagcagaagcgagacactaaattcagagaagattgtccccctgatcgcgaagaactgggaaggcattcatgggccgtgctacacacactggccgcatattaccccgacctgcctacgccagagcagcaacaagatatggctcagtttattcacctgttcagcaagttttatccttgtgaagagtgcgcagaggatctgaggaagagactgtgtcggaatcatcctgacacccgcacacgagcttgcttcaccgtggcggtcccccccgcccagtag

SEQ ID NO: 119141 - DNA, 1629 bp, synthetic construct
  misc_feature 1..1629: note = Description of Artificial Sequence: Synthetic coding sequence
  source 1..1629: mol_type = other DNA
atgagcccctgtccagaagaggccgcaatgcgccgggaggtagtgaagagaatagaaacagtcgtcaaagacctatggcccacggctgatgttcagattttcgggtcattttccacaggcctgtatctgccaacctctgacatagatttggttgttttcggcaagtgggaacgcccacccctccaactgctggagcaggcactgcgaaagcacaacgtggccgagccctgctcaataaaggtgctcgacaaagctaccgttccaataattaagctgactgaccaagaaacagaggtaaaagttgatatctctttcaacatggaaacaggagtccgcgcggcggagttcatcaagaactatatgaagaaatattccctccttccttacctcatcttggtactcaagcagttcctgctccagagggaccttaatgaagtctttaccggcggcatttcttcttatagtcttatattgatggcgataagttttttgcaactgcatccccgcatcgacgcccgcagggccgacgaaaacctcgggatgctgttggtggagtttttcgagctgtatgggaggaattttaactacctgaaaactggaattcggataaaggaaggaggggcatacatcgctaaggaggaaattatgaaggcaatgacatcagggtacaggcccagcatgttgtgcattgaagatcctttgctgcctggaaatgacgtggggagaagctcttatggcgctatgcaggttaagcaagtgttcgattatgcatacatagtcctgtctcatgctgtgtcgcccttggcccgctcatatccaaaccgcgatgccgagagtaccctcggacgcatcatcaaggtgactcaggaggtgatcgactaccggagatggatcaaagaaaagtggggtagcaaggcccatccttccccaggaatggatagccggatcaagatcaaagagcgtatagctacgtgtaacggcgaacaaacacagaaccgcgagcctgagtctccttatggccagaggctgacactgtccctgtcttccccccagctgctgagcagtggcagctcggcctcgagcgtaagcagtctgagcgggtccgacgtggatagtgacacacctccatgtactaccccctcagtttaccaattttccttacaagcgcctgcccctctgatggctggcctgccgactgctctcccgatgccttccgggaaaccccagccgacaacgtcgcgtacactcatcatgaccactaataaccaaactaggtttacaatccctcccccaactcttggcgttgctccagtcccatgtagacaggccggagtggaagggaccgcttccctgaaagccgtgcaccacatgtcaagtcctgctatcccctccgcctcacctaatccgctcagctcaccccacttgtaccacaaacagcataacggaatgaagttatctatgaaggggtcgcacggccatacccaagggggagggtacagtagcgttggttcaggaggagtccgaccccctgtggggaaccggggtcaccatcagtataacaggacagggtggcgccggaagaaacatacccatactagggactctttgcctgtatcattgtcccggtag

SEQ ID NO: 119142 - DNA, 885 bp, synthetic construct
  misc_feature 1..885: note = Description of Artificial Sequence: Synthetic coding sequence
  source 1..885: mol_type = other DNA
atggacctatggcagctactcctgactttagcactggccggcagttccgatgcattttccggatccgaggcgaccgcagctatcttatctagggctccatggtccctccaatccgtcaatcctggcctcaaaactaatagtagtaaagagcctaagtttacaaaatgtcggtcgccagagcgcgagactttctcttgtcactggaccgacgaggttcatcacggcacaaaaaatcttggcccaatccagctgttttacacccggcggaatacccaggagtggacccaggagtggaaagagtgtcccgactacgtgtcagcaggggagaatagctgttactttaattcatcgttcacttctatctggatcccttactgcatcaaactgactagtaatggtggtaccgttgacgaaaagtgtttttcggttgatgagatcgtgcagccagatcctcccatcgctttaaattggaccctgttaaatgtgtcccttacaggtattcacgccgatattcaggtgaggtgggaggcgcccaggaatgccgacatccagaaagggtggatggtccttgagtatgagctccagtacaaggaagtaaatgaaaccaaatggaagatgatggatcccattctgaccacttccgtgcccgtatactccctgaaggtggacaaggagtacgaggtgagagtgcgaagtaaacagcgaaacagcggcaactacggcgaattcagcgaggtcttatacgttacactccctcagatgtctcagttcacgtgcgaggaggacttttacttcccctggttgctcatcataatttttggtattttcggcctgacagtgatgctcttcgtgttcctgtttagtaaacagcagagccaaaactag

SEQ ID NO: 119143 - DNA, 1851 bp, synthetic construct
  misc_feature 1..1851: note = Description of Artificial Sequence: Synthetic coding sequence
  source 1..1851: mol_type = other DNA
atggatctttggcagctcctgctcaccttagccctcgccggaagctcagacgccttttccgggtcggaagattcttcaaaagaacctaaattcactaagtgccgctcccctgagagagaaacctttagctgtcactggacagacgaggtgcaccacggaacgaaaaatcttggacctatacagcttttttacactcgtcggaatacccaggagtggacccaggagtggaaggagtgtcccgattatgtgtctgcaggcgagaatagttgctacttcaattcgtccttcacgagcatttggataccctactgtattaagctcacaagcaacggcggtactgtggatgagaagtgcttctcggtggacgaaatcgtacagcctgatccgccaatcgctctgaattggactctcttaaacgtcagccttacggggatacatgcagacattcaggtccgctgggaagctccgagaaatgccgacatccaaaagggatggatggtactagaatacgagctgcagtacaaggaggttaacgagaccaagtggaagatgatggatccgatacttaccacaagcgtccctgtgtattcactgaaggtcgataaagaatacgaggtgcgcgtgcgaagcaaacaaagaaactccggaaactacggcgagtttagcgaggtactgtatgttaccctgcctcagatgtcacaatttacttgcgaagaggacttttactttccctggctgttgataattattttcggcatatttggtcttacggtaatgctgtttgtgtttctgttcagtaaacagcagcgtattaaaatgctcattctgcccccagttccagtgccgaaaattaaaggaatcgatccagacctcctgaaagagggaaagctggaggaagtgaatactatcctggctatccatgactcatacaaacctgaatttcatagcgacgacagttgggttgagtttattgagctggacatcgatgaacccgacgagaagaccgaagagagcgatacagaccgcttactctccagtgatcacgagaagagtcactctaacctcggggtaaaagatggcgactcgggcagaacgagctgctgcgaacccgacatactagagaccgatttcaacgccaatgacattcacgaggggacctctgaggtcgcccaaccacagaggctcaagggagaagctgacctgctgtgcctcgatcagaagaatcagaacaattcaccctaccatgatgcctgtcccgcgacccagcagccatccgtgattcaggcggagaagaacaaaccgcagcctctccccaccgagggagccgagtccacccaccaggccgcacatatccagttatccaaccctagttccctatctaatattgatttctatgcccaagtcagcgacattacacctgccggatctgtagttctttcccctggacagaaaaacaaagctggtatgtcccagtgtgatatgcatcccgagatggtgtctttgtgtcaagaaaactttctcatggacaatgcatatttttgcgaagcagatgctaagaagtgcatacctgtcgctccacacattaaggtggagtcacacattcaaccgagtctgaaccaggaggatatatatatcactacagagtcattaaccacagccgccggccggcccgggacaggagagcatgtaccgggatccgaaatgcccgttcccgactacacttccattcatattgtacagagtccccagggactcattttgaacgctacggctctgcccctgcccgataaggaattcctcagcagctgcggctacgtgtctacagaccaattgaataagattatgccatag

SEQ ID NO: 119144 - DNA, 1356 bp, synthetic construct
  misc_feature 1..1356: note = Description of Artificial Sequence: Synthetic coding sequence
  source 1..1356: mol_type = other DNA
atggtgttggagtatgaactccagtataaagaagtgaacgaaactaaatggaaaatgatggatcctatcttgactactagcgtgcccgtttactctctgaaagttgacaaagaatatgaggtacgcgtgcgcagcaaacagcgcaatagtggcaactacggcgaatttagcgaggtattatacgtcacactgccccagatgtctcaattcacctgcgaggaggacttctattttccttggctactcatcattattttcggaatttttgggttgaccgtcatgctgttcgtgttcctgtttagcaagcagcagcgcataaagatgctgattctgccccctgtaccagtgcccaagatcaagggaatcgatccggacctgctgaaagaggggaagctggaggaagtgaatactatcctggcgatccatgactcttataagcccgaattccactccgacgattcttgggtcgagttcatagaactggacattgatgaacctgatgagaaaactgaagaaagcgacaccgaccgcctcttgtcatccgatcatgaaaagtcacattccaacttgggagtcaaggatggggactcgggaaggacgagttgttgcgaacctgatatcctcgagacggactttaacgctaatgacatccatgagggaaccagcgaggtggcacagccacaacggctaaagggtgaggctgacctgctgtgtctagaccagaagaatcagaataactctccttaccacgatgcatgcccagccacccagcaaccatctgttattcaagctgagaaaaacaaaccccagcccctcccgactgagggcgcagagtcaacccatcaggccgcgcacattcagttgtccaatcccagtagtctgagcaatatcgacttctacgctcaagtaagcgatattacaccagctggctctgttgtactttctccaggtcagaagaataaggcaggaatgtcacaatgcgatatgcatcctgagatggtttccctgtgccaggagaatttcctgatggacaacgcctacttctgtgaggcggatgccaagaagtgtatcccagttgcaccgcatatcaaggtggagagccacattcagcctagcctcaaccaagaagacatttatatcaccacagagtctctaaccaccgccgctgggcgacctggaacaggagagcacgtgcccggaagtgagatgcctgtccctgactacacttccatccacattgtacaaagtcctcagggcttaatcttgaacgctaccgccttgccattaccagataaggagttcttgagctcctgcggatacgtgtccactgatcagctgaataaaatcatgccgtag

SEQ ID NO: 119145 - DNA, 327 bp, synthetic construct
  misc_feature 1..327: note = Description of Artificial Sequence: Synthetic coding sequence
  source 1..327: mol_type = other DNA
atgcccttgtgggtgtttttctttgtcattctgaccctcagtaactccagtcactgtagccccccaccgcctctcacgctccggatgagacgctatgccgacgctatatttacaaactcctacagaaaggtcctgggccaactgtccgcccggaagttgttacaggatatcatgagccgccagcagggggagtccaatcaggaacgaggggccagagcacggttggggcggcaggtggattccatgtgggctgagcagaagcagatggaactggagtccattttagtcgctttgttacagaaacatagtaggaatagtcagggatag

SEQ ID NO: 119146 - DNA, 324 bp, synthetic construct
  misc_feature 1..324: note = Description of Artificial Sequence: Synthetic coding sequence
  source 1..324: mol_type = other DNA
atgccattgtgggtgtttttctttgttatcctgaccctttccaattcatctcactgctcaccacctcctccactcacactccgtatgagaaggtatgcagacgcaatctttacaaactcatatcgaaaggtgctaggacaactgtccgcccgcaagttgctacaggatattatgtctagacagcagggcgaaagcaaccaggaacgcggcgctcgtgcgagacttggcagacaagtggatagtatgtgggccgaacaaaagcagatggagctcgagtctattctggtcgccctcctgcagaaacacagaaactcacaggggtag

SEQ ID NO: 119147 - DNA, 327 bp, synthetic construct
  misc_feature 1..327: note = Description of Artificial Sequence: Synthetic coding sequence
  source 1..327: mol_type = other DNA
atgcctctgtgggtcttcttttttgtgatactgacactctccaatagtagccactgctccccgccccctcccctgactttgaggatgcggagatacgcggacgctatcttcactaactcatatagaaaggttttgggccagctgagcgcacggaagctgttgcaggacattatgagcaggcagcagggagaaagtaatcaggagagaggcgcaagagcccgtctcggcagacaagtagactcaatgtgggccgagcagaagcagatggaactcgagagcatactggttgccctgctgcagaaacattctaggaattctcagggctag

SEQ ID NO: 119148 - DNA, 1272 bp, synthetic construct
  misc_feature 1..1272: note = Description of Artificial Sequence: Synthetic coding sequence
  source 1..1272: mol_type = other DNA
atggataggcgaatgtggggcgcacacgtcttctgcgtgctctcacctcttccaacggtactggggcacatgcaccccgagtgtgattttatcacccagttaagagaagacgaatcagcctgtctgcaagccgcagaagagatgcctaataccaccctggggtgtcctgccacctgggatggcctcctgtgctggcctaccgctggctctggagaatgggtcaccctgccttgccccgatttcttttcacatttttcttccgagtccggcgctgtaaagagagactgcaccattactgggtggtcagaacccttccctccctatcctgtagcttgccccgttccccttgaactgctcgccgaagaggaatcctattttagcacagtgaagattatttacaccgtcggtcattcaatctccatcgtggctcttttcgtagctataactattctggtggccctgcgccgtctccactgtcccaggaactacgtgcacacccagctgtttaccaccttcatccttaaggcaggcgctgtgttcttaaaggatgctgccctattccattcagatgacacagaccactgcagtttctcaaccgtcctgtgtaaagtctccgtcgccgcatctcacttcgcaaccatgaccaatttctcatggctgctggcagaagcagtatatctcaattgcctgctcgctagcacaagtcctagctcacgacgagccttctggtggctggtgctcgccgggtggggcctgcccgtattgttcacaggtacatgggttagctgcaaacttgcatttgaagacatagcatgctgggatcttgatgatacaagcccctattggtggatcatcaagggccccatcgttctgtccgtgggcgtaaactttggcctgttccttaacattatacggattcttgtgagaaaacttgagcctgctcaaggttcactgcacacacagagtcaatattggagactgtcaaaatctacactcttcctcataccccttttcggaatccattatatcatattcaattttctgccggataatgccggccttggcattaggctgcctctggagctcgggcttggttcgtttcagggcttcattgtagctatcttgtattgtttcctgaaccaggaggttcgtacagagatctctcggaagtggcatggacacgatcctgaattactgccagcatggcgaaccagagcaaagtggacgaccccttcacggtctgccgccaaagtcctaacctctatgtgctag

SEQ ID NO: 119149 - DNA, 207 bp, synthetic construct
  misc_feature 1..207: note = Description of Artificial Sequence: Synthetic coding sequence
  source 1..207: mol_type = other DNA
atggtccccggcacgccttcccccctgttggggcgaggcaaagagctgtggctggaatccctggcttgccttcctggcgcagttaagagggattgcactatcacaggttggtctgaaccctttcctccttaccccgtcgcatgtccagtgccccttgaattgctggctgaagagggctgcccgtgctcgtcattagccaggggatag

SEQ ID NO: 119150 - DNA, 438 bp, synthetic construct
  misc_feature 1..438: note = Description of Artificial Sequence: Synthetic coding sequence
  source 1..438: mol_type = other DNA
atggttccaggaacgccctcccccctgctaggccgcggcaaggagctttggcttgagagtctggcatgtctgcctggtgctgttaagcgggattgcacaatcacaggatggagtgagccgttccctccctatcctgtggcatgcccagtccccctggaacttctagccgaggaagaaagttatttcagcaccgtgaagatcatatatacagtgggacattcaatctccatcgtggcactctttgtggccatcaccatcttggttgccctgaggcgcctacactgtccgcgcaattacgtccatactcaattattcacaacctttatccttaaagccggagctgtgtttctcaaggacgcggctttattccattctgacgacacggaccactgttctttcagtaccggttgcccctgctcctcccttgctcgaggctag

SEQ ID NO: 119151 - DNA, 456 bp, synthetic construct
  misc_feature 1..456: note = Description of Artificial Sequence: Synthetic coding sequence
  source 1..456: mol_type = other DNA
atgcttccattcagtaccgccaccactttaaccaccgcagcctcgcccctcgccgccagggcccttcactggcatgtgggcgaactgcagacgggcctgagggggcatcgcgtgcttggccccggccgacatctgcctttgttagtcgatcatcagcgcgctcactgccctttggggaggggggagctctgggcttttagccagtactatccccaccccggggaggagaccggggcttcgagcggccagcctccgtaccccgtgtccgtactggcatccctgcaggttgatacattccccgatcccactctgtggaattccctacaccatctgcaactgccggcacggcaatgttggcctggtcatccgcccccaccaggagcaggaacgggatttctgcctggcctgcattgctgccaccccttgcttctgccacagcccaggggtgaggattag

SEQ ID NO: 119152 - DNA, 1080 bp, synthetic construct
  misc_feature 1..1080: note = Description of Artificial Sequence: Synthetic coding sequence
  source 1..1080: mol_type = other DNA
atggtccctggcacaccctcccccctgctggggcgaggaaaagaattgtggctggaatcacttgcctgcctccccggggcggtcaagcgggactgcaccatcaccggttggtctgagccattccccccgtaccccgtcgcatgcccagttccattggaacttctggcagaggaggaatcttatttctctacggttaagataatatacaccgtggggcatagcatatcaatagttgcactattcgtggcaatcacaatcttagtggcactcaggcggctccactgccctcggaattacgtacatacccaattattcaccaccttcatccttaaagccggtgccgtgtttctgaaagacgcagccctgtttcatagcgacgatacagaccactgctccttttccactgtactgtgcaaagtaagtgtcgccgcctcacacttcgctacgatgactaatttcagttggctcctagctgaagctgtgtacttaaactgtctgctggcatctacttctcctagctctaggagagccttctggtggctggtgctcgccgggtggggccttcctgttctgtttaccggaacgtgggtttcctgcaaacttgcctttgaggatattgcatgctgggacttggacgataccagcccatactggtggattatcaagggccccattgttttaagcgtcggcgttaatttcgggttattccttaacattattcgcattctcgtaagaaagctagagcccgctcaggggtcccttcacactcagtcacaatattggcggctgtctaagagcacactcttcctgatccccttgtttgggattcattatatcatcttcaatttcttgcccgacaacgctggcctcggtatccggttgcccctggaactgggcctcggaagctttcaaggctttatcgtcgctattctctactgtttccttaaccaggaagtgagaacagagattagtaggaaatggcatggtcacgatccagagttgctccctgcatggaggactcgagcaaagtggaccaccccatctaggagcgccgctaaggtactcacaagtatgtgttag

SEQ ID NO: 119153 - DNA, 1101 bp, synthetic construct
  misc_feature 1..1101: note = Description of Artificial Sequence: Synthetic coding sequence
  source 1..1101: mol_type = other DNA
atgtggaacgcaacccctagcgaagagcccggcttcaacctcaccctggcagacctagattgggacgcttcgccaggtaatgatagcctgggagacgagctcttgcagctattccctgccccccttcttgccggcgtaactgctacatgcgtcgcattgtttgttgtaggcatcgccggtaatctgcttaccatgctggtagtatctcgctttagggaactgcgcactacgactaatctttacctgtctagtatggcttttagcgacttattaattttcctttgtatgcctctggatcttgtgaggctatggcaataccgtccctggaattttggtgacttactgtgtaagttgttccagtttgtgagcgagtcctgtacctatgcaaccgtgctgacaattacggcgttatccgtggagagatactttgcaatttgttttcctttgagagcaaaggtcgtggtgactaaaggcagggttaaactggttatttttgtgatctgggccgtggccttttgttcagcaggtcctatattcgtcctggtgggagttgagcacgagaacggtacggatccatgggacacgaatgagtgcagaccaacagaattcgccgtgagaagtggcctgctcacggtcatggtctgggttagtagtattttcttcttcctgcctgttttttgcctgacggtgctatacagcctgattggtaggaaactctggaggaggcgacgaggtgatgccgtcgtgggtgcttccctgagagatcaaaaccataaacagaccgtgaaaatgctggcagtggtcgtgtttgcgttcatcctgtgttggctgccattccacgtaggacggtatctgttctctaaatccttcgaacctggcagtcttgagattgctcagatcagccagtattgcaatctggtctcctttgtgctcttttacctgtccgctgccattaatccaatcctctataacatcatgtctaagaagtaccgggtcgcagtctttagattgctgggttttgaaccctttagccagcgcaaattaagtactctgaaagatgaatcctctcgcgcttggaccgaaagctctattaatacttag

SEQ ID NO: 119154 - DNA, 870 bp, synthetic construct
  misc_feature 1..870: note = Description of Artificial Sequence: Synthetic coding sequence
  source 1..870: mol_type = other DNA
atgtggaatgccaccccctccgaggagccaggatttaacctcactttggcagacttagactgggatgccagcccgggtaacgattccttgggagatgagctcctgcaattgttccctgccccactactcgctggagtgacagccacttgcgtagcgctcttcgtggtggggatcgctggcaatctattgaccatgttggtagtgtccaggttccgggagttaagaacaaccacgaatctgtatctgtcaagcatggccttttccgatcttcttatcttcttatgcatgcccctcgatctggtaagactttggcagtatagaccctggaattttggcgatttgctgtgtaaactcttccaattcgtctccgagtcctgcacatacgccactgtgcttacaataacagcattaagtgtggaaagatacttcgctatctgcttccctttgagagcaaaggtcgtggtcacgaagggccgcgttaaactggtgatctttgtgatttgggcagtcgccttctgttctgcaggtccaatttttgtcctcgtaggagtggagcacgaaaacggaacagatccatgggatacaaatgagtgtcggcctactgagttcgccgtcagaagtggtttgctcaccgtgatggtgtgggtgagttcaatattctttttcttgcctgtgttttgcttgacggttctctactcactcatcggacgtaaattgtggcgtcgccggaggggtgacgcagtcgttggggcttcactgcgagaccagaatcacaaacagacggtcaagatgctgggcggctcccagcgggccttgagactgagcttggctggacccatcctgtccctctgcctgcttccctccctttag

SEQ ID NO: 119155 - DNA, 666 bp, synthetic construct
  misc_feature 1..666: note = Description of Artificial Sequence: Synthetic coding sequence
  source 1..666: mol_type = other DNA
atggcattcgttaaatcggggtggctcttgcgccagagcacgattctgaagaggtggaaaaagaactggttcgacttgtggtctgatgggcatctcatatactacgacgaccagacccgacagaacattgaggacaaagtacacatgccaatggattgcatcaacattagaacaggacaggaatgccgcgatacgcagcccccggacggcaaaagcaaagactgtatgctgcaaattgtgtgtcgtgatgggaaaaccatcagtctgtgtgccgagagcacagatgattgccttgcctggaagttcaccctccaagactccaggactaatacagcttacgtggggtcggccgttatgaccgatgagactagcgtggtgtcatctccccctccctacacagcctacgcagcccctgccccggaggcatacgggtacggaccctacggcggtgcctatcccccaggcacccaggtcgtgtacgctgccaacggccaagcttatgcagtaccctaccaatacccctatgccggcctgtacgggcagcaacccgcaaaccaagtgatcatcagagagagatacagggacaacgattctgacctggctctgggtatgctggctggcgccgccaccgggatggctctaggctccctgttttgggtcttctag

SEQ ID NO: 119156 - DNA, 1230 bp, synthetic construct
  misc_feature 1..1230: note = Description of Artificial Sequence: Synthetic coding sequence
  source 1..1230: mol_type = other DNA
atgggtaatagctacgccggccaactaaaaacgacgcgatttgaggaagtcctccacaacagcatcgaagcaagcttacgaagtaacaacctggtgcccaggcctattttttctcaattgtacttggaggcggagcagcaactcgcagcattagaaggcggctcccgggtcgacaacgaggaagaggaggaagagggagaaggcgggctggagactaacgggccaccgaacccctttcagctccaccccctccctgaaggatgctgtaccactgatgggttttgccaggcaggtaaagacctccgcttagtctccataagcaacgagcccatggacgtgcccgccggattcttactcgtcggtgtgaaaagcccttcccttccagaccacctgcttgtatgtgccgtagataagcgtttcttgcccgatgataatggccacaatgctctgctcggattttcaggcaattgtgtggggtgcggtaaaaaaggcttttgttacttcactgagttttcgaaccatattaacctgaagttaactacccaacccaaaaagcagaaacacctgaaatattacctcgtgcgaaacgcgcagggtacgctgactaagggaccgctgatctgttggaaaggtagtgaatttcgctcccgccagatccccgctagcacatgttctagctctctgttccctgcccttgagtcaaccgcagcattcccaagtgagccagttcctggaaccaatcccagcatcctcatgggggcccagcaggcaggtcctgcttctgatcatccttccctgaatgccgcaatgggccccgcagtgtttaatgggaaggattcccctaagtgtcagcagctagctaagaacaacctcctggctctcccacgccctagtgctcttgggattttgagcaacagtgggccacctaaaaaacgtcataagggttggtctcctgaatccccttccgcgcctgatgggggttgtcctcagggtggcggtaatcgtgctaagtacgagagtgctggcatgtcctgtgtcccacaagtgggattggtcggaccggcttcggtcacctttcccgtcgttgctagtggggagcctgtgtccgtgccggataacctgctgaagatttgtaaagcaaaacccgtcatctttaaagttttcgtgaatggagccacccagatggttgctctgggtcccgccgagccggccagccctcggagcctgtag

SEQ ID NO: 119157 - DNA, 1374 bp, synthetic construct
  misc_feature 1..1374: note = Description of Artificial Sequence: Synthetic coding sequence
  source 1..1374: mol_type = other DNA
atgggaaatagttacgccggtcaacttaagactacgcgcttcgaggaagtcctacacaattcgatcgaggccagcctccgttcaaataatttagtgcctcgtccaatcttttcccagctgtacttagaggccgagcagcagcttgctgccctggagggagggtcccgcgtggataatgaagaagaagaggaagagggcgagggaggactcgaaaccaatggtcctccaaacccttttcaattgcaccccttgccagaaggttgctgcacgacagacgggttctgccaggctggaaaagatcttaggctggtgtctatttcaaatgagcccatggacgtaccagctggtttcctgctggtgggggtcaaatctcccagccttcccgaccacctgctggtgtgcgccgttgacaagcgctttctgcctgatgataacgggcataacgccctgctggggttcagcggcaactgtgtaggctgcggaaaaaagggcttctgttactttaccgagttctctaaccatataaatctgaagttaactacacagcctaagaagcagaagcatctcaagtactatctggtacggaacgcacagggaactcttaccaaaggacctctgatctgttggaagggcagcgaattcaggagccgtcagatcccggcctcgacctgttcctctagtctgttcccggccttggaatctactgctgccttcccctcggagccggtccctggcacaaacccctctattctaatgggagcacaacaggccgggcctgcctctgaccatccttctctgaatgccgcgatgggcccagcagtgttcaacggtaaggattcgcccaaatgccagcagttagcgaagaacaacctgctggctttgccacggccctcggctctgggtatacttagtaatagcggcccacctaaaaagcgacacaaggggtggagtcctgagtcgccctcagcacccgacggaggctgtccccaaggcggcgggaatcgggctaaatatgagtccgccggaatgtcgtgtgtgccccaggtggggctcgtaggccccgcatccgtgacttttcctgttgtggcttccggtgagcctgtgagtgtgcccgataatctgttgaagatctgtaaggccaaaccagttatcttcaaagggcacgggaattttccgtatctgtgcggtaacctcaatgacgtggttgtaagcccccttctctacacatgctaccagaactcccaatctgtttctagggcgtacgaacagtacggcgccagcgccattcaaccaatatctgaagaaatgcagcttctactgacagtgtactatctggtccaactcgcgcaccaaatcagaaaccctgatgtctag

SEQ ID NO: 119158 - DNA, 5850 bp, synthetic construct
  misc_feature 1..5850: note = Description of Artificial Sequence: Synthetic coding sequence
  source 1..5850: mol_type = other DNA
atgggcaattcttacgctggccaactaaagactactaggttcgaggaggtgctccacaatagcatcgaggctagtctgaggagtaataacctggtgcctagacctatcttttcacagctgtacctcgaggccgaacagcaactggcagctctcgaggggggctccagggtcgacaacgaggaggaggaggaggagggcgaaggaggactggagaccaacgggcctcccaatccgttccagcttcaccccctgccagaagggtgttgcacaaccgacggattttgccaggccggaaaggatctccggctggtgtccatctccaacgagcccatggatgtgcccgctggcttcctgctggtaggagtcaagtctccaagcctccctgatcacctcctcgtatgcgcagtggacaagcgcttcctcccggacgataatggacacaacgccctactgggtttttcagggaattgcgtgggttgcggaaagaagggcttttgctactttaccgaatttagcaatcatatcaaccttaaactcacaactcagcccaaaaagcagaagcacctgaagtattacctggtgcgaaacgcgcaaggaacattaacgaagggacccttgatctgttggaagggatctgagttccgatctaggcagatccccgccagcacctgctcatctagtctgtttcccgcccttgaatccaccgccgcctttcctagcgagccagtacctggcacgaatcctagtattctcatgggcgcacagcaagcagggcctgcctcggaccacccttcactcaacgctgccatgggaccggcagtgttcaatggtaaggacagcccaaagtgccaacagcttgcgaaaaacaatttgcttgcgctgcctcggccttctgcgctgggaatactgagcaactcaggtcctcccaagaaacggcataagggctggagtcccgaatcccctagtgcccccgatggggggtgcccgcagggcggcggaaaccgggcgaagtacgagtcagccggaatgtcttgcgtgccgcaggtaggcctggtggggccggctagtgtcacgttccccgtcgtagcctccggggagcctgtctcagtcccagacaatctgctgaaaatctgtaaagctaagcccgtcatctttaagggtcacgggaactttccctatctgtgcgggaatcttaacgacgtggtagtctcaccattactgtatacatgctatcaaaacagccaatctgtgagccgcgcctacgagcagtacggcgcatctgcaattcagccaatatctgaagagatgcagctacttctaactgtctactatcttgttcagctggccgctgatcaggtgccactgatggaggaccttgagcagatatttctgcggagctggagagaaagccatctaactgaaataaggcagtatcaacaagcccctcctcagccttttccccccgccccttcagccgctgctccagtgacatccgctcagttaccttggctggccagccttgccgcatcatcttgcaacgattccgtccacgtgatagagtgtgcctacagcctcgccgagggcctctctgaaatgttccgcctgctggtcgagggaaagctggccaaaacaaactacgtggtaattatatgtgcatgtcgctccgcggcaatcgatagctgcatcgctgtcacaggtaagtaccaggctaggatcttatctgaatcactgctcacaccagcggagtaccagaaggaagtcaattacgaactggtcactggaaaagtcgactcactgggtgcattcttctctacactgtgcccagagggtgatattgacatcctgctcgacaaatttcatcaagaaaatcagggacatatcagctctagtttggcagccagttcagtaaccaaagctgcctctctcgatgtgtctggcactcccgtgtgtacgtcatataacctcgaaccgcacagtattcgacctttccagcttgccgtcgcccagaaactgctaagccacgtgtgttcaattgccgatagcagcacccagaacctggatttaggaagtttcgaaaaagtggactttttgatctgcatccccccatccgaagtcacttaccaacaaactctgcttcatgtgtggcactctggggtgctgctggaactggggctgaagaaagaacacatgaccaagcaaagagtggaacagtacgttctgaaactggacactgaagcccagactaagttcaaggcgtttctgcagaacagtttccaaaatcctcatacactcttcgtgctgattcacgaccacgcccattgggatctggtgtcatctaccgttcacaacctgtactcacagagtgaccctagtgtgggactcgtggacaggttgctgaattgccgagaggtgaaagaggcacccaatattgtcacgctccatgtgacctcatttccatatgccttgcagactcagcatactctcattagtccttataatgaaatacactggcctgcctcatgttcaaatggtgtcgatctgtaccatgagaacaaaaagtatttcggtctgagcgaatttattgaatccactttgtctggccactctctgcccttgttgcgctatgattcttcgttcgaagctatggtgacggcactgggaaagcgatttccaaggttgcactccgctgtcatcaggacctttgtactcgtgcagcactatgccgctgctctaatggcagtaagcggcctgcctcagatgaaaaattacactagcgtagaaacgctggagatcacgcagaatctcttaaatagccccaaacagtgtccatgcggccatggacttatggttttgctccgggtcccatgctctccgctcgcagtcgtggcatatgagcgccttgcccacgtgagagccagactagctctggaagaacatttcgagattatcctgggctctcccagtagtggagtaactgtgggaaaacactttgtgaaacagctgagaatgtggcagaaaatagaggacgtggagtggaggcctcaaacttacttggagctggaggggctgccttgtattctgatttttagcggcatggaccctcatggagaatccctaccgaggagtctgagatactgcgatctgcgactcattaatagcagctgccttgtcaggacggcgttggaacaggagctgggtttggcggcttactttgtctctaacgaggtgccactcgagaaaggtgcccgtaatgaagccctggaaagtgatgcagagaagctgtcttctaccgacaacgaggatgaggagcttggaaccgaagggtccacctctgaaaaacgtagcccgatgaaacgcgagcgctcccgcagccacgactcagcaagctcgtccttgagctccaaggcctccggctccgccctgggaggcgagtcttcagctcagcccaccgcccttccacagggagagcatgcacggtcccctcagccccgggggcccgccgaagagggccgcgccccaggggagaaacagaggcctagagcgtctcagggtcccccaagcgctatctcacgccattctccgggaccgaccccccagcccgattgcagcctgaggactggtcagaggtccgtccaggtctctgtgacctcatcttgcagtcaattaagttcaagcagcggctcttcgagctcctcagtagccccggcagcgggcacttgggttttgcaggcatctcaatgttctctgaccaaggcttgtcgacaacctcccatagttttcttgcctaaactggtgtacgacatggtggtgagcactgatagttcagggctcccaaaggcagcatcgttactcccaagtccctctgttatgtgggctagctccttcaggcctctgctatccaagacaatgacttctacagagcagtcgctttattacaggcaatggacagttcccaggccctctcatatggactatggaaacagagcagagggcagagtcgacgggttccacccgaggcggttgctgctaagtggtcccccccagatcggtaaaacaggggcctatctccagtttctctccgtcctgtcaaggatgctcgtccgactcacggaagtcgatgtttacgacgaggaagagattaatatcaacttacgggaagagagcgactggcattatctccagctgtcagatccttggcctgacctagaactgtttaagaagctgccttttgactatattatacacgatccaaaatacgaggacgcttctctgatttgtagccattaccagggaataaaaagtgaagacagagggatgtccaggaaaccggaggacttgtatgtcaggcgacaaactgctcgcatgaggcttagcaagtacgcagcctataatacctaccaccactgcgagcagtgccaccaatacatgggatttcatccgcgctaccagctttatgagagcaccctgcacgcgttcgcttttagctatagtatgctcggagaggagatacaactgcatttcattatcccaaagagcaaggagcaccatttcgtgttctcacagcccggcggccagttggaatccatgagactgccccttgtaaccgataaatcccacgagtacatcaaaagcccaaccttcacgcctacaactggacgtcatgagcacgggctgtttaatctctaccacgcaatggatggggcctcccatctgcacgtgcttgtcgtgaaagagtacgaaatggcaatctacaagaagtattggccgaaccatatcatgttggtcctgccgtctatcttcaattcagccggcgtgggagcggcccactttctcattaaagagctctcttaccacaacctagagctcgagaggaacaggcaggaggaactcggtatcaagcctcaagacatatggccgtttatcgtgatcagcgacgactcctgcgtgatgtggaacgtagttgacgtgaactcagccggcgagcgctcacgggaattctcctggagcgagaggaacgtcagtctgaaacatataatgcagcacattgaggcagcccctgacatcatgcactacgcactcttgggtcttcggaagtggtcttccaaaacccgggcctcagaggttcaggagcctttttcgcgctgccacgtgcataacttcatcattcttaacgtggacctcacccagaacgtccagtacaatcagaataggttcttgtgcgacgacgttgacttcaaccttagggtccattctgcgggcctgttgctgtgcaggtttaatcgattctcagtgatgaagaagcagatcgtggtcggcggacataggagcttccatattacgtcaaaggtttctgacaactcggctgccgtcgtccccgcgcagtacatttgcgctcccgacagcaaacatacattcctcgccgcacctgcgcagctcctgctggagaagttcctgcagcaccacagtcacctgtttttccccttatcattgaagaaccatgatcatcccgtgctgagtgtcgattgttaccttaacctgggatcacaaatttccgtttgctatgtttcatcccggccacatagtctcaacatctcatgtagcgatctcctgttctctgggctcctgctttatttgtgtgacagttttgtgggggctagttttttaaagaaattccattttttgaagggcgcaaccctgtgcgtaatatgccaggaccgcagttcactgcgacagacggtcgtgagactggagctggaagacgagtggcagtttcggctgcgggacgagtttcaaaccgccaacgccagagaagatcggccactattctttcttaccgggcgccatatttag

SEQ ID NO: 119159 - DNA, 1188 bp, synthetic construct
  misc_feature 1..1188: note = Description of Artificial Sequence: Synthetic coding sequence
  source 1..1188: mol_type = other DNA
atgacgctgcggcgcctgcgtaagctgcagcagaaggaagaagcggcagccaccccagacccggccgctaggacacctgattcggaggtagcaccagccgcccccgtgccaactcccgggccccctgcagccgctgccactccgggtcctccagcagacgagttgtacgcagcactggaagattaccatcccgctgagctgtacagggcacttgccgtctccggcgggacccttcctcgcagaaagggctcaggctttcgttggaagaatctttcccaatccccggaacaacagagaaaggtgctcaccttggaaaaggaggacaatcagactttcggctttgaaattcagacctatggattgcaccatcgcgaggagcagcgggtcgaaatggtaacttttgtgtgtcgcgtacacgaatcaagtccggcgcaactggctgggctcaccccgggggacacaattgcctctgtcaacggcctcaatgtggagggaattcgtcaccgcgagatcgttgacatcattaaagcatctgggaacgtgctgcggctggaaactctatacggcacaagtattaggaaggctgagctcgaggctcggctccaatacttgaaacagacgctctacgaaaagtggggcgaatacaggagtttaatggtgcaggaacagaggctggtgcatggcctggtcgtaaaagaccctagcatctacgataccctggaatccgtgcggtcttgtttatacggcgctggcttgctgcccggctctctgcccttcgggcctctcctggccgtaccaggacgaccccgtgggggagcccggagggctaggggagatgccgatgatgcagtgtaccatacgtgcttctttggtgactcagagccccctgcattgccccccccgcctccccccgcacgggccttcggtcccggacccgctgaaactccagccgtagggcccggcccaggtcccagagctgccctgtctagaagtgccagtgttcgttgtgcaggtccaggaggcggtggcggaggaggcgcaccgggagctctttggactgaggcccgtgaacaggcgctgtgcggccctggcctaaggaagacaaaatatagatcgtttcgaagacggcttcttaagtttatccccggtctcaatcgctctcttgaagaggaggagagtcagctatag

SEQ ID NO: 119160 - DNA, 759 bp, synthetic construct
  misc_feature 1..759: note = Description of Artificial Sequence: Synthetic coding sequence
  source 1..759: mol_type = other DNA
atgacactgttaccctctaagggtggcgataccatagcctccgtgaacggactaaacgtggagggcatacgccatagagaaattgtggacattatcaaagcaagcggtaatgtgctcaggctggaaaccctttacggtacttccatcagaaaagcagaactcgaagctcgcttgcaatatcttaaacagacactttacgagaaatggggagagtacagatccctgatggttcaggaacaacgtttagtgcacggactggtcgtgaaggaccctagcatctacgacactctggagagcgtgagatcttgtctgtacggtgctggattacttcccgggtctcttccttttgggcctctattagccgtgccaggacggcctaggggaggagctaggcgagcccggggggatgctgacgatgcagtctaccacacgtgtttctttggcgatagcgagccaccagcgctccctcctcccccacccccagctcgcgcattcggcccaggaccggcggagacgcctgcggttggaccagggcctggtccccgcgcagccttgtccagaagcgctagcgtgcgatgcgccgggcccggaggcggtggcggtggcggagcccccggagccttgtggacggaagctcgggagcaagcactctgtggacctgggcttaggaagacgaagtaccgctcttttaggcgcaggctcttgaagtttattccaggccttaataggagcttggaggaagaggaatcccaactatag

SEQ ID NO: 119161 - DNA, 759 bp, synthetic construct
  misc_feature 1..759: note = Description of Artificial Sequence: Synthetic coding sequence
  source 1..759: mol_type = other DNA
atgacactcctcccatcaaagggcggagatacaatcgcgtcagtaaatggattgaatgtggagggaatccggcaccgcgaaatagtggacattataaaggcttcgggaaacgtactgaggctggagactctttacggaacgtcgataagaaaagcagaattggaggccagactacaatatctgaagcagaccctttatgagaaatggggagagtatagatcattgatggtgcaggagcagagacttgtccacggcttggtagtgaaggacccaagcatctacgacacattagaatcagtccgtagttgtctgtacggagccggccttctgcccggctctctgccgttcgggccactccttgctgtaccaggccggccaagaggcggcgccaggagggcacggggtgatgctgacgacgcagtgtaccatacttgcttctttggagactccgagccacccgctctccctccacccccaccgcctgcacgcgcttttggacctggtcctgccgagacgccagcagtcggtcccggtccaggaccccgcgccgctctttcgcgaagtgcctccgtcagatgcgccggacccgggggcgggggcggcggtggtgctcccggcgcactgtggaccgaggccagagagcaggcgctatgcgggccggggttacggaagaccaaataccgcagtttccgtagacggttgctcaagtttattccaggcttgaatcggtctttggaggaggaagagtcccagctgtag

SEQ ID NO: 119162 - DNA, 654 bp, synthetic construct
  misc_feature 1..654: note = Description of Artificial Sequence: Synthetic coding sequence
  source 1..654: mol_type = other DNA
atggccgcccagtgcgtgcggcttgcccgcaggagtctgcccgcactcgccctgtcactgagaccaagcccccggcttctatgcacggccaccaagcagaaaaatagcgggcaaaatctggaggaggacatgggtcagtcagagcaaaaagctgaccccccggcaaccgaaaagactctcctggaagaaaaagttaaactggaggaacagctcaaagaaacagtggaaaagtacaagagagccctcgcagatacagaaaacctgcgtcagcgatcccagaaactggttgaagaggctaagctttacgggattcaggccttttgtaaggatctgctggaagtcgcggacgttttagagaaagcaacccagtgtgtgcccaaggaagaaataaaggacgataacccccacttgaagaacctctatgaaggtctggtgatgacagaggtccaaatccagaaggtttttaccaaacatggattgttgaagcttaaccctgtcggagccaagttcgatccatacgagcatgaagccctcttccatactccagttgaggggaaagaaccaggaacggttgccctggtcagcaaggtggggtataaactgcatggacggaccttgaggcccgccttagtgggcgttgtcaaagaagcctag

SEQ ID NO: 119163 - DNA, 591 bp, synthetic construct
  misc_feature 1..591: note = Description of Artificial Sequence: Synthetic coding sequence
  source 1..591: mol_type = other DNA
atggctgcccagtgtgtccgcctggcccgaagaagcctcccagccctcgccctatcattacgtccaagtccaagactgctgtgtaccgcgaccaagcagaagaacagcggtcagaacctcgaggaagatatgggacagtccgagcagctcaaggagacggtggaaaagtacaagagggccctcgccgacacggagaacttgaggcagagaagccaaaaacttgtggaggaggcgaaattatacggtatccaagctttttgtaaggacttgctagaagtcgctgatgtgctggagaaagccacccaatgtgtccccaaagaggagattaaagatgataaccctcatctcaaaaatttgtacgaagggctcgtgatgacggaagtccagattcaaaaagtgttcactaaacatggtctactgaagctgaatcccgtcggggcaaaatttgatccttacgaacatgaggccctttttcacacccctgttgaaggaaaagagccaggcaccgtagccttggtgtccaaggtcggatacaaactccacggacggacgcttcgcccagcgctggtcggagttgttaaggaggcctag

SEQ ID NO: 119164 - DNA, 2880 bp, synthetic construct
  misc_feature 1..2880: note = Description of Artificial Sequence: Synthetic coding sequence
  source 1..2880: mol_type = other DNA
atggctttattaggtaagcgctgcgacgtccctactaacggatgtggacctgatagatggaattccgcgttcacaaggaaggatgagataattacatctctggtctccgcccttgattcaatgtgttcagctctgtcaaagctgaatgcggaagtggcctgcgttgcagtgcacgacgaatctgccttcgtagtggggacagagaaaggccgaatgtttctaaatgcacgcaaggagctgcagagtgacttcctcagattctgtcggggccctccctggaaagacccggaggcagaacacccaaaaaaagttcagcgtggcgaaggggggggaagaagtctcccaaggagcagcttggaacatgggagcgatgtctacctgctgcgaaagatggttgaagaggtcttcgatgtgctctacagtgaggcactagggcgcgcatctgtcgtgcctctgccctacgagcgactgttgagggagccaggtctgttggccgtgcagggactgccagaaggtctggccttcaggcgacctgctgaatacgatccaaaggccctcatggcaatcctggaacactcccacagaatccgcttcaaactgaaacgccctctggaggatggcggccgggactctaaggccctggttgaactgaatggtgtatctttaatccccaaaggctcccgggactgcggcctccacggacaagctccgaaagtcccaccccaggacctccctccaacggccacttccagcagcatggccagctttctctacagcaccgcgctgcccaaccacgcgattagagaactgaaacaggaggcaccctcctgtcctttggctccatcagatctgggactgtctcggccaatgccagagcctaaagccactggcgctcaggacttctctgattgctgtggacagaagccaacagggcccgggggtcccctcattcagaatgtgcatgcatctaagcggattctcttctccatcgtgcacgacaaatccgagaaatgggatgcctttattaaggagaccgaagatatcaatactctccgcgaatgcgtacagattctatttaactctcgctacgcagaggccctaggtttggatcacatggtgccagtcccatatcggaaaatcgcttgtgacccagaggcagtcgagattgtgggcatacctgataagattccctttaagagaccctgtacatatggcgttcctaagctgaaacggatcctcgaggagagacattccattcacttcattatcaagcggatgttcgacgaaaggatttttacaggcaacaaatttaccaaagataccaccaagctggagcccgccagccctcccgaggacacttccgcggaggtctcccgtgctaccgttctggacctagcagggaacgctcgcagtgacaaaggatctatgtcggaagactgtggaccgggaacaagtggggaactgggaggccttcgccccataaagatcgaacccgaagatttagacataatccaggttacggtgccagacccctcaccgacttctgaagaaatgacagacagcatgccagggcatttgcctagcgaagatagcggatacggtatggagatgctgacggacaagggtctgtcagaagacgcaaggcccgaggaacgacctgtggaggatagccacggcgatgtcatcagacccctgcgcaagcaagtggagctgttgtttaacactaggtacgctaaagcaattggcatctctgaacccgtgaaggtcccgtatagtaaatttctgatgcatcccgaggagctgttcgtagtaggactgccagagggaattagcctgaggcggcctaattgttttgggattgcaaagctgagaaagatccttgaagcaagtaattctatccagttcgtgatcaaaagacccgaactcttgacagagggtgtcaaggaacctataatggattctcaaggcaccgcctcaagcttgggcttctccccacccgcgctgccgcctgaacgcgatagtggagatccactggtggatgaatctttgaagcggcaagggtttcaagagaattacgacgccaggctttcaagaatcgacatcgccaacacactgcgcgaacaggtgcaggacttattcaacaaaaagtatggcgaagccctgggtattaaataccccgtccaggtcccctataaacgcattaaaagcaatccaggatctgtgattatagaagggctcccgcccgggataccgttccgtaaaccctgtacatttggcagtcaaaacctggaacggatcttggccgtcgcagacaagattaaattcaccgtgactaggcctttccaaggactcattccgaaacctgatgaggatgatgccaaccggttgggcgagaaagtgatactcagagaacaggtgaaggaactgtttaatgagaagtacggcgaagcattaggactgaacaggcccgttctggtaccgtataagctcatccgtgattcccctgacgccgtcgaggtcacaggccttccagatgacatccccttccgtaaccctaacacatacgatatccatagacttgaaaagattctcaaggccagagagcatgtgcgcatggttatcatcaaccagctgcagcctttcgcggagatatgtaacgacgcaaaggtgccggccaaagactcttcaatacctaaacgcaaacgtaaaagagtctcggagggcaacagtgtgtctagtagtagctcctcttcgtcctcatcctccagtaatccagacagtgttgcgtccgctaaccagatctctttggttcagtggcctatgtatatggtcgattacgctggtctgaatgtccagctaccagggcccttgaattactag

SEQ ID NO: 119165 - DNA, 2835 bp, synthetic construct
  misc_feature 1..2835: note = Description of Artificial Sequence: Synthetic coding sequence
  source 1..2835: mol_type = other DNA
atggccttgctggggaaaaggtgtgacgtgccaactaacgggtgtggacctgatagatggaattcagcctttaccagaaaggatgagataattacctcactggttagcgccctcgactcaatgtgcagtgctctttccaaactgaacgccgaggtggcctgtgtggccgtgcacgatgagtcagctttcgtcgttggaacagagaaagggagaatgtttctgaatgctcgcaaagagcttcagagtgacttccttcgcttttgtcggggaccaccttggaaggacccagaggccgagcatccgaagaaggtgcaacgtggcgagggggggggacggtccctacccagaagctctctagagcacggcagtgacgtttacctcctgagaaaaatggtggaggaggttttcgatgtcttatattccgaggctctgggtcgagcatcggttgtccctctgccatatgagcggttgctccgcgagcctggcttgctcgcagtgcagggtttgccggagggcctcgccttcagaaggcccgcggagtatgaccccaaagctcttatggccatccttgaacacagccacagaatcagatttaaactgaaacggcctcttgaggacggtggcagagactctaaggcccttgtcgaactgaatggggtgtccctaataccgaaggggtccagggactgtggccttcacggtcaagcaccaaaggtgcctccccaggatctgccgcctactgcaacgtcttcctcgatggcctcgtttttatacagcaccgctctccccaatcatgccatccgagagcttaagcaggaagcccctagctgccccctcgctccgagcgatttgggccttagtcggcccatgccagaacccaaggcaacaggtgctcaggacttctcagactgttgcggtcaaaagccgactggtccagggggccccttgatacagaatgttcacgccagtaagaggatacttttttcgatcgtccacgataagagtgaaaaatgggacgcatttattaaagaaacagaagacattaacacactgcgggagtgtgtccaaattctgttcaacagccgctatgcggaagccctgggcttggatcatatggtgcccgtgccttatcgaaagatagcttgcgatcccgaggccgtggagattgtgggaatccccgataagataccattcaaacgcccctgtacctatggtgttccaaagttaaagaggattctcgaagagaggcactccatccacttcatcatcaaacgcatgttcgatgagcgaatctttacaggaaataagtttaccaaggacaccaccaaattggagcccgctagcccacctgaagacacatccgctgaggtgagccgggcaactgtgctcgatttagccggcaacgccagaagcgataaaggctctatgagcgaggactgtggcccaggcacctctggcgagctcggtggccttcgaccgatcaaaattgagccggaggaccttgacatcatacaggtaactgtgcctgacccctcccctacttccgaagagatgaccgattccatgccagggcacctgccgtcagaagattcagggtatgggatggaaatgttgaccgacaaaggcctgagtgaagatgctagacccgaggaacggccagtcgaggactcacatggggatgtaatcaggccactgcggaaacaggtggagttgcttttcaacacaaggtatgctaaagccatcggcatctccgagcccgtaaaggtcccttattccaaatttctgatgcatcccgaggagttattcgtcgtgggcctccctgagggcataagcctgaggaggcctaattgcttcggcatcgccaagctgaggaagatccttgaagcctcgaacagtattcagtttgtgatcaagaggccagaattgctgaccgaaggcgtcaaggagccaattatggacagtcaggagagagattcaggggatccccttgtcgatgaatcgctcaaaaggcagggatttcaagagaactatgacgctcgcctgtcccgcatcgatattgcaaatacactgcgagagcaggtgcaggatcttttcaataagaaatacggggaggccctcggcattaaatatccagtccaggtcccatacaagcgcattaagtctaacccaggatctgtgataatcgaggggttgccccccggtattccttttcgcaaaccttgtactttcggcagtcagaacctcgagcggattctggcggttgcagacaaaatcaagttcactgtcacccggccatttcaaggattgatacccaagcccgatgaagatgacgccaacaggttgggcgagaaggtaattctgagggagcaggtaaaggagctgttcaacgagaaatacggcgaagcactcgggctgaatcgacctgtgttggttccttacaaactgatccgcgacagcccagacgctgtggaagttaccggcctgcctgacgatatccccttccgcaacccgaatacttacgatatacataggcttgaaaaaatcctaaaagctcgtgagcatgtcagaatggtgatcatcaaccagctgcagccctttgctgagatctgtaacgacgctaaagtcccggccaaagacagttccatcccaaaaagaaagcggaagcgagtgtcagaggggaacagtgtgtcgtcctcctcctctagttcaagcagtagcagctccaaccccgactctgtcgcaagtgctaatcagatctctttagtccagtggcctatgtatatggtggactacgccggcctgaacgtgcagttaccagggccccttaactattag

SEQ ID NO: 119166 - DNA, 2931 bp, synthetic construct
  misc_feature 1..2931: note = Description of Artificial Sequence: Synthetic coding sequence
  source 1..2931: mol_type = other DNA
atggccctcctgggaaaacggtgcgacgtcccaaccaatggctgtggaccagataggtggaacagtgcctttacacggaaggatgagattattacttctttggtctcagcactggacagcatgtgcagcgctctgagcaagctgaatgcagaggtcgcctgcgtggcagtgcatgacgagtccgcctttgttgttggcacagagaaagggaggatgttcttaaatgctagaaaggaacttcaaagtgatttcttacggttttgcttgagcgctgcacagcaccgcgccgcaactagtcagttggaggggagggtagtcagaagggttctgacagtcgcttcccgtgcactgtgccccactggcgggcccccctggaaggaccctgaggccgagcaccccaagaaggtgcagaggggggagggagggggacgctctctgccccggtcatctctagagcatgggtccgacgtttatctcctgcgaaagatggttgaagaggttttcgacgtgttgtattccgaagccctggggagagctagcgtggtcccccttccctatgagcgccttctgagagagcctggcctcctggccgttcagggattaccagaaggcttagcattccggagacccgcggagtatgacccgaaagcgctgatggccatattagagcactcgcatcgcatcagatttaagctcaagcggccccttgaagacggtgggcgggactctaaggccctggtggagctcaacggtgtgagtctaatacctaaaggcagcagagactgtggtttgcacggccaggcacccaaagtccctccacaagatcttcccccaacagccaccagttcctctatggcttcattcctgtacagcactgctctgcccaaccacgctattagagagctaaaacaggaagccccatcttgtcctctagcacccagcgacctgggcctttctcggcctatgcccgaaccaaaagctacgggggcccaggatttttctgactgctgtgggcagaaacctactggtccgggcggacctctaatccaaaatgttcacgcgagcaaacggatcctgttctccatcgtgcatgataaaagcgaaaagtgggacgctttcattaaagaaacggaagacataaatacgctgcgggagtgtgttcagatccttttcaactccagatatgctgaagcacttggccttgatcacatggtgcctgttccgtatcggaagatcgcctgtgatccagaggctgtagaaattgtcggtattccagacaaaattcctttcaaacgcccatgcacctacggtgttcccaaactgaaacgaattctagaggagagacacagcatccactttattattaaaagaatgtttgatgagaggattttcaccggaaacaagtttacaaaggataccactaagctggagccagcttctcccccggaagatactagcgctgaggtttccagggcaacagtgctcgacctcgctggtaatgctcgtagtgataagggatccatgtccgaagattgtggcccaggaacaagcggcgaattgggtggccttaggccaataaagattgaaccagaggatttggatatcattcaggtcacagttcctgacccatcacctacgagcgaggagatgacggactcaatgcccgggcatcttcccagtgaagattccggctatggaatggaaatgctgacagataaagggctatccgaagacgcccggcctgaagagaggcctgtggaggatagtcacggcgatgtaatacgcccgctgaggaagcaagtggagcttctctttaatacgcgttacgccaaggctatcggcatctccgaaccagtcaaagtcccttatagtaaattccttatgcatcctgaagaactgtttgtagtagggctcccggagggaatttcattaagaagaccaaattgtttcggcattgccaaattacggaaaattcttgaagccagcaactccatccaattcgtaattaagcgtcccgagcttctgaccgagggggtaaaggaacccatcatggatagtcaggagcgggatagtggtgatcccctcgtggacgagagtctgaaacgacagggcttccaggagaattatgacgcccgcttgagcaggattgatattgccaacacccttcgcgagcaggttcaagacctgtttaacaaaaagtatggcgaggctttgggaatcaaatatcccgtccaggtcccgtacaagcggataaagtccaacccgggctctgtaatcattgagggcctccctcctggtatccccttcaggaagccgtgcacttttggcagccagaaccttgagcgcattctggcagtggcagataagatcaagtttaccgtgacacgcccttttcagggactgatccccaagcccgacgaggacgacgccaatcggctcggtgagaaagtgattctgcgggagcaggtgaaggagctctttaatgagaagtacggtgaagccctcgggttgaaccgaccagtcctggttccttacaaactaatcagggacagtcccgacgctgtcgaagtgacgggtctgccagatgatatccctttcaggaacccaaacacatatgatatacataggctggagaaaattttaaaagcccgggaacacgtcagaatggtcatcatcaaccaattgcagccctttgccgaaatttgcaatgacgctaaagtgccagccaaagactctagcatccccaagcgcaaacgcaaaagggtgtcagaagggaactccgtctcatcaagttcaagtagcagttcctcttcaagttccaaccccgattccgtagcttcagcgaaccaaatcagtttggtgcagtggccaatgtatatggtggattatgccgggctgaacgtgcagctgcctggtcctttaaattactag

SEQ ID NO: 119167 - DNA, 609 bp, synthetic construct
  misc_feature 1..609: note = Description of Artificial Sequence: Synthetic coding sequence
  source 1..609: mol_type = other DNA
atgtcctgcgtgccatggaagggggataaggccaaatctgaaagtctggaactacctcaagccgcacctcctcagatttatcatgagaaacagaggagggagctgtgtgccttacacgctctcaataacgtgtttcaggattctaatgcattcactcgcgacaccctccaggagattttccagcggctgtctcccaacactatggttactccacacaaaaagtccatgctcggcaacggcaactatgacgtgaacgttatcatggctgccctgcaaacgaaaggctacgaagccgtatggtgggacaaaaggcgggacgtcggagtcatcgcactgaccaacgtcatggggtttattatgaacctgccctcaagcctgtgttggggccctctgaagttacctctgaaaaggcagcactggatttgcgtgcgcgaagtcggcggagcttactacaatcttgacagcaagctgaaaatgcctgagtggataggcggggagtccgaacttcgtaaatttctaaagcaccatctgcgagggaagaactgcgaactcctgttagtggtgcctgaagaggtggaagctcaccaatcttggagaacggacgtttag

SEQ ID NO: 119168 - DNA, 1545 bp, synthetic construct
  misc_feature 1..1545: note = Description of Artificial Sequence: Synthetic coding sequence
  source 1..1545: mol_type = other DNA
atgaagtggagacttcaggagggtcgaggggaggcggtctaccagataggtgtggaggacaacggacttctggtgggcctcgccgaagaggagatgcgcgcttcgctcaaaactctgcatcggatggcagagaaagtgggtgctgacatcaccgtgctgcgagaaagagaggttgactacgatagcgacatgccccggaaaattacggaggttctggtcaggaaagtccccgacaatcaacagttcttagacttgagggtcgcagtcttagggaatgtggattcgggcaaatctacactgctgggtgtgctgactcagggagagctggacaatggccggggtagagccagactgaaccttttccgccacctacacgagatacagagcggacgtacatcatccatctcttttgaaatccttggattcaactcaaaaggggaggtggtcaactactccgattcccgcactgccgaagagatctgcgagagcagcagcaaaatgatcacatttatcgatttggctggccaccataagtatttgcacaccacaatattcgggctgaccagttactgccccgactgtgccctcctcctcgtttccgccaacactgggattgccggcacaacacgcgagcatctcggcctcgcgctggccctgaaggtccccttcttcattgtggtttcaaagattgacctgtgcgccaagacaacggttgaaagaaccgtgcgacagctggagagagttcttaaacagcccgggtgccataaggtgcccatgctggtcactagcgaagacgacgctgtcacagctgcacagcagttcgctcaatccccaaacgtgactccaatcttcacgttgtcgagcgtgtctggcgagtccctggatttgctcaaagtgttcttaaacatcctgcccccactgacaaatagcaaagagcaggaggaacttatgcagcagttgaccgaatttcaggtagacgaaatctacactgtccccgaggtgggaacagtggtgggtgggacactgagttccggcatatgcagggagggcgaccaactggtagtcggtccaacagatgatggatgcttccttgaactgcgcgtctgcagtatccagcgaaaccggagcgcatgcagggttctgcgcgcaggccaggcggccaccttagctctgggcgactttgatcgggccctactcagaaagggtatggtgatggtgtctcccgagatgaaccctactatctgttcagtgttcgaggctgagatcgtcttgctcttccacgcaaccaccttcagaagaggcttccaggtcactgtccatgtcgggaacgtgaggcagaccgcggtggtggaaaagatacatgccaaagataagctgaggacaggggaaaaggcggtggtgcggttcaggttcctcaagcacccagagtatctgaaagtgggagcgaagttattgttccgggaaggcgttaccaagggtatcggccacgtgacagacgtacaggcaattacagcaggagaggctcaagccaatatgggcttttag

SEQ ID NO: 119169 - DNA, 1809 bp, synthetic construct
  misc_feature 1..1809: note = Description of Artificial Sequence: Synthetic coding sequence
  source 1..1809: mol_type = other DNA
atggactcaagagtcagtgagctattcggcggctgctgtcggcctggtggtggaccagccgtcggtggcaccctgaaggcgcgaggagccggctcatcttcaggttgtggtggtccaaaaggcaaaaaaaagaatggtagaaacagaggtggcaaggccaataacccaccttatctgccaccagaagccgaagacgggaacatcgagtataaattgaagctggtgaacccctctcaatacaggttcgaacatctggtaacccagatgaaatggcggctgcaggagggccgcggcgaggccgtgtaccaaattggcgtggaagacaatggtttactcgtgggtttggccgaagaggaaatgcgtgccagcctgaagacactacacagaatggccgagaaagtgggagcagatatcacagtactgagggagagagaagtggactacgactcagacatgcccaggaaaattactgaggtgctggtaaggaaagtgcctgacaaccagcagtttttggatttgagggtagcggtgctgggcaacgtcgattcgggaaaaagcaccctgctgggcgttcttacgcagggggagcttgataatgggagaggtagggcccgccttaatctcttcagacacctgcacgagatacagagtggtcgcacaagttccatttctttcgagatccttggtttcaattctaagggagaagtcgttaactatagcgacagcaggacagccgaggaaatttgtgagagctcctccaaaatgataaccttcatagacctggctggacaccacaaatacttgcatacaaccatttttggcctgacttcgtactgtcccgattgcgccctgcttttggtgagtgctaacactggtatcgcaggtacgaccagggagcacctcgggctcgccttggccctgaaggtgccattttttattgtcgtgtctaaaattgacttatgtgccaagaccactgttgaaagaacggttaggcaactggaacgcgtgttaaagcaacctggatgccataaggtacctatgctagttacctccgaggacgatgcggtgaccgccgctcagcaattcgcgcagagtcccaatgttacccccattttcaccctctccagcgtgtctggcgaatccctggatctgctgaaagtctttctgaacatcctgcccccgctgacgaactccaaagaacaggaagagctgatgcaacagttaacagagttccaagttgatgagatttatactgtgccagaagtcggaacagtggttggaggcaccttgtcctccggcatttgccgagaaggcgaccaactggtcgtcgggccaaccgacgacggatgctttctggaactgcgcgtttgcagcatccagcggaatagaagtgcctgtcgcgtcttacgggctggacaagcggctaccctggcccttggcgacttcgaccgggccctcttgcggaagggaatggtcatggtaagtccagagatgaacccaacaatctgtagtgtttttgaagccgagatcgtcctcttgttccacgccactaccttccgacggggattccaggttactgtgcacgtcggtaatgtgcgacagaccgccgtcgtcgagaagatccacgccaaggacaagctccggactggcgagaaagcagtggtcaggtttagatttctcaagcacccagagtatttgaaggtcggagcgaaactactgttcagagagggcgtcacaaaaggcatcggtcacgtgacagatgtgcaggctataactgcgggagaagcccaggcaaacatggggttctag

SEQ ID NO: 119170 - DNA, 735 bp, synthetic construct
  misc_feature 1..735: note = Description of Artificial Sequence: Synthetic coding sequence
  source 1..735: mol_type = other DNA
atgaagtggcggcttcaggagggtcggggcgaggcgatctttaccttgtccagcgtgtccggcgagagcctcgatctactcaaggtctttctcaatatcctaccacctctgaccaattcgaaggagcaagaagagctgatgcagcagctgactgagttccaggtggatgagatttataccgtaccagaggttggtaccgtggtcggcgggacactttcaagcgggatttgtcgcgagggagaccagctggtggtgggcccaacagacgatggttgcttcctggaactgcgcgtgtgttccatccaaaggaataggtccgcctgtagggttctgcgtgctggccaggctgccaccctcgcgctgggggacttcgaccgggccctgctgcgcaaggggatggtcatggtcagccccgagatgaaccctacgatttgctccgtgtttgaggcggaaattgtcctgctcttccacgccaccacatttcgtcgcggctttcaggtgacggttcacgtgggcaacgtgaggcagactgcagttgtcgaaaagattcatgctaaggacaaactcagaacaggtgagaaggcagttgtacgcttccgattcctcaagcatccggaatacctaaaggttggggccaagcttctgtttcgggagggcgtgaccaaagggattggtcacgtgacagacgtgcaggccattaccgcaggagaagctcaggcaaacatggggttctag

SEQ ID NO: 119171 - DNA, 462 bp, synthetic construct
  misc_feature 1..462: note = Description of Artificial Sequence: Synthetic coding sequence
  source 1..462: mol_type = other DNA
tagggcatatgtcgtgagggcgatcagctcgttgttggccctacagatgatgggtgcttcctggaactgagagtgtgtagcatccagcgcaatcgctctgcctgtcgtgtgcttagagccggccaggctgctactctggccctaggggacttcgatagagccttactcaggaagggaatggttatggttagcccagagatgaacccaaccatttgctcggtgtttgaagccgagatagtgctgttattccatgcaactaccttcagaaggggattccaggtcacggtccacgtcggcaacgtccggcagacagctgttgtggagaaaatccacgccaaggacaaactccgtactggtgagaaagccgtagcaagagagcgaggcgttctgagcgctacgtgttctctcccgaccttctggaggggcgcaaagctcggcgtcgcaagaaagggccaatcctag

SEQ ID NO: 119172 - DNA, 465 bp, synthetic construct
  misc_feature 1..465: note = Description of Artificial Sequence: Synthetic coding sequence
  source 1..465: mol_type = other DNA
tagggtatctgccgcgagggggatcagcttgtggtagggccaaccgacgacggatgtttcctggagcttcgagtctgttctatccagagaaaccgtagtgcttgcagggtgctcagagccggtcaggcggccacactggccctgggcgactttgatcgggctttgctaaggaagggaatggtgatggtttcgccggaaatgaacccgacgatctgttctgttttcgaagctgagatcgtgctcttgtttcacgctacaacctttcgacgcggtttccaagttacagtgcacgtaggaaatgtgcgccagacagctgtggtggagaaaatccatgcaaaagttagaggcacctggcctagcatttccccagaggtaaggaaagaagggggactgccccagactggcagggaactgctcgatccgaccatgggaatcaagccacatttaggctgggtggccgcatag

SEQ ID NO: 119173 - DNA, 543 bp, synthetic construct
  misc_feature 1..543: note = Description of Artificial Sequence: Synthetic coding sequence
  source 1..543: mol_type = other DNA
atgcaacagctgacagagttccaggtggacgaaatctatacagtgccagaagtaggtacagtggtaggtgggaccttaagctcgggcatttgcagggagggagaccagctcgtggtcggccctaccgatgatgggtgtttcctggagctgagggtctgttctatccagcggaaccggagcgcttgtcgggttctacgagctggccaggccgcgacattagcactgggggacttcgatcgcgccctcctgcgaaagggcatggtaatggtctccccagagatgaaccctactatttgctccgtgttcgaagctgagattgtcctgctcttccatgccaccaccttccgaaggggctttcaggttactgtgcacgttggtaacgtccgccagacagccgttgtagagaagattcatgccaaagataagctccggaccggggaaaaagcggtggctcgggagagaggcgtcctctccgcgacatgctcgctgccaacattctggcgtggggctaaattgggtgttgccagaaaaggacaaagctag

SEQ ID NO: 119174 - DNA, 951 bp, synthetic construct
  misc_feature 1..951: note = Description of Artificial Sequence: Synthetic coding sequence
  source 1..951: mol_type = other DNA
tgacaggggggcggcgcccgcgaggaaaacacttcctttaggagtcgagacccccgggaggaaggacaacgtcttgacagccaggcggaggatgggaacatcgagtataaactaaaactggtcaatcccagccagtatagattcgagcatctggtaacccagatgaagtggcgactgcaggaaggaaggggagaggctgtgtatcagataggagtggaggacaatgggcttctcgtggggctcgctgaggaggagatgagggcgtccctgaaaacactacataggatggcggaaaaggtcggcgcggatattactgtcctgcgtgagagagaagttgattatgattctgatatgcctcggaagatcactgaagttctggtcagaaaagtgccagataatcaacagttcttggatctcagagtggccgtactgggcaatgtggactctggcaagtcaactctcctgggggttctcactcagggtgagctggacaatgggagagggcgggctagattgaacctctttcggcacctgcatgaaatccagtctgggcgaaccagctctattagctttgagatattaggcttcaatagcaagggcgaggtcgttaattattcagacagccgcacagccgaagagatatgtgagagttcctccaagatgatcacttttattgatcttgctggccatcacaagtacctgcacaccacaatcttcgggctaaccagttactgtccagattgcgcactacttctggtgtctgcaaatacaggaattgcaggcacgacccgagagcacctcggcctggccctggcccttaaggtgccctttttcatcgttgtctccaagatcgatctctgcgcgaaaacgaccgtcgagcgcacagtccgtcaactggaaagagttctcaaacaaccaggttgtcacaaagttcccatgctggtgacctag

SEQ ID NO: 119175 - DNA, 684 bp, synthetic construct
  misc_feature 1..684: note = Description of Artificial Sequence: Synthetic coding sequence
  source 1..684: mol_type = other DNA
atggactcgagggtgtctgagctgttcggtggttgttgtcgaccgggtggaggtccggccgtggggggtaccctaaaagcgagaggtgcgggctcaagcagtggatgtggtggtcctaagggcaaaaaaaagaatggccggaacagaggaggaaaagccaacaaccccccttatttgccacctgaggctgaggacggcaatattgagtacaaatatcgctttgaacacttggtgactcagatgaaatggcgcctacaggagggccgaggagaggctgtgtatcaaatcggggtggaagataatggacttctcgtcggcctcgccgaagaggagatgagagcctccctgaaaacgctacatcgaatggccgaaaaggtgggcgcagacatcacagttctccgggagagggaggtggactatgacagcgatatgccaagaaaaatcaccgaagttctggtgagaaaagttcccgacaaccagcagttcctcgacctgagggttgcagttcttgggaatgttgactccgggaagtcaaccctcctcggagtgctcactcagggtgaactggacaatggacggggtagagcgaggctcaacctctttaggcacttacacgagatccaaagcggcaggactagttccatcagttttgagatcctcggatttaactcgaaaggcgagtag

SEQ ID NO: 119176 - DNA, 1221 bp, synthetic construct
  misc_feature 1..1221: note = Description of Artificial Sequence: Synthetic coding sequence
  source 1..1221: mol_type = other DNA
atggccccggctcgttgtttttccgcaagactccgcactgtcttccaaggggtcgggcactgggccctatcaacatgggctggcttgaaacctagtcgactcttgccacagagagcctcccctcgcctgctgagcgtgggtcgcgcagacttggcgaagcaccaggagctgccaggtaagaaattgctcagcgagaaaaagttgaaacgttactttgtcgactacagaagggtgcttgtgtgtggggggaacggtggcgccggcgcaagctgctttcactccgagccgcgcaaagagtttggtggaccagacggtggggacgggggtaatggcggccatgtgatcctccgagtggaccaacaggtaaaatccttaagctccgttttgagtcggtaccagggattttccggcgaggacggagggtctaaaaattgctttggcagatccggagccgtgttatacatacgagtccctgtcggcaccttggtcaaggagggtggcagagtggtcgcggatctttcctgcgtcggagatgagtacatcgctgctcttgggggcgccggaggaaaaggtaaccgctttttcttggccaacaacaatcgagctccggtcacctgtacccccggacaacctggccagcagagagtgcttcacctggagcttaaaacagtagcccacgctggcatggtggggtttccgaacgcaggtaagagctccctgctaagggccatttctaatgctaggcctgctgtggcgtcctatcctttcacaacactcaagccgcacgtgggtatcgttcactacgaaggtcacctgcagatcgctgtagccgatatccccggaatcattcggggcgcccaccaaaacagagggctggggagcgcctttctcaggcacatagagaggtgtcggtttctgctgtttgttgttgacctttctcagccggagccctggacccaggtggatgatctaaagtatgagctggaaatgtatgagaagggattgtcagcccggccccatgcaattgtggctaataagatcgacctaccagaagcccaggcaaacctgagtcagctgagagatcatttaggacaggaggttattgtgttgtctgccctgacaggtgaaaatctggagcagctattgctgcacttgaaggtgctgtacgatgcatatgccgaagctgagctgggacaggggcggcagcctctgcggtggtag

SEQ ID NO: 119177 - DNA, 747 bp, synthetic construct
  misc_feature 1..747: note = Description of Artificial Sequence: Synthetic coding sequence
  source 1..747: mol_type = other DNA
atggctccagccaggtgtttttctgcccggctgcgcaccgttttccagggggtggggcattgggctctctcaacgtgggctggacttaaaccttcacgtctccttcctcagagagccagtcccaggctgctgtcagtgggcagggcggatcttgccaagcatcaagaactgcctggcaagaagctactgagtgaaaagaagctcaagagatactttgtagattaccgcagggtgctcgtttgcggcggaaatggcggagccggagccagctgctttcactccgaaccccgaaaagaattcggtggcccagacggtggcgatggggggaatggcggccacgtcatcctgagggtggctgacatccccggcataattcgcggcgctcaccagaatagaggccttggatccgcattcctccgccacatagaaaggtgccgtttcctgctcttcgttgtggatctatcccagccggaaccatggacacaggtcgacgatcttaaatatgagttagaaatgtacgagaaggggctgtccgctaggcctcatgcgatcgttgccaacaagatcgacctccccgaagcccaagcgaatctgtcccaactgcgcgaccacctcgggcaagaggtcatcgtgttgtctgctctgacgggcgagaacctggaacagctgctgttgcacctgaaggtattatatgacgcctacgcagaagccgagctgggacaggggcgccagccactacgctggtag

SEQ ID NO: 119178 - DNA, 702 bp, synthetic construct
  misc_feature 1..702: note = Description of Artificial Sequence: Synthetic coding sequence
  source 1..702: mol_type = other DNA
atggctccagctcgttgtttttcagcccgcctgcggactgtcttccagggtgtgggacactgggccttgtcaacctgggcgggtttgaagcctagcagactccttccacaacgcgctagccctaggctcctctccgttggtcgggctgacttggcaaagcaccaagagctgcccggtaagaaactgctgtctgagaaaaaactgaagcggtatttcgtggactacagaagagtgctagtttgtggcggcaatggtggagccggcgcatcctgtttccacagcgaaccacggaaggagtttggaggcccggacggtggcgacggcgggaacggcggccacgtgatccttagagtggaccaacaggtgaagagcttgtcctcggtgttgtcccgctatcagggctttagtggtgaagacggcggctccaagaattgttttggacgcagtggcgccgtcttgtacatccgggtgcctgtcggaaccctcgttaaggagggaggacgagtggtggctgatttgtcatgcgtcggggatgaatacattgcggcccttgggggtgccggggggaagggcaatcgattttttctggcaaataataaccgggctcccgtgacttgtactcctggacaaccaggccagcagagagttctgcatcttgagctgaagacggtcgcacatgccggtatggtggggttcccctag

SEQ ID NO: 119179 - DNA, 537 bp, synthetic construct
  misc_feature 1..537: note = Description of Artificial Sequence: Synthetic coding sequence
  source 1..537: mol_type = other DNA
atggtcgggtttcccaacgcgggcaagagcagcctcttgcgcgcaatatctaacgctaggcctgctgttgccagctatcctttcaccacgctgaagccccacgtggggattgtgcattacgaggggcatcttcaaattgcggtcgcagacatccctggcatcatcagaggggcacatcaaaatagaggactcggatctgcatttctgagacacattgaaaggtgcagattcctgctttttgtggttgatctgagtcaacccgaaccatggacgcaggtggacgacctgaagtatgaactggaaatgtacgagaagggactctcagcgcgacctcatgctatcgtggcaaacaagatcgacttaccagaggctcaagcaaacttaagccagctgagagaccacctgggacaagaggtgatcgtcttatctgcattgactggagagaacctggagcagctgctcctccacctaaaagtgctttatgatgcatacgcagaggccgagctgggacaggggcggcaacccctgaggtggtag

SEQ ID NO: 119180 - DNA, 864 bp, synthetic construct
  misc_feature 1..864: note = Description of Artificial Sequence: Synthetic coding sequence
  source 1..864: mol_type = other DNA
cgatcaaatctcaagagagacgtggcccacctatatcggggcgtgggctctcggtacataatgggttctggtgaatctttcatgcagcttcagcagcgcctgttaagggagaaagaggctaaaatacggaaagcccttgataggctaaggaagaaaaggcacctcctgcgcaggcaaaggaccagaagagagttccctgtaatcagcgtagtgggatatacaaactgcggcaaaactacgttgataaaggctctgactggcgatgctgcaatccagcctcgggatcaactatttgccacccttgacgtgaccgctcacgccggaacacttccaagccggatgacagtattatatgtagataccattgggttcctgagtcagcttccccatggcctgatcgagagcttctctgccacgctagaggacgtggctcactcagacctgatcttgcacgtccgcgacgtgtcacatccagaagccgagctccagaaatgtagcgtcttgtccactctgagggggctgcagcttcccgcacccttgcttgattctatggtggaagtgcataataaagtggaccttgtgcccgggtattcacccaccgaaccaaatgtcgtccccgtgtctgccttgagaggccacgggctgcaggaactcaaagctgaattagatgcagcagttcttaaagcgaccgggcggcaaattctaacccttcgcgtgagactggctggggctcagctgtcttggctgtacaaggaggctacggtacaagaggtcgatgtaattcccgaggacggcgctgctgacgtgcgcgtgattattagcaattcagcgtacggaaaattcaggaaactgttcccagggtag

SEQ ID NO: 119181 - DNA, 864 bp, synthetic construct
  misc_feature 1..864: note = Description of Artificial Sequence: Synthetic coding sequence
  source 1..864: mol_type = other DNA
tagtctaatctcaagcgcgacgtggcccacctctacagaggggtcggaagcagatatatcatgggatcgggcgaatcatttatgcaacttcagcaacggctgttaagggagaaggaggcaaagatacggaaggccctagatcgcctgaggaagaagagacacttgctgcgcagacagcggacccgacgcgaatttcctgttataagcgttgttggatacactaattgcggaaagactaccctgattaaggcccttaccggggatgcagcaatccagcctcgggaccagctcttcgctacacttgatgtcaccgcgcacgcaggaacccttccatcccggatgacagtcctgtatgtagatactatcggattcctctctcagctaccccatggtctcatagaatcattctctgccacattggaggatgtggcacacagcgatctgatcttgcatgtccgcgatgttagccatcccgaggctgagctacagaagtgttcagtgctttctacactacgcggtcttcagcttcctgccccactactggacagcatggtggaggtgcataataaagtcgatctcgtgccaggttattcacccactgagcctaacgttgtgcctgtttccgcgctgcgcggacatgggcttcaggaactgaaggcggaactggatgctgctgttctgaaggccacaggacgtcagattctgactttacgcgtgcgactcgccggcgcccagttgtcgtggctatataaagaggcgacagtccaggaggtggatgtgatccctgaggacggggctgcagatgtgcgcgtgattatctctaattctgcctacggaaagtttcgcaaactttttccagggtag

SEQ ID NO: 119182 - DNA, 891 bp, synthetic construct
  misc_feature 1..891: note = Description of Artificial Sequence: Synthetic coding sequence
  source 1..891: mol_type = other DNA
atgacattgaataacgttactatgaggcagggcacggtgggaatgcagcctcaacagcagcgctggtccatccctgcggacggacgccatctgatggtacaaaaagaacctcatcaatatagccacaggaatcgacatagcgcgacacctgaagaccactgtagacgaagttggtcttccgactccacagactccgtgatatcctctgaatctggaaatacctactaccgggtcgttcttattggggagcagggggttgggaaatctacccttgctaacattttcgccggtgtgcatgacagcatggatagtgactgtgaggtactcggggaggacacatacgagaggacccttatggtggacggcgagtcggcaactatcatcttactcgatatgtgggagaataagggggaaaatgaatggctgcatgatcactgcatgcaggtaggggatgcttacctgattgtctactctatcacagaccgagcctcatttgaaaaggcctcagaactgcgtatccaactgagaagggcccggcaaaccgaagatataccaatcattctcgtggggaacaagtcggacctggtacgttgcagagaggtgtctgtctctgagggccgggcatgtgccgtggtgttcgactgtaagttcatagagacctccgccgctgtgcagcataacgttaaagagctctttgaagggattgtcaggcaagtgcggttgcggagggactcaaaagaaaaaaatgaaagacggttagcgtaccagaaacgtaaagagagcatgcctaggaaggcgcggagattttggggcaagatagtagccaaaaacaacaaaaacatggctttcaagttaaagtccaaatcctgccatgatctgtcagtgttgtag

SEQ ID NO: 119183 - DNA, 891 bp, synthetic construct
  misc_feature 1..891: note = Description of Artificial Sequence: Synthetic coding sequence
  source 1..891: mol_type = other DNA
atgaccctcaacaatgtcacgatgcgtcagggcacagtgggcatgcagccacagcagcagcgctggtccattccagccgatggaagacatctcatggtgcagaaagaaccgcatcaatattctcaccggaacagacactctgctactccagaggatcactgccggagaagctggtctagtgacagcacagactccgtgatttcttctgaatccgggaatacttattatagagttgtgctcatcggcgagcagggtgtgggtaagagcactttggctaacatcttcgccggagtgcatgactctatggactcagattgtgaggtgctgggtgaggacacttacgagcgcaccctcatggtggatggagagtccgccactatcattctgttagatatgtgggaaaacaagggcgagaatgagtggctccatgatcactgtatgcaagtaggcgacgcctaccttatcgtgtactccatcacagatcgcgcaagttttgagaaagccagtgagctgcgaattcagttacgccgggccagacagaccgaggatatccccatcattttggtgggtaacaaatccgacttggttagatgtcgtgaggtgtccgtgtccgaggggagggcctgcgccgtagtctttgactgcaaatttatagagacatctgcggcagtacagcacaatgttaaagagttattcgagggaatcgtgcggcaggttaggttgcgacgcgactctaaggaaaagaatgagaggagattggcatatcagaagcgcaaagaaagtatgcctcgtaaagcccgtcgtttttggggaaagatcgttgcaaaaaacaataaaaatatggcctttaaacttaagagcaagtcatgccacgatctgagtgtcctctag

SEQ ID NO: 119184 - DNA, 282 bp, synthetic construct
  misc_feature 1..282: note = Description of Artificial Sequence: Synthetic coding sequence
  source 1..282: mol_type = other DNA
atgactctgaacaacgtcacaatgcgacagggcactgtgggcatgcaaccccagcaacagaggtggtcaattcccgcggacggacgtcatctcatggtacagaaggaaccacaccaatactcgcatcggaatagacactccgccacccctgaagatcactgcaggagatcatggagctcagattcaaccgattctgtgatttcctcagaatccgggaacacatactatcgggttgtcttgataggtgagcagggcgtgggaaagtccacactggctaactag

SEQ ID NO: 119185 - DNA, 927 bp, synthetic construct
  misc_feature 1..927: note = Description of Artificial Sequence: Synthetic coding sequence
  source 1..927: mol_type = other DNA
atggtcatggagaagcctagccctctcctggtggggcgcgaattcgtcagacagtactataccttgttgaatcaggcacccgatatgttgcaccgcttttacggtaagaatagctcgtatgttcacgggggtctggacagcaatgggaagccagccgacgctgtgtatggccaaaaggaggttgaagagcccgaagagcgtcagcaaacacccgaagtggtccctgatgattcggggaccttttacgatcaggctgtggttagcaatgatatggaggagcatctggaagagccggtggccgaaccagagcctgaccccgaaccagaaccggagcaggagcctgtgagcgagatacaggaggagaagccaccgagaccagaatctaaacctgagagccaaattcccccccagaggccacagcgcgaccagcgtgtaagagagcagcggattaatatccctccacagaggggaccacgtccaatccgggaagctggagaacagggcgatattgaaccgcggaggatggtgcgtcacccagatagtcaccagctgttcataggcaatctgccccatgaagtggataagagcgagttaaaggatttctttcagagttacggcaacgtggttgagttacggattaactccggaggcaagctccccaatttcggattcgtggtctttgacgatagcgaacctgtgcagaaagtgttgagcaatcgcccgataatgttccgcggcgaggtccggctgaacgtcgaagaaaaaaaaaccagggcggctcgcgagggagaccggagagataaccgtctccggggaccgggcgggccccgaggaggcttagggggtggcatgaggggccctccgcgtgggggaatggttcagaagcctgggtttggagtgggccgcggcctcgctccgagacagtag

SEQ ID NO: 119186 - DNA, 1401 bp, synthetic construct
  misc_feature 1..1401: note = Description of Artificial Sequence: Synthetic coding sequence
  source 1..1401: mol_type = other DNA
atggtcatggagaagccgagccccttactggttgggcgtgagtttgtgcgccaatactacacactgcttaaccaggcccccgacatgttgcacaggttctacgggaagaactcctcctatgtgcacggaggcttagattccaatggcaagcctgcagatgctgtgtacggtcagaaggagatacatcgaaaagttatgtcccagaacttcaccaattgccataccaagatccgtcatgttgacgctcacgccactctgaacgatggcgtggtggtacaggtcatgggactcctatcaaataacaatcaggcgctcagacgcttcatgcagacattcgtgctcgcgcccgagggatcagtggctaacaagttctatgtccataacgacatctttcgctatcaggatgaggtttttgggggattcgttacagaaccccaggaggagtcggaggaagaagtcgaggaaccggaggagcggcaacaaacacctgaggtggtaccagatgatagcgggactttttatgatcaggcagttgtttctaacgatatggaagaacatctggaggagcccgtggcggagcccgagcctgaccccgagcctgaaccagagcaagaaccggtgagtgagatacaggaagaaaagccagaacctgtgttagaagagaccgctcccgaggatgcacagaaaagttccagcccagcccccgctgacatcgcccagactgtgcaggaggacttgaggacattcagctgggcatccgtgacctctaaaaatctgcctcctagtggggcagttcccgtgaccggaatccccccacacgttgtgaaggtgccggcctctcagccaaggcccgaaagcaaaccagagtcccagattccaccccaacgtcctcagcgagaccagcgtgttagggaacagaggatcaacatacctccgcagcgcggacctcggcctatcagagaagctggggaacaaggcgacattgagcccagaagaatggtgcggcatccagactctcaccagttgtttatcggcaacctgcctcacgaagttgataaaagcgagctcaaggacttctttcagtcatatggtaatgtggtcgaactgagaattaactctggggggaaactgccaaatttcgggttcgtggtttttgacgattcggagccggttcaaaaagtgctgagtaacaggcctatcatgttccgaggagaggtgagactgaatgtggaagagaaaaagactagggctgctagggaaggcgacagacgggataatcgcttgcggggacctggcggtcccaggggagggcttggcggcggaatgagaggacccccccggggtggtatggtgcagaaaccagggtttggagtgggtagagggctggccccgcgccaatag

SEQ ID NO: 119187 - DNA, 1401 bp, synthetic construct
  misc_feature 1..1401: note = Description of Artificial Sequence: Synthetic coding sequence
  source 1..1401: mol_type = other DNA
atggtgatggaaaagccaagcccactactcgtgggccgtgaattcgtacgacaatattatactctgttaaatcaggcaccagacatgctgcaccgcttttacggcaagaatagcagctacgtccatgggggattggatagtaatggtaaacccgcagacgccgtgtatggccagaaagagatccaccggaaagttatgtcacagaacttcaccaattgtcacaccaagattaggcacgtcgacgcccatgctaccctgaacgacggagtagtggtgcaggtgatgggcctgctgagcaacaacaaccaggcactgaggcggttcatgcagacctttgtgctggctcctgaagggtccgttgccaacaagttttacgtgcataacgacatttttaggtatcaagatgaagtgttcggaggtttcgtgacagaaccacaggaagagagcgaggaggaagtcgaagagccagaagaaaggcaacagacacccgaggtggtaccggacgattctgggactttctacgaccaggctgtggtgagtaacgatatggaggaacaccttgaggagcccgtcgccgaacccgagcctgacccagaacccgagccggaacaggaacctgtgtcagagatccaagaggaaaagccagagcctgtcctcgaagagaccgcacctgaggacgcacagaaaagtagctcgccagctcctgcggacattgcccagaccgttcaagaagatctgaggaccttcagctgggccagtgtgacaagcaagaacctcccaccctccggagcggtgccggttactggcatcccaccgcacgttgttaaggtgcccgcctcacagccccggcccgaatcgaagccggaatcgcagatcccccctcaaagaccgcagcgcgaccagagggttcgggaacaaaggatcaacatccccccacagagagggccaagaccaattcgagaggcaggggaacagggagatattgaaccaaggcgcatggttcggcacccagattcccatcagttattcatcgggaatctccctcacgaagttgacaagtctgaacttaaagacttcttccagagttacgggaatgtggttgagctgcgaatcaatagtggaggcaagctgcccaattttggctttgtggttttcgacgattctgaacccgtccagaaggtgttgtctaaccggcccattatgtttcgcggtgaagtccggctcaatgtcgaagaaaagaaaacaagagctgcaagagagggcgatcggagagacaaccgactgcgcggccccggagggcctcgtggcgggctcggcggtggtatgcgcggcccacccagagggggcatggtgcaaaaacccggctttggagtcggtagggggctggccccgcgccaatag

SEQ ID NO: 119188 - DNA, 318 bp, synthetic construct
  misc_feature 1..318: note = Description of Artificial Sequence: Synthetic coding sequence
  source 1..318: mol_type = other DNA
atggtcatggaaaaacctagtcccctattggttggtagggagtttgtgcggcagtattatacccttctcaatcaggcccctgatatgttgcatcgattttatggtaagaactcatcatacgtgcatggaggtcttgactctaatggaaagccagcagatgcagtgtacggccagaaagagattcacagaaaagtgatgagccagaatttcactaactgtcacaccaaaattaggcacgtggatgcgcatgcgactctgaacgacggtgtagtcgtgcaggtaatgggcttattgagtaataataatcaggctttatag

SEQ ID NO: 119189 - DNA, 369 bp, synthetic construct
  misc_feature 1..369: note = Description of Artificial Sequence: Synthetic coding sequence
  source 1..369: mol_type = other DNA
atggtaatggagaaacctagtcccctcctggtcggtagagagttcgtgagacagtactacaccctgctgaaccaggcacctgatatgcttcacagattctacggcaagaacagcagttatgtgcacggaggactagattcaaacggtaagcccgcagatgccgtctacggacagaaagagattcaccggaaggtaatgtctcagaacttcactaattgtcacacaaagattaggcatgtggacgcccacgccaccctgaacgacggggtagtggtgcaggtgatgggcttgttatccaataacaaccaggccctgcgtaggttcatgcagacatttgtcctcgctcctgagtccctcaaaaaaaagtag

SEQ ID NO: 119190 - DNA, 354 bp, synthetic construct
  misc_feature 1..354: note = Description of Artificial Sequence: Synthetic coding sequence
  source 1..354: mol_type = other DNA
atggtgatggagaagccatcccctctgttggtcggtagggaattcgtccgtcaatattacacccttttaaatcaagccccagatatgctgcacagattttatggaaagaactcatcttacgtgcacggcggtcttgattccaacggaaaacctgcagacgccgtttacggacagaaagaaattcaccgaaaagtgatgtcacagaatttcacaaactgtcataccaagatcaggcatgtggatgcacatgcaaccctgaatgacggggtggttgttcaagtcatgggtcttctttctaacaacaaccaggcactccggagatttatgcagacgttcgtacttgcccccgagtag

SEQ ID NO: 119191 - DNA, 369 bp, synthetic construct
  misc_feature 1..369: note = Description of Artificial Sequence: Synthetic coding sequence
  source 1..369: mol_type = other DNA
atggtgatggagaagcctagtccgttgctggtgggccgcgaattcgtgaggcagtattacacactgctgaaccaggctcccgatatgcttcaccgattctatggcaagaactccagctacgtccacggagggctggactcaaatggaaaacccgctgatgccgtgtacggccaaaaggaaatccacaggaaagttatgtctcaaaacttcacaaactgccatacgaaaattagacacgtcgatgcccacgccaccctcaatgacggggtggtggtgcaggtgatgggactcctaagtaataataaccaggcattgcgccggtttatgcagacctttgtgctggcgcccgagtctctcaagaagaaatag

SEQ ID NO: 119192 - DNA, 321 bp, synthetic construct
  misc_feature 1..321: note = Description of Artificial Sequence: Synthetic coding sequence
  source 1..321: mol_type = other DNA
atggtgatggagaaacccagcccgctactggtaggacgggagttcgttagacagtattatacccttctcaatcaggcccctgacatgcttcacaggttttacggcaagaacagtagctacgtgcacggagggctcgacagcaatggaaagccagccgacgccgtgtacggacagaaagaaatacatcggaaagtgatgtctcaaaacttcactaactgtcatactaaaatcaggcacgtcgatgctcatgcgacactgaatgacggggtcgtggtgcaagtcatggggttgctatctaacaataaccaagccctgcggtag

SEQ ID NO: 119193 - DNA, 855 bp, synthetic construct
  misc_feature 1..855: note = Description of Artificial Sequence: Synthetic coding sequence
  source 1..855: mol_type = other DNA
atggaagaacacctggaagagcccgtagctgagcctgagcctgatcctgaaccggaaccagaacaggagcctgtttccgaaatccaagaggaaaaacctgagcctgtactcgaagagactgctccagaagacgctcaaaaaagctcctctcctgctccagccgacattgcacagaccgtgcaggaggatttgcggaccttctcttgggcttccgtgacatccaaaaatctgcctccttcgggtgctgttccagtgactggcattccaccccatgtagttaaggttccagcctcacagccaaggccagagtcaaaacccgaatctcagatcccaccacagcggccccaaagggaccaaagggtcagagaacagaggatcaacattcctccccagagggggccccgcccaatccgcgaagctggcgaacagggcgacatagagccacgtcgcatggtgaggcaccctgactcacatcaacttttcatcggaaaccttccacacgaggtggacaaatcagagctgaaggattttttccagtcctacggcaacgttgtggaactgcggatcaacagcggcgggaaacttccaaacttcggctttgtcgtgttcgatgattctgaacctgtacaaaaggtgctgtcaaataggcccatcatgttccgaggcgaggtcaggttgaacgtggaggagaaaaagacccgagcagctcgagaaggcgacagacgagacaaccgcctcaggggacccggcggcccacgcggcggtctggggggcgggatgagggggcccccccgtggagggatggtgcagaagcccggtttcggggtgggcaggggactggcccccagacagtag

SEQ ID NO: 119194 - DNA, 4359 bp, synthetic construct
  misc_feature 1..4359: note = Description of Artificial Sequence: Synthetic coding sequence
  source 1..4359: mol_type = other DNA
atggtcaaactcgatatccacaccctcgcacaccacctcaagcaggaacggttgtatgtcaacagcgagaaacagctcattcaacgcttgaatgctgatgttctcaagacggccgaaaaattgtatcggacggcatggatagctaagcaacagcggatcaatttggacaggctgataattacctccgccgaggcctcccccgctgagtgttgtcagcacgcaaagatcctggaagatacacagtttgtcgatgggtataagcagctgggttttcaggaaaccgcttatggagagtttctgtctcgcctcagggagaaccctcggttgatagcatcttccctcgttgccggcgaaaagctgaaccaagagaacacccagtccgtgatctacacagtgttcacttcactgtacggcaattgcattatgcaggaagatgaaagttatctgctccaggttctcaggtaccttatcgaatttgagttgaaggaatcggataaccctcgcaggctcctcagacgaggaacctgcgccttctcaatactatttaaattattctccgagggactcttctccgccaagttgtttctaaccgcaacgcttcacgagcctattatgcaactcctggtggaggatgaagaccatctcgaaactgaccccaataagctgattgagaggttcagtccaagtcagcaggaaaaactttttggggagaagggcagcgataggttccgccagaaggtgcaagagatggtggaatctaacgaggcaaagctcgttgccctggttaataagtttattgggtatttaaagcaaaacacctactgctttccacacagcctgcggtggattgtatcccagatgtacaaaacactctcttgcgtggaccggttggaagtgggtgaagtacgggccatgtgtaccgatctgctgctcgcgtgtttcatttgtcccgctgtagtgaatccagagcagtacggcataatatctgatgctcccattaacgaggttgctaggtttaatctgatgcaggttggccgtctgctgcagcagcttgcaatgacgggtagcgaagagggtgatccacggaccaaaagctcactgggaaagtttgacaagtcatgtgtagcggcattcctggacgtggtcattggcggtcgtgcagtggaaacaccccctttaagcagcgtgaacctgctggagggcctgtcacggaccgtggtctacattacatattctcagcttattacgcttgttaatttcatgaagagtgttatgagtggcgatcagcttcgggaggatcgaatggctctggacaatctcttagctaatctgccccccgccaagcctgggaaaagctcttccctggagatgactccttataacacaccgcagctgtctccggccaccactcccgcgaacaaaaagaacaggctgccaatcgcgacccggtcacggtctaggacaaacatgctgatggacctacacatggaccacgaagggtcttcgcaggaaaccatccaagaagtgcaaccagaagaggtactggttatttcgctcgggaccggtccccaactgactcccggcatgatgtccgagaatgaggtgttgaatatgcaactttcagatgggggccagggcgacgtaccagtggatgaaaataaactgcacgggaagcccgataagactctacggttcagcctctgttcagacaacctagagggaatcagtgaggggccttctaacagaagtaattccgtttcaagcctggacttggaaggcgagagcgtatcggagttgggagccgggccgagcgggtccaacggagtggaagccctgcagctgttagagcatgagcaggccacaacgcaagataacctggacgacaaactacggaaattcgaaatccgggatatgatggggcttaccgatgaccgagacatttcagaaacagtatcagaaacttggtctacagatgtgctgggctcagatttcgatcctaatatcgacgaggatcggttgcaggaaatcgccggagctgccgctgagaatatgctggggtctctcttgtgtctgccaggcagcggctccgttttactcgacccctgtactgggtccacaatcagcgaaaccacaagtgaggcatggagtgtagaggtcttacccagcgactccgaggcgcctgacctgaaacaggaggagaggctgcaggaactcgaatcatgctccggcctcggctctacaagtgacgatactgacgtccgagaggtgtcttctcgcccctctacccccggactgtccgtggtcagtggtatttccgccacaagtgaagatatccccaacaaaatcgaagacctccgaagtgagtgctcttctgattttggtgggaaagattccgtgaccagtccagatatggacgaaatcacccatggagcctcggctgtggtgcggcctaaggtccactacgccaggccctctcatcccccccccgatccccccatcttggagggtgcagtcggggggaatgaagcaaggctgcccaattttggcagtcatgtgctgacacccgccgagatggaggcctttaagcagcgccactcatatccagagaggctggtgaggtctcggtcttccgacatcgtctcaagcgtgagaagacctatgagcgaccccagctggaatcggcgccctggaaatgaagaacgagagctgccccccgccgcagctatcggagcgaccagcctcgtggctgccccccacagttctagcagcagcccctctaaggattctagcaggggagaaaccgaggagagaaaggatagcgacgacgaaaaatctgaccgtaaccgaccatggtggcggaaacgattcgtgtcggccatgccgaaggcgcctattccattcaggaagaaggaaaagcaagaaaaggacaaggatgaccttggcccggaccggttttccacactgaccgatgatccaagtcctcggctgagcgctcaggcgcaggtggccgaggatattctcgataagtataggaacgcaattaagagaacgagccccagcgacggggctatggctaactacgaatcaactggggataatcacgaccgcgatctgtcctcaaaattactgtaccatagcgacaaggaggttatgggagatggagagtcagcacacgacagcccgagagatgaggccctgcaaaacatttccgccgacgatcttccagatagcgcttctcaggcagctcatcctcaggactctgctttctcataccgggatgcaaagaaaaagctgaggctggcactttgcagtgccgacagcgtcgctttcccggtgctgacacactccacccgtaatgggctgccagaccataccgaccctgaagacaatgaaatcgtatgcttccttaaagtgcagatagcagaggctatcaatctccaggataaaaatttaatggctcaattgcaggagactatgagatgcgtgtgccgctttgacaaccggacatgtcgcaagctcctcgctagtattgctgaggattatcgcaaacgtgccccctacatagcttatttgactagatgtcgccagggactgcagactacacaagcccaccttgaaaggctgttgcagcgcgttctcagagataaggaggtagcgaatcgctatttcacaacggtatgcgtcagactgctgctggaaagtaaggagaagaagatcagggagtttattcaagactttcagaagctcacagcagcagacgacaaaaccgcccaggtggaagatttcctgcagttcttgtacggggcaatggctcaggacgtaatctggcagaatgcctcagaagagcaattacaggacgcacagttggctatcgagcgcagtgtgatgaacagaatatttaagctggctttctacccaaaccaggatggtgacatccttcgcgatcaagtgctacacgaacatattcaacgcctctccaaggtagttacagccaatcacagagcactgcagatcccggaggtttacctgagggaggctccatggccgagcgcccagagtgaaatccggacgatttctgcctacaagacaccacgggacaaagttcagtgcatactgcgcatgtgctcaaccatcatgaacctgctaagtctggctaatgaagactcggtcccaggcgctgatgattttgtacctgtattagtgttcgtgctcatcaaggccaatccgccgtgcctgctctccacagtccagtatattagctccttctatgcctcatgtctgtctggggaagaatcgtattggtggatgcaatttaccgcagccgttgaatttattaagaccatcgacgaccgaaagtag

SEQ ID NO: 119195 - DNA, 1494 bp, synthetic construct
  misc_feature 1..1494: note = Description of Artificial Sequence: Synthetic coding sequence
  source 1..1494: mol_type = other DNA
atggtcaagttggatatccacacgctggctcatcacctcaagcaggagaggctgtatgtcaactccgagaaacagttgattcagcgcctaaatgctgatgtgcttaagacagcagaaaagttgtataggacagcctggattgcaaaacagcagcggatcaatctggatcgtttgatcattacgagtgctgaagcctctccagctgagtgctgtcagcatgcgaaaatcttggaagacacccaattcgtggacgggtataagcagctgggctttcaagagactgcgtatggggagttcctgtcaaggctgagagaaaacccacggttaatcgcctctagcctggtggccggtgaaaagcttaaccaggaaaacacacaatctgtaatttatacagtatttacctcactctacggaaattgcatcatgcaagaggacgagagttatttgttgcaggttctgcggtatctgatcgaatttgagttaaaggaaagcgataatccccggagacttctgaggcgagggacttgtgcattctctattctctttaagctgttttcagaaggcttgttttcagctaagctgttcctcaccgccaccctgcatgagcccatcatgcagcttcttgtcgaagacgaggatcacctggagaccgatcccaacaagctgatcgagaggtttagcccctcccagcaggagaagctgttcggcgaaaagggatcagataggttcagacaaaaggtgcaagaaatggtggaaagcaacgaggcaaaactagtggctctcgtgaataaattcatcggctatctgaaacagaacacttactgttttcctcattcactgagatggattgtgtcccagatgtacaagaccctgagttgtgtggaccggttggaggttggtgaggttcgagcgatgtgcacagatttgttgctggcttgtttcatctgtccagccgtagtgaatcctgagcagtatggcatcatatctgatgcccccattaatgaggtggccaggtttaatttgatgcaggttggacgactcctccagcagctggccatgactgggtccgaagaaggcgatcctcgaacaaaatccagtctgggaaagttcgataaaagttgtgtagccgcctttctcgatgtggtcatcggagggagagccgtggaaacaccacccttgagtagtgttaacttgctggaggggcttagccgtactgttgtgtacataacttatagtcaattgattactttggtaaactttatgaagtctgtgatgagcggcgatcagctgagagaggatcgcatggctctcgataacttactggctaatctgccgcccgcgaagcctggcaagtctagttctctggagatgaccccatataatacccctcagcttagcccggcgactacacccgctaataagaagaaccggctgccaattggcaaggaaaacttttcttactggtcttttctgctgaatttgatcttccattag

SEQ ID NO: 119196 - DNA, 4437 bp, synthetic construct
  misc_feature 1..4437: note = Description of Artificial Sequence: Synthetic coding sequence
  source 1..4437: mol_type = other DNA
atggtgaaactggatatacatacgctcgcccatcacctgaagcaggagcgcctctacgttaactctgaaaaacaacttatacaacgtctgaatgccgacgtgttaaagactgccgagaagttatacaggaccgcctggattgcgaaacagcagagaataaaccttgaccggctgatcattacgtcagccgaggcttctcccgccgagtgttgtcaacatgctaagatactggaggatacccagttcgtcgatgggtacaaacagttgggttttcaggagacggcatacggggaattcctgtcccgcctaagggaaaacccccgcctcattgcatccagcctggtggctggcgaaaagcttaaccaggaaaatacacaatccgttatctacacagtcttcacctcactatacggaaactgcattatgcaggaggacgagtcttatctgcttcaggtcctacggtatctgattgaatttgagctgaaggaatccgacaacccaaggcggctgctgcggagggggacttgtgcattttcgatcctgtttaagctgtttagtgagggcctgttctcagcgaagctatttctgacagcaactctccacgaacccatcatgcagctgctggtggaggatgaggatcatttagagaccgatccgaataaactgatagagaggttcagtccaagccaacaagagaagttgttcggcgagaagggctctgataggtttaggcaaaaagtgcaggaaatggtggagtcaaatgaggccaagcttgtggccctggtgaataagtttatcgggtacctcaagcagaacacctattgttttccacactccctccgatggattgtgtctcaaatgtataagacgctgagctgcgtggatcgcctggaggttggtgaagttcgggccatgtgcacagacctcctgcttgcttgctttatctgcccagctgtcgttaaccctgaacagtacggtattatctctgatgcccccattaacgaagtcgcccgctttaacctgatgcaggtaggccgactgctgcagcagctggccatgaccggaagcgaagagggggatccccggacgaagtcgagcctgggcaaattcgataagtcatgcgtagctgcttttttggatgtggttatcggcggccgtgccgtggagacgcctccactttcttcggtcaacttactggagggcttgagtcgcactgtggtgtatattacttattcgcagctgattactctggtgaacttcatgaaatccgtgatgtccggcgaccagctcagagaggaccgtatggccctggacaatttgctagcaaacctcccccccgcgaaaccggggaagtcttcatctttagaaatgacgccttataacacaccccagctatcacctgcaactaccccagctaataagaagaacagactgcctatcgccacacgcagcagatcacgtaccaatatgcttatggatctgcacatggatcacgaggggagtagtcaagagaccattcaggaagtacaaccagaagaagtgttagtgatttctctgggcaccggacctcagctgacacccggaatgatgtcagagaatgaggtgttaaatatgcagctcagtgacggcgggcaaggcgatgttccggtggatgagaataagctgcacgggaagcctgataaaacgttaagattctccctctgctccgacaaccttgaaggtatctcagagggaccttccaacaggtcaaactctgttagctccctggacctcgagggggagtctgtgtctgaactgggggccggacccagcgggtctaatggagtggaggccctgcagttgctggagcacgagcaggccactactcaggacaacctggatgacaaactaagaaagttcgagatccgggatatgatggggctgacagatgatcgggacatctcggagaccgtgtccgaaacttggtctactgacgtgctgggttcagattttgacccgaatattgatgaggaccgactccaggagattgccggagcagcggctgagaatatgcttggctccttgctttgcttgccagggtcaggaagtgttctgctggatccctgtacagggtcaacaattagcgaaacaacttccgaggcatggagcgtggaggtcctcccaagtgatagcgaagcccccgatttgaaacaggaggaaagattacaggaactcgagagctgttctggcctcgggagcaccagcgatgacaccgacgtgagggaagtgtcctctaggccctctacacctggactctccgtggtttcgggaatcagcgccacatctgaagacattcctaacaagatagaggacctcaggtctgaatgttccagcgattttggaggaaaagacagcgtgacaagcccagacatggacgagattacacacggcgcacaccagctgacatcccctccaagccagtctgagtctctgctcgccatgttcgatcctctcagctcccacgaaggtgcttccgcggtggtgaggccaaaagtccactatgcccggcctagtcatcctcccccagatccacccatattggagggcgctgttggtggaaatgaggctcggctgcctaatttcgggtctcatgttctaaccccagcagaaatggaagctttcaagcagagacatagctatcctgaacggctggtgcggtcacgatcctcggatatagtgtcttctgtgaggaggcccatgagcgaccctagttggaatagacgccccggaaacgaagagcgtgagcttcccccagccgccgccatcggagccacatcgctggtggcagcgcctcactcatcttccagcagcccttcgaaagattcttctagaggggaaaccgaggagcgaaaagatagtgacgacgagaagagtgatcggaataggccctggtggcgaaagaggtttgtttctgcaatgcccaaagcccccattccgttccggaaaaaagagaagcaagaaaaggacaaggacgacctgggccccgatcggttttcgacccttacagatgatccctctccccgtctttccgcccaagcacaagtggccgaggatatccttgataagtatcgcaatgcaattaagagaacctccccatctgacggcgctatggctaactacgagagtaccggtgacaaccacgatcgagatctgtctagtaagctgctgtatcattctgataaagaggtaatgggtgacggggagagtgcccacgactcgcccagagacgaggccctgcagaacatcagcgccgacgatcttccggattcagcgagtcaggcggcccacccacaggactcagccttctcatacagagatgccaaaaagaaactgaggttggcgctctgctccgccgattccgtggcatttcctgtgctgacacatagcaccagaaacggtctgccagaccacacagatcccgaagataacgagatcgtctgttttctgaaagtgcagatagccgaagcaatcaacctacaggataagaatctgatggcccagctccaggagacgatgaggtgcgtgtgcaggtttgataacagaacgtgtcgtaaactgctcgcgtctatcgccgaggattatcgcaagcgcgctccttacatcgcatacctgaccagatgccggcagggtctccaaaccacccaagcacaccttgaacgcctactgcagagggtgctgagggacaaggaggtggcaaacaggtactttactaccgtctgtgtgcggcttctacttgaatctaaggagaagaagatcagagaatttatacaagatttccaaaaactgaccgccgccgacgataagacagctcaggttgaggacttcctacaatttctgtacggcgccatggcgcaggatgtaatctggcaaaacgcgagtgaagagcagctacaagatgcgcaactcgctatcgagcggagcgtgatgaacaggatctttaagctcgccttctatcccaatcaggatggagacattctccgggaccaagtgctccatgagcatatccagaggttaagcaaagtagtcaccgccaaccatagagccttgcagatccctgaagtatacttacgtgaagccccgtggcctagcgcacaatctgaaatacgcaccatctctgcttacaaaacacctagggacaaggtccaatgcattctgagaatgtgcagtacgattatgaacctactttctctcgccaacgaagactctgtgcccggggcagacgatttcgtcccggtactcgtattcgttcttatcaaggctaatcccccttgtctattaagcaccgttcagtacatttctagtttttatgcgtcttgtctgtccggcgaagagtcgtactggtggatgcagttcacggccgcggtggaattcataaagacaattgacgaccggaagtag

SEQ ID NO: 119197 - DNA, 4464 bp, synthetic construct
  misc_feature 1..4464: note = Description of Artificial Sequence: Synthetic coding sequence
  source 1..4464: mol_type = other DNA
atggtgaagctcgatatccacactctagctcatcatcttaaacaggagcgcctctatgtgaattccgagaagcagctgatccagagattgaatgctgacgtgctgaaaactgccgagaagctctataggacagcctggattgctaaacagcaacggatcaacctcgaccggctgatcatcacctcggcagaggctagccctgccgagtgttgccagcacgccaagattcttgaggatacacagttcgtggatggatacaagcagctgggcttccaggagacggcctatggggaattcctgtcccggctgagggagaaccctcggctcatagcttcgagtctggtagccggcgaaaaacttaatcaggaaaacacacagagtgtcatctataccgtgtttacctcgctgtacgggaactgtatcatgcaggaggacgagagttatctgttacaggtgctgcggtacctgatcgaatttgagctgaaggagtctgataatcccaggcgcctcctcaggcgtgggacttgcgctttctccatactctttaaactgttctccgaagggctcttcagcgcgaagctgttcctcaccgccaccttgcacgagcctatcatgcagctgctggtggaagacgaagaccacttagaaactgatcccaataagctgatagaaaggtttagcccttcacagcaggagaagctttttggggaaaagggctccgatagatttaggcagaaggttcaggagatggtggaatcgaatgaggccaagctggtggctctggttaataaattcatagggtacctaaaacaaaacacctactgttttccccactctttgcgctggatcgtttcacagatgtacaagacactcagctgcgtggatcgactggaagtgggtgaggtcagggcgatgtgtactgatctgctgcttgcctgctttatctgtcctgccgtggttaaccctgaacagtatggaattatctcagatgccccaattaatgaggtggcaagattcaatttgatgcaggtcggtagactccttcaacagcttgctatgaccggttctgaggagggggacccacgtacgaagtcttccttaggtaaattcgacaagagttgtgtcgctgcattcctagacgtggtaattggaggccgcgccgtcgagacgccaccattgtccagtgtgaacttgttggaagggctcagtaggaccgtggtttacattacttactcgcagcttattacactggtgaactttatgaaatctgtaatgagcggagaccaactgagggaggataggatggctctggataacctgctcgccaaccttcccccggccaaacccgggaagtcatcaagtcttgaaatgactccatataatacgcctcagctgtctcctgcgacaactccagcgaacaaaaaaaaccgattacctattgcaactagatcgcgcagcaggaccaacatgcttatggacctacacatggatcatgagggctctagtcaagaaacgatacaggaagttcaacctgaagaagtcttagtgattagcctaggaaccgggcctcaactcaccccaggcatgatgtcagagaacgaggtgctaaatatgcagttgtccgatggaggacaaggggatgtacctgtcgatgagaataagctccacggaaaacccgataagacgctcagatttagtttgtgctcagataacctggaaggcatctcagagggtccaagcaaccgatccaattccgtgtcctccctcgacttagagggagagtccgtctctgaactgggcgcgggtccaagcgggtcaaacggtgtagaagccctgcagctgctcgaacacgagcaggctacgacacaggacaacctagacgacaaactgagaaaattcgaaatcagggacatgatgggcttgaccgatgacagagatatttcagagacagtctccgaaacgtggagcaccgacgtgcttggcagcgactttgatcctaacatcgacgaggatcgcttacaagaaattgcaggggcagccgcagaaaatatgctgggttctttattgtgcctccccggtagcggctctgtcttgctggatccctgcactgggtctaccatcagcgaaactaccagtgaggcctggagcgtggaggttctaccttctgactccgaggctcctgacttgaagcaggaagagaggctgcaagaactcgaatcatgcagcggattgggaagcacgagtgatgatactgacgtgagggaggttagtagtagaccctccactcctgggctgtccgtagtctccggtatcagtgcaacctctgaagacatccccaataaaatcgaggatcttcgatccgaatgcagcagcgatttcgggggtaaggacagcgttaccagtcctgacatggacgagatcacacacgacttcttatatattcttcagcccaagcaacattttcaacatatagaggccgaagcggacatgagaatccagctgtcctcatccgctcaccagctgacgtctccaccttcccagtcagagtcactcttggccatgttcgatcctctcagctctcatgagggagcttctgccgtagtccggcctaaggtgcattatgcccgaccgagccatccgccacccgacccccccatcctggagggagctgtgggcggcaacgaggcccgactgccaaactttggctcccacgtcctgacacctgcagaaatggaggcatttaaacagaggcattcttacccagagcgcctagtaaggagccggtctagcgacatcgtaagcagcgtgaggcgcccaatgtctgatccgagctggaatagacgcccgggcaatgaagaacgagagctcccccccgccgccgctattggggcaacatcactggttgccgcacctcacagctcatcttcctcaccttctaaagactcttctagaggtgagacagaggaacggaaggattccgacgatgaaaagtcagaccggaataggccctggtggcgtaaacgctttgtctccgccatgccaaaggcgccgattccattcagaaaaaaggagaagcaagaaaaagacaaagacgatcttggccccgacaggtttagtaccctcaccgacgacccaagccctagactctccgctcaggcccaggttgcggaagatatcctggacaaatatcgaaatgccatcaaaagaactagcccctcagatggcgccatggcaaattacgaaagtactgaagtgatgggcgatggcgagagcgctcatgattcaccaagggatgaggccctgcaaaacatctcagccgatgacctcccagactctgcttcccaggcagcacacccccaggacagtgcattcagttaccgcgatgcaaagaagaagctcagactggcactgtgttcagccgacagtgtcgcctttccggtcctgacccatagcaccagaaacggcctgcccgaccacacagaccctgaagacaacgagattgtgtgtttcctcaaggtccagatagcagaagctataaatttgcaggacaagaatctgatggcgcaactgcaagaaactatgcgatgtgtctgtcgctttgacaacaggacatgcagaaaactgttagcgagcattgccgaagattatcgaaagagggccccatacatcgcttacctgacgagatgtagacagggactccaaacaacccaagcccatctcgagcgactgctgcagagggtcctgcgggacaaggaggttgcgaatcggtatttcacaactgtgtgcgtgcgcttgttactagaaagcaaagaaaagaagatccgagagttcatacaggacttccaaaagctcaccgctgctgacgacaagacggctcaagttgaggactttcttcagttcttgtacggggccatggcccaggatgtgatctggcagaacgcatctgaagagcaactccaagacgcccagctcgccattgagagatcagtgatgaaccgaatctttaaacttgcattctacccaaatcaggatggcgatatccttcgcgaccaagtgcttcacgaacacatccagagactcagcaaggttgtaacagctaatcatcgggcactgcagatcccagaggtgtatctgcgggaggcaccatggcccagcgcacaatccgagataagaaccattagcgcctacaagacgcctcgagacaaagtccagtgcatcctgcggatgtgcagtaccatcatgaacctgctcagccttgccaatgaagactccgttcccggagcggatgacttcgtgcctgtgctggtctttgtcctcatcaaggctaaccctccgtgcttgctgtctacagtgcaatatataagtagcttctacgctagttgcttatccggagaggaatcctattggtggatgcagttcactgctgctgtggaattcattaaaactatcgacgaccggaaatag

SEQ ID NO: 119198 - DNA, 2514 bp, synthetic construct
  misc_feature 1..2514: note = Description of Artificial Sequence: Synthetic coding sequence
  source 1..2514: mol_type = other DNA
taaaactgcattatgcaggaagatgaatcctatctgctgcaggtccttcgatatctaatcgagttcgagctcaaagaatctgataatccacggcgccttctgcgtcgtgggacatgcgccttttctatattgttcaaactgtttagtgaaggactctttagcgcaaagctgtttttgacggccacgcttcatgagcccatcatgcagttgctcgtcgaggacgaggaccatctcgagacagaccccaataaactgattgaacggttcagcccaagccaacaggaaaaactgttcggggaaaaaggatcggatcggttccgacagaaagtgcaagagatggtcgaatcgaatgaggctaagctcgtagcattggtgaataaattcatcggatacctgaagcaaaacacttactgcttcccccatagcctgcgctggatcgtttcccagatgtataagactctctcttgcgtagacaggctggaagtgggagaagtccgagccatgtgcacagatctgttgctggcctgtttcatttgccctgcagtggtgaaccctgaacagtacggtattatcagcgacgcccctataaacgaggtggcccgttttaacctgatgcaggtcggaaggctgctccagcagctggcaatgactggctccgaagagggcgaccccaggacgaaatcatctttggggaaatttgacaagtcttgcgtcgctgcatttttggacgtcgtaatcgggggacgcgccgtggagacgcctcctctgtcaagtgtcaatctgctggagggtctgtccaggacggtggtgtacattacatatagccagcttattacactggtcaactttatgaagagcgttatgtccggcgaccagctaagagaagatagaatggcgcttgataacctcctcgccaacctgcctcccgccaagcctggcaaatctagtagtcttgagatgacaccctacaatactccccagttgtctcctgcaaccactcctgctaacaagaaaaaccggctccctatcgcaacaagatccagatcaaggactaacatgttaatggacttacacatggatcatgagggcagctcccaggagaccatacaagaagtccaaccagaggaagtgttagtgatcagcctcggcaccggtccacaactcacccccgggatgatgtccgagaatgaggtgctgaacatgcaactttccgacggcggacaaggcgatgtgccggtcgatgagaataagctgcatgggaagcccgataagacactcaggttctcactttgcagtgacaacctggaaggcatttctgaagggccctcaaataggtctaatagtgtgagtagcttagatttggagggtgaaagtgtgagtgaactgggcgcaggacccagcggttccaatggcgtggaagctctccagctcctggaacatgagcaggcaactacacaagataacttagacgacaagctgagaaagttcgaaatcagagatatgatggggctcacggatgatcgggacatttctgagacagtgagcgaaacctggtccaccgacgtgctaggctctgacttcgacccaaatatcgatgaggaccgtctccaagagatcgccggggctgccgctgagaacatgttgggatcgctgctgtgtctgccaggctcaggttctgtcctgttagacccctgcacaggttctactatcagtgagaccacgtctgaggcatggtccgtagaggtcctgccttccgactcagaggcaccagatctgaagcaggaggagcggctgcaagagctcgagagctgttctggcctgggttccacgagtgacgacaccgatgtacgcgaagtgagtagcagacccagcacaccaggtctctcggtggtttcaggcatttccgccacgagcgaggatatacctaacaagattgaggacttgcggtcagagtgcagctcagactttggtggaaaagactcagtgacaagccctgacatggacgagattacgcacggagcttctgccgtggtgcgcccaaaggtgcattacgctagaccttcccatcccccccctgatcccccaatactcgagggcgccgttggtggaaacgaagcccgtctgcccaacttcggcagtcacgtcttaactccagctgaaatggaagcattcaagcaaaggcactcatatccggagcgcctggtccgtagtcgcagcagtgacatcgtgagctccgtccgtagaccaatgagcgaccctagctggaacagacgtcccggcaacgaagaacgagaactccctccagccgcagccataggggccacaagcctggtggccgccccacactcttccagttcatcgcctagtaaggactcttcacgcggagagaccgaggaaaggaaagattccgacgatgagaaatcagaccgaaatcgcccgtggtggcggaagaggtttgtctcagcaatgccaaaagcccctatcccctttcgcaagaaggaaaagcaggaatag

SEQ ID NO: 119199 - DNA, 2493 bp, synthetic construct
  misc_feature 1..2493: note = Description of Artificial Sequence: Synthetic coding sequence
  source 1..2493: mol_type = other DNA
taacttagaagaggtacgtgtgcatttagcatcttatttaaattgtttagcgagggcctcttcagtgctaaactattcctgaccgcaacactgcatgaacccatcatgcagctccttgtagaggacgaagaccacttagagactgaccccaacaagctgatagaacgcttcagcccatcgcaacaggaaaaattatttggtgagaaaggctctgatagatttcggcagaaggtacaggagatggtggagtctaatgaggccaagcttgtggccttagtgaacaagttcataggctacctcaaacaaaacacgtactgcttcccacatagtctgaggtggattgtgagtcagatgtacaaaacactgagctgtgtggatcggctggaggtcggtgaggtcagagctatgtgtaccgatctccttcttgcctgcttcatttgtccggcggttgtgaaccccgagcagtacgggataatcagcgatgcaccaatcaacgaggtggcacgatttaacttgatgcaggtgggccggctactgcagcagcttgcgatgactgggtcagaggagggagatcctcgcacaaaatctagcttaggcaagttcgacaagtcttgcgttgccgcatttttggatgtcgtgatcgggggaagggccgtggagacaccacctctgtcctctgtcaatctgctggaagggctgagcagaaccgtggtgtatatcacgtactcacagcttatcacactcgtgaactttatgaagtccgtgatgtccggtgaccagctgagggaagatagaatggctctcgacaacctgctggccaatctgccccccgctaaacccggcaagtcatccagtctggagatgaccccatataacactccccagctctcccctgctacaacccctgctaataagaaaaaccgcctgcccataggccagcagctcgccgccattaccgcttgggattcatccgctaccaatattacaagtcacattaccgtggtcacaccatttgccacaaggtctcgaagccgcaccaatatgctcatggatctgcatatggatcatgaggggagctcccaggagacgatccaggaggtccaacctgaagaggtcctggttataagtttgggcacaggtccacagctcaccccgggtatgatgagcgaaaatgaggtattaaatatgcagctctccgacggcgggcagggtgatgtgccagtagatgaaaataaactccacggccctagcaaccgaagcaattcagtgagctccctggacctggagggtgaatccgttagcgaactaggcgctgggccctcgggcagtaacggggttgaggccctccaactgttagaacacgaacaagccactactcaggacaacctggatgataagctgcgtaaatttgaaatcagggatatgatggggctcacagatgacagggacatcagtgaaacggtttcagagacgtggtctactgatgttctggggtccgatttcgatcctaatatcgatgaagatcggctccaggaaatcgcgggcgccgctgccgagaatatgctgggctccttgctatgcctgcccgggtcaggctctgtgctcctggacccatgcactggcagcacgattagtgagacgactagcgaagcatggagcgttgaagtcctgccaagcgacagcgaagccccagatctgaagcaggaagagcgtctacaggagctggagtcgtgcagtggattgggcagtacctcagacgacaccgatgtgcgggaggtgtcctctcggccatctacccccgggctcagtgtcgtgtctggtatctcagccacctcggaagacatccctaataagatcgaggatttgcggtctgagtgttcatctgactttggggggaaggactctgtcacgtctccggacatggacgaaatcactcacggggctcaccagctcacatcccccccatctcagtccgagtccctcctcgctatgttcgatcccctcagcagccatgagggggcctccgccgtcgttaggcccaaggtccattatgcccgaccgagccaccccccgcccgaccctccaatccttgaaggagctgtcggaggtaatgaggcccgactccccaacttcggcagccacgtgcttacacccgcagagatggaggctttcaaacagagacatagctatcccgaacgcttagttcggagtcggtctagcgatatagtttcttcagtgcgacgaccaatgagtgatccctcatggaaccgcagacccggtaatgaagaacgcgagctgccccctgcggccgcaataggggccacgtccttggtggctgccccccactcctcctccagctccccgtctaaggatagttctcggggcgaaaccgaagaacggaaggattctgatgacgagaaaagcgatcgaaatcggccatggtggagaaaaaggtttgtgtctgcaatgccaaaggcaccaatccctttttag

SEQ ID NO: 119200 - DNA, 516 bp, synthetic construct
  misc_feature 1..516: note = Description of Artificial Sequence: Synthetic coding sequence
  source 1..516: mol_type = other DNA
atggttcaatggccgcgcatgtcctacggaaagacgcgcgttatgaataggattttcaaactggctttttaccctaaccaagacggcgatatccttcgcgatcaggtacttcatgagcatatacaacgactgagcaaggtggtgactgctaaccaccgcgccctgcagatcccggaagtgtacctgcgcgaggcaccttggccaagcgcccagtcagagatcagaacgatctccgcctacaagaccccacgagacaaggttcagtgcatcttgcgaatgtgtagtaccatcatgaacctgctgtctctggctaatgaagattctgtccctggcgccgatgacttcgtgccagtacttgtcttcgtgctaattaaagctaaccccccttgtctgctgtccactgtgcaatacatatccagcttctatgcgagctgtctgtcaggggaggagtcctattggtggatgcaattcactgcagccgtagaatttatcaaaaccatcgacgatcggaaatag

SEQ ID NO: 119201 - DNA, 354 bp, synthetic construct
  misc_feature 1..354: note = Description of Artificial Sequence: Synthetic coding sequence
  source 1..354: mol_type = other DNA
atggtcaaactggacattcacactctggcccaccacctaaagcaagaacgcctgtacgtcaattctgaaaagcagctaatccagcgcctaaacgccgatgtgctcaagacagcagagaaactctacaggacagcttggatcgccaagcaacagcgaatcaacttggatcggttaatcattaccagcgccgaagcctctcctgctgagtgttgccaacacgctaagatccttgaagatacccagttcgtcgatggatacaagcaactggggtttcaggagacagcttatggcgagttcctctcacggctgcgggagaatcctcggttgatcgcttcgtccctggtggccgggtag

SEQ ID NO: 119202 - DNA, 2967 bp, synthetic construct
  misc_feature 1..2967: note = Description of Artificial Sequence: Synthetic coding sequence
  source 1..2967: mol_type = other DNA
atggttaagctggacattcacactcttgctcatcacttgaaacaggaacgcctgtatgtgaacagtgaaaaacaattgatccagaggctaaacgctgacgtgctcaagacagcagaaaaactatacaggacagcatggatcgctaaacagcagagaatcaaccttgacaggcttatcattacatccgccgaagcgagcccagcggagtgctgccagcatgcaaagatcctggaggacacacaattcgttgatggttacaagcagttagggtttcaagagacggcatacggcgagttccttagtcgcctgagagagaaccctcgcctaatcgcgagctctctggtggctggggaaaaactgaatcaagaaaatacacaaagcgtaatctatactgtgtttacatccctgtatgggaactgtattatgcaggaggacgaaagctacttgctgcaagtgctgcgatatctgatcgaattcgagttgaaagaatctgacaatcctcgaagactgttgcgtcgtgggacttgtgcttttagcattctgttcaaattgttttcagaggggctcttctctgctaaactcttcttgaccgcaactttgcacgagccaataatgcagttgttggtggaggatgaggaccatctggagactgatccaaacaaattgattgaacggttttctcccagccaacaggaaaagcttttcggagagaaaggctcagaccgctttaggcagaaagtgcaggaaatggtcgagtcgaatgaggccaaactagtagcccttgtcaataagtttatcggttatctaaagcagaacacatactgttttccgcattccttgcgctggatagtgagccagatgtataaaactctgtcctgtgtggaccgcctcgaagtgggcgaagtacgagctatgtgcacagacttgcttctggcatgttttatttgcccagctgttgttaatcccgaacagtacgggattatctccgacgctcctatcaacgaggtggcaaggttcaatctgatgcaggtggggcgactgctgcagcagctggctatgactggatctgaggagggggatccacggaccaaatcttctctaggcaaatttgacaaaagctgtgtagccgccttcctagatgtggttattggcggacgggccgtggaaacccctcctctgtcttccgtcaatctgctcgagggtctgtcacgaacagtggtgtatatcacctacagtcagctgataacactcgtcaatttcatgaaatccgtcatgtctggagatcaacttcgagaagatcgcatggccttagacaacctgttagccaacctgccaccggcaaagccagggaaatcatctagtctggaaatgaccccctataacacgcctcagctgtctccagccaccacccctgcaaataaaaagaatcgtctccctatcgccacacgaagtagatcaaggaccaacatgcttatggacctccacatggaccatgaaggctcctcccaggagacaatccaagaggtccagcctgaggaggtgctggtaatttcacttgggaccgggcctcaactgacccctggaatgatgagtgagaacgaggtcctgaatatgcagctgagtgacggagggcagggggacgtgcctgtcgatgagaacaaattacatgggaagcctgataaaaccctgaggttttctctgtgtagcgacaacctggaaggaatttcggagggccccagcaaccgctcaaattctgtctctagtctggacctggaaggggagtccgtaagcgagttgggcgccggcccatctggctcaaacggggttgaagccttgcagcttctggagcacgaacaagccacaactcaggacaacctcgacgataagctgcgaaagttcgagattcgggacatgatggggctgaccgatgaccgcgacatttctgaaacagtatccgagacgtggtctaccgacgtgctaggttcagactttgacccaaacatcgacgaggatagactgcaggagatcgccggcgccgcagcggaaaatatgctgggatcgctcctttgccttcccggcagcggaagcgtcttgttagatccctgtaccggtagtactatttccgagacaaccagtgaagcatggtctgtggaggtcctccctagcgacagtgaagcccctgatctgaagcaggaagagcgcctgcaggaactcgagtcctgcagtggcttaggttcgaccagcgatgacaccgacgtgagggaggtctctagcaggccatccacgccgggcttgtctgtggtgagtggaattagtgccactagtgaggatattcccaacaagattgaggatctcagatctgagtgctcaagcgactttggcggaaaggattctgtcaccagccctgatatggatgaaatcacgcacggggcgcaccagctcacgtcacctccttcccagagtgaaagcctgttagccatgttcgaccctctgtcaagccatgagggggctagcgcagtagtccgacctaaagtacattacgcgcggccaagccatcccccgccagatcccccaatcctggaaggggcagtcggtggtaacgaagcccgactgcctaatttcggttcccatgtgctcacccctgcagagatggaggccttcaaacaacgccacagctatcctgaaagactcgttcgctccagatctagcgatatcgtgtcgtcagtaagacgacccatgagcgatccaagctggaaccgtagacccggcaacgaagaacgcgaacttcccccagctgcagccattggcgcaacatccctcgttgcagctccacattcctcatcaagcagtccatcaaaggactcatctagaggcgagactgaggaacggaaggattcagatgatgagaaaagtgaccggaatcgaccatggtggcgcaagaggttcgtgtccgcaatgccaaaatag

SEQ ID NO: 119203 - DNA, 4437 bp, synthetic construct
  misc_feature 1..4437: note = Description of Artificial Sequence: Synthetic coding sequence
  source 1..4437: mol_type = other DNA
atggttaaactggatatccacacactggcccaccatttgaagcaagaacgcttatacgtgaactccgaaaagcagctcatccagcggcttaatgccgacgtgttgaagactgcagaaaagctctacaggactgcgtggatcgccaaacaacagagaatcaacctcgacaggctcattattacatcagccgaggcctcaccagctgagtgttgtcaacatgcgaaaatcctggaagatactcagttcgtggacggctataagcagcttggcttccaggaaactgcttacggtgagtttttatccagacttcgggagaacccaagattgatcgcatcctccctggtagccggagagaaactgaatcaggaaaacacacagtccgtgatatacaccgtctttacatctctgtacgggaactgcatcatgcaggaggacgaaagttatctgcttcaggtgctgcggtacctcatcgaatttgaactaaaggaatccgacaatccccggcgactgctgaggcgggggacctgcgcgttctcgatcctgtttaagttgttttcggaaggattgttttccgctaaactttttcttactgcgaccctacacgaacccataatgcagttgctcgtggaggacgaggaccacttggagactgatccgaacaagctgattgaaaggttttcaccttcgcaacaggagaagctgttcggcgaaaaagggagtgaccgctttcgccagaaagtacaggaaatggtggagtctaatgaggccaagctggtggcactggtgaacaagtttatcggatatctgaagcaaaatacttactgctttccccatagcctccgctggatcgtctcacagatgtacaagaccttgtcctgtgtggacagactagaggtgggcgaggtaagggctatgtgcacagacctcctcctcgcatgttttatctgtcccgccgtggtcaatccagagcagtacggcattatatccgatgctccgattaatgaggtggccaggtttaacctgatgcaagttgggaggctgctgcagcagttggcgatgacaggctcagaggaaggggatccccggacaaagtctagcctgggcaagttcgacaagtcatgcgtggctgctttcttggatgtggtgatcgggggtcgggcagtcgagacaccaccactgtcctccgtcaatcttctggaggggctgagccggaccgtcgtgtatatcacttattcccagctgataacgttagtcaatttcatgaagtctgtgatgtccggggatcaactccgtgaagatagaatggcccttgataacttgctcgcgaacttgccacctgccaagcccggtaagtcttccagcctggaaatgactccttacaacaccccacagctgtcgcccgccactaccccagccaacaagaagaacagactccccattgccacaaggagtagatcccgcactaatatgttgatggatctccacatggaccatgagggttcttcacaggagaccattcaagaagtgcagcccgaagaagtacttgtgatctcgctaggcactggaccacaactgaccccaggaatgatgtcagagaatgaagtgctcaatatgcagttgtcggatggcggccagggtgacgttccggtggatgagaataagctgcatggtaagccagacaagactctgcgattctctttgtgttccgacaaccttgagggtatttctgagggcccaagcaataggagtaattcagttagttcccttgacttggaaggtgagtccgttagcgagctgggagctggccctagcggctcaaatggtgtggaagcgctccagctactcgaacatgagcaggcaacaacccaggataacttggacgacaaactccgtaaatttgaaattcgcgacatgatgggactcaccgacgatcgcgacatttccgagaccgttagcgaaacctggtccactgatgtcctgggctccgacttcgaccccaacatagacgaggacagactgcaggaaatcgctggagccgcggccgaaaatatgcttggtagcttactgtgtctcccgggttctggcagcgttctactagacccttgcacaggttccacaatctcggagactactagcgaggcctggagcgtagaggtcctgcccagtgacagcgaggctccagaccttaagcaagaggagcgtcttcaggagctggaaagttgttccggtttggggagcacctcagacgacaccgatgtccgcgaagtgtcctcacgtccctcgaccccagggttgagcgttgtgagcgggatcagcgcaacatcagaagacattccgaataaaatcgaggatctgagaagcgagtgttccagcgattttggaggcaaggattctgttacctcccctgacatggacgagattacacacggagcgcatcagctgacttccccaccatcccagagtgagagtttactggccatgtttgatcctttgagttcgcacgaaggagcgtccgctgtggttcgcccaaaagtccactacgctaggccttcacacccaccgcctgatccccccatactggaaggagccgtgggcggcaatgaggctaggttgcctaatttcggctctcatgttctcactccagctgaaatggaggcattcaaacagaggcactcataccccgagcgtctggtgagatcccggtctagcgacattgtaagcagcgtgagacgtcctatgagcgacccttcttggaaccgtcgacctggaaacgaggaaagagagcttccacccgctgccgccatcggagctacttcacttgtggccgcaccgcatagctcatcctcttctcctagcaaagatagttcacggggagaaacagaagagaggaaggacagcgacgatgaaaaaagtgaccgcaatcgaccgtggtggaggaagcggttcgtctcggccatgcctaaggcccccattccatttcgcaaaaaggaaaaacaggagaaggataaagacgatctgggacctgaccggttcagcaccctaaccgatgatcctagccccagattgtcagcacaagcccaggtggctgaagacatcttggataaatatcgtaatgccatcaaacgcacttcaccatccgacggagccatggccaattacgagagcacaggcgataaccacgatagggatctgtcctctaaactactgtatcacagcgataaggaagtcatgggggacggcgagtcagcccatgattctccgcgggacgaagctttgcagaatattagtgccgacgatttacccgatagtgcaagtcaggctgcccatccccaggattctgcctttagctacagagatgcaaaaaagaagctaaggctggctctctgtagcgccgattccgtggcattcccggtactgactcacagtacacgaaatggcctcccggaccataccgatccagaggacaacgagatcgtgtgtttcctcaaagtccagatagcagaagccatcaatcttcaggataagaatctgatggcccaacttcaggaaactatgcggtgtgtgtgtagattcgacaaccgcacctgtaggaaactgttagcctctatagctgaagactatcgcaagcgggcaccatatattgcgtatctcacgcggtgtaggcagggcctgcagaccactcaggcccacctcgagcgcctgctgcaacgcgtcttgcgcgacaaggaggtagcaaacaggtactttacaacagtgtgtgtgcgcctgctgctggagagcaaagagaagaaaatccgcgaattcatacaggacttccaaaagctgactgctgcagacgacaagacagcccaggtagaggattttttgcagttcctctacggagcaatggcgcaggacgtgatatggcagaacgcaagcgaggaacagcttcaagacgcacagcttgccatagaacgatcagttatgaaccggatatttaagctggccttttatccgaatcaggacggggatattctgagggaccaggtcctacacgagcacattcagaggttgtccaaggtcgtgacagcaaaccatcgggcactccagatcccagaggtatacctgagggaagccccttggcctagtgctcagtccgaaattcgcacaatctcagcctataagactccacgggacaaagtacagtgtatacttagaatgtgtagcacaattatgaacttgctttcccttgccaacgaggactccgtaccaggtgccgacgacttcgtgccggtcttagtgttcgtgcttattaaggccaacccaccttgtctgttaagcacagtgcagtatatctcatctttctacgcgagctgtctttcgggcgaggaatcctattggtggatgcagtttaccgcagccgtcgaatttatcaagactatcgacgacagaaagtag

SEQ ID NO: 119204 - DNA, 2271 bp, synthetic construct
  misc_feature 1..2271: note = Description of Artificial Sequence: Synthetic coding sequence
  source 1..2271: mol_type = other DNA
atggtgaaactagatatccacacattggcccatcacctgaaacaggaacgtttatacgtcaactctgagaaacagctgatccagcgcttgaacgccgatgtattgaaaaccgccgagaaactataccggaccgcttggatcgcaaagcaacaacgcatcaacctcgaccggctgattattacgagcgcagaggcatctcccgcagagtgctgccagcacgccaagatactggaagatacccagtttgtcgatggctataagcagttggggtttcaggagacggcatacggggaattccttagccgcctccgggagaatccccgacttatcgctagctcccttgtcgccggagagaaattgaatcaggaaaacactcagtccgttatctataccgtgtttacatctctttatggaaattgtataatgcaggaggacgagtcctatttgctccaggtcctaagatatctgattgagtttgagttaaaggaaagcgataacccgcggaggttactacggcgggggacatgcgctttttcgatactcttcaagctcttttcagagggccttttttccgccaagcttttcttaaccgcaaccttgcacgagcccatcatgcagttacttgttgaggacgaggatcaccttgagacagatccaaacaaactaattgagagattttctcctagccaacaggagaagctgtttggcgaaaagggatccgaccgttttcggcaaaaggtgcaggagatggtggagtcaaacgaagccaagctagtcgctttggtcaataagtttatcggttatctcaagcagaatacttattgtttcccccactctcttaggtggattgtatcccagatgtacaaaacactctcgtgtgtggaccggctggaggtcggcgaagtacgtgctatgtgtaccgacctactgctggcctgtttcatttgcccggcagtcgtcaaccctgagcagtacgggatcatctctgacgcgcccatcaacgaggtcgccaggtttaatctgatgcaggttggccgtctcctccagcagctcgccatgacaggctcggaggagggtgatccgcggacgaagtcttcactcgggaaattcgataagtcctgcgtggctgcatttttagacgtggtgatcggcggaagggctgttgaaactcctcccctatctagcgtaaacctcctggaaggcttatctcgcaccgtggtctatattacctacagtcagttaatcaccttagttaactttatgaagtctgtgatgagtggcgaccagcttcgggaagatagaatggctctcgataatctactcgcgaatcttcccccagcaaagcctggcaagtcatcttcactcgagatgaccccctacaatacaccacagcttagccctgctactacccctgctaataagaaaaaccggctgcccatcgctactagaagccgctcaaggaccaacatgctgatggacctgcacatggaccacgagggtagttcccaggagactatccaggaggtgcagccggaagaagtgctggttatcagcctggggactgggccccagttgacgcccgggatgatgagtgagaatgaagtgttaaacatgcagctgagcgacggcggccaaggggacgttcccgtggacgagaataagctgcacgggaaacccgataaaaccttgcgatttagcctgtgtagcgataacctggaagggatctccgagggtccaagtaaccggagcaactctgtcagttcactcgatctcgagggagaaagtgtgtcagagctcggagcagggccatctgggtcaaacggcgtggaggcgctgcagctcctcgaacacgagcaggcaaccacccaggacaacctggacgacaagttgcggaagttcgagattcgagatatgatgggcctcacggatgacagggatatttcagaaaccgtgtccgaaacatggtcaacagacgttctcggaagtgacttcgatcctaacatcgatgaagaccggctccaagaaatcgccggagctgccgccgaaaatatgctgggaagcttgctttgtctgcccggttcaggtagcgtgctgctcgacccttgtacgggatctacaatctcagaaaccacttcagaggcctggtctgtggaggtgctaccttctgacagtgaggctccagatctgaagcaggaagagcgtctacaggagctcgaatcttgctcaggtcttggatctacatcagatgataccgacgtaagggaagcttag

SEQ ID NO: 119205 - DNA, 921 bp, synthetic construct
  misc_feature 1..921: note = Description of Artificial Sequence: Synthetic coding sequence
  source 1..921: mol_type = other DNA
atgggcggccgaaagatggccacggatgaagagaacgtatatggactggaggaaaatgcccagtcaagacaggagtccactagacgactcatcctcgtgggccgcaccggagccgggaaatctgctacaggaaattctatcttgggacaaaggagattcttttcacggctgggtgctacatcagttactagagcttgtaccacgggttcccggaggtgggacaaatgccacgttgaagttgtggacacacccgacatcttctctagccaggtaagtaagacagatccaggctgcgaggaacgcggacactgttacttgctgtccgcacctggcccccacgccttacttctggtcactcaattgggcagattcaccgctcaggatcagcaggccgttagacaggttagagacatgttcggtgaagacgtgctgaaatggatggtgattgtctttacgcgcaaagaggatttggccgggggatctctgcatgattacgtgtcgaacacagaaaatcgggcactgagagagctggtggccgaatgcggtggcagagtatgtgcatttgataatcgggcaacagggagagagcaagaagcgcaagtcgaacagctactgggcatggtggaggggctcgtgttggaacacaagggagcccactacagtaacgaagtctatgagctggcgcaggtgctgcggtgggccggtccagaggaacgactgagacgtgtggcggagagagtggcagccagagttcagcgacggccgtggggcgcatggctatccgcccggctctggaaatggctaaagtctccaaggtcttggcgactgggtttggccctcctgcttggtggagccctgttgttctgggtccttcttcatagacgctggtctgaagctgtggcggaagtcgggcccgactag

SEQ ID NO: 119206 - DNA, 681 bp, synthetic construct
  misc_feature 1..681: note = Description of Artificial Sequence: Synthetic coding sequence
  source 1..681: mol_type = other DNA
atgtcgtgggtgcaggctgccagtttgattcaggggcccggcgataagggtgacgtgtttgacgaagaagccgatgagagtctgctggcccagagagagtggcaaagcaacatgcagcgaagggtgaaagagggctatagggatggtattgacgccggtaaggccgtaacactacagcagggcttcaatcagggatacaagaaaggggcagaggttattctcaactatggtcgcctcaggggaacattatcggcacttttgtcctggtgccacctgcataacaacaattcaaccttaattaataagataaacaaccttttagatgcggtcggacaatgcgaagaatatgtcctgaaacacctcaagtctataaccccaccaagtcacgtggtggatctcttagactccatagaagatatggacctttgtcacgttgttcctgcagaaaagaaaattgatgaagcgaaggacgaacgtctatgcgagaataacgccgagtttaacaaaaattgctctaaatctcattcggggattgactgttcttacgttgagtgctgcaggactcaggagcatgcacactctgagaacccgagtcctacatggatcttggaacagacagctagcctggtcaagcagctgggcctcagcgtcgacgtgctacagcatctgaagcaactgtag

SEQ ID NO: 119207 - DNA, 990 bp, synthetic construct
  misc_feature 1..990: note = Description of Artificial Sequence: Synthetic coding sequence
  source 1..990: mol_type = other DNA
atggccgcccaatacggctcaatgagcttcaacccaagcacccccggcgcttcctatggcccagggagacaggagccacgcaattcacagcttagaattgttctggtcgggaaaacaggggctggcaagtccgctaccggtaattccatcctgggccgcaaggtattccacagcggaacagccgctaagtccatcacaaagaagtgtgaaaagagatccagctcatggaaagaaaccgaactggtcgttgtagataccccgggcatcttcgacacggaagtaccaaacgcggagacctccaaagaaattatcagatgcattcttctaacctcgccgggcccccatgcactgttactcgtcgtaccactcggacgttatactgaagaagagcataaagcaacagagaagattcttaagatgttcggcgaacgtgccagatcattcatgattctcatctttacaagaaaagacgacctaggtgatactaatcttcacgactatttaagagaggctccagaagacatccaggaccttatggatatctttggcgatcggtactgcgctctcaataataaagccaccggggcagagcaggaagcccagcgggctcagctgcttggattgatacaaagagtggtgcgggagaacaaggagggctgttatacaaacaggatgtaccagagggcagaggaagaaatccagaaacagacacaggctatgcaggagctgcaccgagtggaactggagcgggagaaagctcgaatcagggaagaatatgaagagaaaattcgcaagctggaagacaaagttgagcaagagaagagaaaaaagcaaatggaaaaaaagctggccgagcaagaggctcattacgccgttaggcagcagcgagctcggaccgaagttgaaagtaaagatggcatcctcgaactgataatgactgcactgcagatcgcctcattcatcctgcttcgactgttcgccgaagattag

SEQ ID NO: 119208 - DNA, 786 bp, synthetic construct
  misc_feature 1..786: note = Description of Artificial Sequence: Synthetic coding sequence
  source 1..786: mol_type = other DNA
atggccgcccagtacgggagcatgtcattcaatcccagcactcccggggccagctatgggcccggacggcaagaacctagaaactcccaactcaggatagtgctagtcgggaaaaccggcgccggaaaaagtgctaccggcaactcaatactaggacgaaaagtattccattccggcaccgccgctaaaagcatcactaaaaaaatactaaaaatgttcggtgagcgtgccagaagcttcatgattctgatttttacacggaaggatgatctgggggataccaaccttcacgattatctgagggaggcacctgaggatatccaagacctgatggacatttttggcgaccggtactgcgccctaaataacaaagcaaccggagcagagcaagaggcccagcgcgcccaattactgggactcatccagcgcgtggtacgggagaacaaagagggatgctacaccaacagaatgtatcagcgcgcggaggaggaaatccagaaacagacccaggcgatgcaagaactccaccgtgtggaactggaacgcgaaaaagcccggatccgggaagagtacgaagaaaaaatccgaaagctggaggataaagtcgagcaggaaaagaggaaaaagcagatggagaaaaagctggccgaacaggaagcacattacgccgtacggcagcaaagagcccgtaccgaggtggagtcaaaggacgggatcttggagcttatcatgaccgcactccagattgcatcattcatcctgttaaggctgtttgctgaggattag

SEQ ID NO: 119209 - DNA, 456 bp, synthetic construct
  misc_feature 1..456: note = Description of Artificial Sequence: Synthetic coding sequence
  source 1..456: mol_type = other DNA
atggccgctcagtacgggtcgatgagcttcaatccaagcactcccggggcgtcgtacggcgagcgagctttctcagcacctcagacacgccttcaagggggacccggcaggcaggaacctcgcaacagccagctgcgtatcgtactggttgggaagacaggcgccgggaaatcggcgactgggaatagtattctaggcagaaaggtcttccacagcggtacagccgctaagagcatcactaaaaagtgcgagaaacgttcctcatcctggaaggagacggaactggtggtggttgatacgccagggatattcgacacagaggttcctaatgcggaaaccagcaaggagattattcgatgcatacttctgacctctccagggccacacgccctgcttctggtggtgcctctcggcaggtacactgaagaggagcataaagcaaccgagaaaatttag

SEQ ID NO: 119210 - DNA, 924 bp, synthetic construct
  misc_feature 1..924: note = Description of Artificial Sequence: Synthetic coding sequence
  source 1..924: mol_type = other DNA
atgggcggcttccaaagaggaaagtacggcactatggcagaaggcagaagtgaagataacctcagtgctaccccacctgcccttagaatcatcctcgtgggtaaaactggctgtgggaaatccgcaacaggtaacagcatcctgggccagcctgtctttgagtcgaagctccgggctcagtccgtgacgcgtacatgccaagtcaagactggtacttggaatggcagaaaggtcctggttgttgacacgccaagcatctttgagtcacaagcagacacacaggagctgtataaaaatattggagattgttacctcttgagtgctccaggaccacacgtgctcctcttggtgattcagttgggacggttcacagcgcaggacactgtcgccattaggaaagtcaaggaggtgttcggtactggcgccatgaggcacgtagttattctcttcactcacaaagaagacctgggcggccaagctcttgacgattatgtggctaataccgataactgtagtctcaaagaccttgtgcgggaatgcgagcgtaggtattgtgcatttaacaactggggctcagttgaggagcagcgacaacagcaggctgagctcctggctgtgattgagcgactgggccgcgagcgcgagggcagctttcattcgaatgatctctttctggatgcccagctccttcaacgcaccggggccggcgcctgccaagaagactatcgtcagtaccaggccaaggtcgagtggcaagtagagaagcataagcaggagcttcgggagaacgaatccaactgggcctacaaggccctgctgcgtgtaaaacatctaatgcttctgcactacgagatttttgtctttctgttgttatgtagtatattgttcttcataatttttctattcatattccactatatttag

SEQ ID NO: 119211 - DNA, 1032 bp, synthetic construct
  misc_feature 1..1032: note = Description of Artificial Sequence: Synthetic coding sequence
  source 1..1032: mol_type = other DNA
atggagctgagcgctcccgcccacggaagctcgctcactgcttctgcccagcctccgagcgtgacagccacactggaggaccgggcgcagcaaccctttcttgagaggatgggtgggttccagaggggtaagtacgggaccatggctgaagggcggtcagaagacaacctgtccgccacacctccagcgctacggatcattctggtgggaaaaacagggtgcgggaagtctgcgactggtaattccattctgggtcagccagttttcgaaagcaaattgagggctcagtcagtgaccagaacctgtcaggttaaaacaggaacatggaacgggcggaaagtccttgtggttgacacacccagtattttcgagtctcaggctgacacacaagaactttacaagaatatcggagactgttacctgttgtctgctcctggccctcatgtcttactgctggtgattcaactgggcaggtttacagcacaggacacagtcgcaatccgaaaggttaaagaagtcttcgggaccggggccatgaggcatgtcgtgatcctgttcacccacaaagaggaccttggcggccaagctttagatgactacgtagccaatactgataactgtagcttgaaagaccttgtgagggaatgtgaacgtcggtattgcgccttcaataactggggaagcgtggaggaacagaggcagcaacaggctgaattgttggcagtcatagaacggctggggagggagagagaaggctcatttcactcgaatgacctcttccttgatgctcagctactgcagcgaaccggcgcaggggcttgtcaggaggattataggcagtaccaggcaaaagtagaatggcaggtggaaaaacataaacaagaactaagagagaatgagtccaactgggcatacaaagctttgctgagagtgaagcatctgatgcttttacactatgaaatctttgtgtttctgctgctgtgcagcattctcttctttatcatcttcctgtttatcttccattacatttag

SEQ ID NO: 119212 - DNA, 879 bp, synthetic construct
  misc_feature 1..879: note = Description of Artificial Sequence: Synthetic coding sequence
  source 1..879: mol_type = other DNA
atggaggaggaggagtacgaacagatcccacaggaaaaccccccagaggaactctcccaagatcccgtgctggagctgtctgggggattacgagagaaggaacagaagacccctcggcggttacgactaatcctgatggggaagacagggagcggaaaatcagcaaccggtaacagtatcctcggcagggacgtctttgagagcaaactgagcaccagacccgtcaccaaaaccagtcagcggaggtcacgcgaatgggccggtaaggaactggaagtcatagatacccccaacatcttgtctccacaggtttcacctgaggtggctgatgctatttgtcaggccatagtgctttcagcccccggaccccatgctgtgttgctggtgactcagctcgggcgctttaccgacgaagatcaacaggtggtccgtaggctccaagaggtttttggcgtgggagttctaggacacactatcttagtgttcactcgtaaagaggacctcgccggcggatctctcgaagattacgtgcgcgagacaaataaccaggcccttgcttggctggatgtaactctggcccggcgccactgcggtttcaataaccgggcccagggcgaggagcaggaggcccaattaagggagctcatggaaaaagtagaggctattatgtgggaaaatgagggagattattacagcaacaaagcctaccagtacacacagcagaacttccgcctcaaagagcttcaggaaagacaggtatcgcaggggcagggctctgaagacgtacctggtgaggaatcttggctggaaggcttatcacagatacagaaggagagtgaagaggctcacaggtgcctgctgggcaaggccgacctgtag

SEQ ID NO: 119213 - DNA, 1062 bp, synthetic construct
  misc_feature 1..1062: note = Description of Artificial Sequence: Synthetic coding sequence
  source 1..1062: mol_type = other DNA
aaaccttggtactgggtatcctggtgtagcataggccaggtgagtctgttcttcttggggtctgcactcgccctgggagaaaacgtccagccccacctgcaaggttgcgggccccgcatggttgcccaacgttggttccagggaagatgctggagcttcactatctgcccatgctctctcggagtccaccccgaagctcccggcgatgacaagatggggtatatgggaccgtatcccagctccctttgttttctgtggatttttttggggctgcgcgagaaggagcagaaaacacctcggcgactgcgcttaatcctgatggggaagacgggaagcggaaaatccgctaccgggaattcgatcctgggccgggacgttttcgaaagcaagctgtccaccagaccggtaaccaagactagtcagcgccgatccagagagtgggccggtaaggaactggaggtcatcgacacaccaaacatcctaagcccacaggtttctccagaggttgctgacgccatttgtcaggcaattgtactgagcgctccaggtccccacgccgtgctgctggtgacacagctgggccgcttcactgatgaagatcagcaggtggtgcgacgcctgcaagaagtattcggtgttggcgtgttggggcatacaatcttagtatttacaagaaaggaggacttggccggcggatctttagaagattatgtccgagaaacaaataaccaggcactcgcctggctggatgtgacgctggcccggcggcactgcggtttcaataatcgcgcgcagggggaagagcaagaagcccaattaagggagcttatggagaaagtggaggctatcatgtgggagaacgaaggtgattattattccaacaaagcttaccagtacactcagcaaaatttccggctcaaagagctgcaggaaagacaagtgtcacagggacagggcagcgaggacgtcccaggcgaagagtcatggctagaagggctgtctcaaatccagaaggaaagcgaagaggcacaccgctgcctccttgggaaggcagacctttag

SEQ ID NO: 119214 - DNA, 189 bp, synthetic construct
  misc_feature 1..189: note = Description of Artificial Sequence: Synthetic coding sequence
  source 1..189: mol_type = other DNA
atggaagaggaggagtatgaacaaattccccaagaaaatccccccgaggagctgtcgcaggatcctgtcctcgagctgtctggcggccttgccagggggggtaggaggtacctgccaagccataggctcattaggccacgcgcccctagaagggcgcccggcgacacaactggacccgtacacggatag

SEQ ID NO: 119215 - DNA, 1266 bp, synthetic construct
  misc_feature 1..1266: note = Description of Artificial Sequence: Synthetic coding sequence
  source 1..1266: mol_type = other DNA
atgcgttggatcctttttataggtgcactcataggctccagtatctgcgggcaggaaaaattttttggcgaccaggtgcttcgcataaacgttcgcaatggtgatgaaatttctaagctgtcccagttagtgaactcaaataatctgaaattgaacttctggaagtccccttcatcctttaaccggcccgtagacgtacttgtcccatcagtttcgctgcaggcttttaaaagcttcctgagaagtcagggactggaatacgccgtgacgattgaagatctgcaggctttgctcgataatgaggatgatgaaatgcaacacaatgaggggcaggaaagaagctcaaataacttcaactacggggcataccattcacttgaagctatctatcacgaaatggataatatagccgccgattttcccgacctcgctcggcgcgtcaaaatcggtcattctttcgagaatcggcctatgtacgtgttgaagttttccacggggaagggggtgagaaggccagccgtgtggctgaacgcagggatacactcacgggaatggatctctcaggccacggccatctggaccgcgcgaaaaatcgtctccgattaccagcgcgacccagctatcaccagcatactggagaaaatggacattttcctgctgcctgttgcaaacccagacggttatgtctatacacagacgcagaatcgattgtggcgtaaaactcgttccaggaatccaggaagctcatgtataggagccgaccccaaccgtaattggaacgccagctttgctggcaagggggcctctgacaacccatgctcggaggtatatcacgggccccatgccaactcagaggtcgaggtgaagtcagtcgtcgacttcatccagaaacatggcaacttcaaggggttcatagatctgcacagttactctcaactgctgatgtatccctacggctatagcgtaaaaaaggcccccgatgctgaagaactcgacaaggtcgcccgcctagcagcgaaggccctggcctctgtgagcggaacagaataccaagtgggccccacgtgcacaacagtatatccagcttctggaagttccatcgactgggcctatgacaatggaattaaattcgcctttaccttcgagttacgggacactggcacctatggctttcttctccctgctaaccagatcatcccaacagccgaggagacctggcttggtctcaagacaataatggaacacgtgcgggacaatttgtactag

SEQ ID NO: 119216 - DNA, 927 bp, synthetic construct
  misc_feature 1..927: note = Description of Artificial Sequence: Synthetic coding sequence
  source 1..927: mol_type = other DNA
atggttcattgcagctgtgtgctgttccgcaagtacggtaacttcatcgacaaactccggctctttacgaggggggggagcggtggaatggggtatcctcggcttggaggggaagggggaaaaggcggcgacgtatgggtcgtagcccagaatcgcatgaccctaaaacagcttaaggaccggtatccaaggaaacgcttcgttgctggcgtgggcgcaaacagcaaatttcctaacgcaggaaagtcctcattgttatcttgtgtgtcccatgctaaaccagccattgctgactacgcttttaccacacttaagcccgagctcggcaaaatcatgtactcagacttcaaacaaatctctgtggccgacctgcccggcctgatcgaaggggcacacatgaacaaaggcatgggccacaaatttctgaagcatatcgaaagaacccgtcagttattatttgtggtagatataagcggattccaattgtctagtcacactcagtataggaccgcatttgagaccatcatccttctcaccaaggaactggaactctataaagaagagctccagacaaaaccagccttactggctgttaacaagatggatcttccagatgctcaggacaaatttcacgagttgatgagccaactgcagaacccaaaagattttctacacctgttcgaaaagaatatgatccccgaaagaacagttgagtttcagcacatcatacccatttccgccgtgaccggggagggaattgaggagctcaagaactgcatcaggaagagtctggacgaacaagctaatcaggagaacgatgccttgcataaaaaacagcttctgaatctctggatcagcgatacaatgtcttctacagaacccccaagcaagcatgccgtgactaccagtaaaatggatattatttag

SEQ ID NO: 119217 - DNA, 711 bp, synthetic construct
  misc_feature 1..711: note = Description of Artificial Sequence: Synthetic coding sequence
  source 1..711: mol_type = other DNA
atgtccgcaccttcagccactccaatcttcgctcccggagaaaattgctcaccagcctggggtgctgctccggctgcttacgatgcggccgacacccacctgaggatcctggggaagcccgtgatggaacgatgggagacaccatacatgcacgcacttgcagctgctgccagtagcaaaggaggacgggtgctggaagtcggattcggaatggcgattgccgctagcaaagtgcaggaagcgccgatcgacgagcattggattatagaatgcaacgatggagtcttccagcggcttcgagactgggctcctagacagacacacaaggttatcccgctcaaaggtctgtgggaggacgttgcacccaccttgcctgacggccacttcgatggtattctttacgatacctaccccctgagcgaagaaacatggcacacacatcagttcaacttcatcaagaaccatgcgttcaggttgttgaagcccggaggtgtgctcacctattgcaatttgacctcctggggagaactaatgaaaagcaagtattctgacattactataatgtttgaggagacccaggtgccagctttgctggaagctggttttcgtcgggaaaacatcagaaccgaggttatggctctcgtgcccccagctgactgcaggtactacgctttcccacagatgattacccctcttgttaccaaggggtag

SEQ ID NO: 119218 - DNA, 810 bp, synthetic construct
  misc_feature 1..810: note = Description of Artificial Sequence: Synthetic coding sequence
  source 1..810: mol_type = other DNA
atgagcgcgccatcggccactcccatctttgctcccggtgaaaattgctcgcctgcgtggggggcggcccccgccgcatatgatgcagccgatacacacctgcggatcctcggcaagcccgtgatggagagatgggagaccccatatatgcatgcactagccgccgcagcctcatcaaaagggggtcgcgtgttggaggtgggctttgggatggcgattgcagccagcaaagttcaggaagcccctattgacgaacactggataattgaatgtaatgacggcgtgttccagcgacttcgcgactgggccccacgacagacccacaaagtgatcccactgaagggcctgtgggaagatgtcgcgcccactctgcccgatgggcattttgacggtattttgtatgacacctacccgctgtctgaggaaacgtggcacacacatcaatttaacttcattaaaaaccacgccttcagactgctaaagcccggaggggtgctcacgtattgtaacctcactagttggggagaactgatgaagtctaaatacagcgacattacaataatgttcgaagtgaggcctccagaagtgccccacgggtcgcccggctcagacttgggatgggggtgggagggcgctgcaggggctacactgttgcccggagaaggcccctttcttacaccttgggtcggttggaccgtgttagtgcacttggagatcaaggtactgtgcctggcccaatggctgccgggggcagtggctcaggtctataacccttcaacagtggagggaaggggtggccagatcgcttag

SEQ ID NO: 119219 - DNA, 1416 bp, synthetic construct
  misc_feature 1..1416: note = Description of Artificial Sequence: Synthetic coding sequence
  source 1..1416: mol_type = other DNA
atgtgtgccgctcagatgccacctctggcacatattttcagaggcacatttgttcacagcacgtggacctgcccaatggaggttctgagagatcatctccttggcgtgagtgacagcgggaagatcgtcttcctcgaagaagcctcacagcaagaaaaattggcaaaggaatggtgttttaaaccctgtgaaatccgcgagctgtcccatcatgaatttttcatgcctgggctcgtcgacactcacatccatgcttcccagtatagcttcgcgggtagctcgatagatctgcctctgctggaatggttgactaagtatacttttcctgcggagcacaggtttcagaacatagacttcgcagaagaggtttacactcgtgtcgtgcggcggactctgaagaacggcaccacaacagcgtgctacttcgcaactattcataccgactcaagcctgttactggccgacatcaccgataaatttggccagagggcctttgtgggcaaggtgtgcatggacctaaacgatacattccccgaatacaaggaaacaactgaagagtctataaaggaaacagagcgctttgtgtccgaaatgcttcagaaaaactactccagagtgaagcctatcgtcaccccgaggttctccctctcttgctctgaaacgctgatgggcgaactgggcaacatagccaagaccagagatcttcacatccagtcccacattagcgagaaccgcgatgaggtggaggctgtcaaaaacttatacccgagttacaagaattacacctcagtctacgataagaacaatctgctcaccaacaagacagtgatggcacacgggtgctaccttagcgccgaggaacttaacgtgttccacgagcgcggggcatccatcgcccactgcccgaattctaacctgagcttgtcgtcggggttcctgaacgtgctggaggtacttaagcacgaggtgaagatcggattaggcacagacgtggccggcgggtacagctacagtatgttagacgccataagacgggctgtgatggtgagtaacatcctgttgataaacaaagtcaacgaaaagtctttaacactgaaggaggtgtttaggctagctaccctggggggctcgcaggcacttggtctggacggtgaaatagggaacttcgaagtcgggaaagagttcgacgccatcttgatcaaccccaaagcttccgactcaccgatcgacctgttctacggcgatttcttcggtgacatcagcgaggcggtgattcaaaagttcctctatctgggcgatgacaggaacatcgaggaagtttatgtcggcggaaagcaagtcgttcctttctcatcgtctgtgaaggagaccattcacctgcctgccagttcaccacacccaccacccttcccctag

SEQ ID NO: 119220 - DNA, 1365 bp, synthetic construct
  misc_feature 1..1365: note = Description of Artificial Sequence: Synthetic coding sequence
  source 1..1365: mol_type = other DNA
atgtgtgcagcacagatgccgcctttggcccacatattccgggggactttcgtgcactccacatggacttgtccaatggaagtattgagggatcacctcctcggggtgagcgactctggaaaaattgtgttcctggaggaagcctcccaacaggagaagttagccaaggaatggtgttttaagccctgtgaaatccgagagcttagtcatcacgagtttttcatgccaggtctggttgatacccatattcacgccagccagtactccttcgccggaagttccatcgatctccccttgttagaatggctgacaaagtatacctttcctgcagaacatcgcttccagaacatagatttcgccgaagaggtctacaccagagtggtgcgccgcacactgaaaaatgggacaactactgcttgctactttgcaacaatccacacagatagttcactcctgctggcagatattacagataaatttgggcagcgggcctttgtcggaaaagtttgcatggacctgaatgacaccttcccagaatataaagaaaccacagaggagtctattaaagagaccgagaggttcgtgagcgaaatgcttcaaaaaaattattcaagggtcaaacccatcgtgaccccgcgttttagcctgtcttgctcagaaactttaatgggggagttggggaatatagccaagacccgggacctccacatccagtcacatatatccgagaatcgggacgaagtggaagcagtgaagaacctgtatccttcttacaagaattataccagtgtttacgacaagaataacctgctcacaaacaagactgtaatggcccatgggtgctatttgtctgcggaagagttaaatgttttccatgagcgcggcgcttctattgcacactgcccgaactctaacctgagcctcagttctgggtttctgaatgttttagaagtgctcaagcacgaagtcaagattggtctcggcacagatgtggctgggggttacagttacagtatgttggacgccataagacgcgccgtgatggttagtaatattctcctgattaacaaagtgaatgaaaagagcctgactctgaaagaagtattccggcttgccacgcttggtggcagccaggcactgggcctggacggggagatcgggaatttcgaggtgggcaaggaatttgacgccattcttatcaatcccaaggcttctgactctcctatagacctcttttacggcgattttttcggcgatatcagcgaggcagtgatccagaagttcttgtatttaggcgacgaccggaacattgaggaggtttatgtgggggggaagcaagtggtccctttttctagctccgtatag

SEQ ID NO: 119221 - DNA, 1182 bp, synthetic construct
  misc_feature 1..1182: note = Description of Artificial Sequence: Synthetic coding sequence
  source 1..1182: mol_type = other DNA
atgtttttagaggaggcatctcagcaggagaagcttgccaaggagtggtgcttcaaaccgtgcgaaattcgcgagctctcccatcacgaattttttatgcctggtctggttgatacccatattcacgcctctcagtattcgtttgcagggtcttctattgatctgccactgttggagtggttgacaaagtacacgttccccgcagaacacaggttccagaatattgactttgccgaggaggtatacactcgagtcgtaaggaggaccctcaaaaacggcactaccacagcttgctactttgccaccattcacacagattctagtttgctgctggccgacattactgataagtttggccagagagcatttgttggtaaagtgtgcatggatctcaacgacactttcccagaatataaagaaactaccgaagaaagcatcaaagagaccgaacgcttcgtgtccgagatgctccagaaaaactcccatatttcagagaaccgggatgaagtagaggctgtgaaaaacctctatccctcctataaaaattacacatcagtgtacgacaaaaacaacctccttacaaacaagactgttatggcccacggctgctacctatctgccgaagagctgaacgtatttcatgagagaggggcctcgatcgcccattgccctaactctaatctgtccctcagttccgggtttctcaacgtacttgaggttctcaagcacgaagtcaaaataggccttggaaccgacgtagctggcggatatagttatagcatgctggacgcaattcgaagggccgtcatggtttcaaacattctattaattaacaaagttaacgaaaagtcacttaccttgaaggaagtttttcgactagccacccttggcggaagtcaagcccttgggctggatggggaaatcggcaattttgaggtgggtaaggagtttgacgcaattctcataaaccccaaggctagcgacagtcccattgaccttttttatggagattttttcggcgacatctctgaagctgtcatccagaaattcttgtacctgggagacgacagaaacattgaggaggtttacgtgggagggaaacaagtcgtgccattttcctccagcgtgaaggagacaatccacctccccgcttcttcgccacacccaccaccatttccatag

SEQ ID NO: 119222 - DNA, 1233 bp, synthetic construct
  misc_feature 1..1233: note = Description of Artificial Sequence: Synthetic coding sequence
  source 1..1233: mol_type = other DNA
atggaagtacttcgggaccatctgctgggagtgagcgatagcggaaagatcgtttttctggaggaagcctcccagcaggaaaaactggcaaaagagtggtgcttcaagccctgcgaaatccgcgaactttctcatcacgaattttttatgcctgggctggtggatacacacatacacgcaagccagtactcgttcgctggatcaagtattgatctgcctttgctagaatggctcacgaaatatacgttcccagcagaacatagattccagaatatcgactttgcagaggaagtgtacacacgggtggtgagacgcacgctcaaaaacggaaccactaccgcctgctatttcgctaccatccataccgactctagcttgctgctcgccgacataacagacaaatttgggcagcgcgctttcgtagggaaggtgtgtatggacctgaatgatacgttccccgaatacaaggagaccactgaggaatcgataaaagagactgagagattcgtgagcgagatgcttcagaagaactcccacatttctgagaatcgagatgaggtagaggctgtaaaaaacctgtaccctagctataagaactacacttccgtttatgacaagaacaaccttcttacgaacaagacggttatggcccacgggtgttacctctccgccgaagaactaaacgttttccacgagagaggagcctctatcgcgcactgcccgaattcaaacctcagcctctcctccggcttcttaaatgttctggaagttttaaagcacgaagtcaagatcggtctgggtacagatgtggctggggggtattcctactccatgctggacgccatccgcagagccgttatggtgtcgaatatcctgctgatcaataaggtaaacgaaaaaagtctgaccctgaaggaagtgtttcggttagccaccctcggcggttcccaggcattaggcctcgatggggaaattggcaactttgaggtcggcaaggagtttgacgccattctgatcaaccccaaagcatctgattctccaatagatctattttatggtgatttctttggggatatatcagaggcggtcatccagaaattcctctatctgggcgatgacaggaacatagaggaagtctacgtagggggcaagcaagtggtgccattcagctcgtcggtgaaggagaccatacatctgcccgcttcctccccccatcctcccccattcccatag

SEQ ID NO: 119223 - DNA, 588 bp, synthetic construct
  misc_feature 1..588: note = Description of Artificial Sequence: Synthetic coding sequence
  source 1..588: mol_type = other DNA
atgactttgttccaaaacacgcggcgtcccctgaggaaccggtcccggaagcttcgtgattgtcattccgtaacccaggctggggtgcagtggcgtgacctgtcaagtctaaagcctcctcctcctgtattcaaaagattttcatgcctgtccctcccaagcagttgggactatcgctttgtaagcgagatgctgcagaaaaactacagccgcgttaaaccgatcgtgactccccgcttcagtctttcctgctcagagacactgatgggcgaattagggaatatagccaagactcgagaccttcatatccagtcccatatctctgaaaatcgcgatgaagtggaggctgttaagaacctgtacccttcctataaaaattacacctctgtttatgataagaacaatcttctgactaataaaacagtcatggcccacgggtgctatctgagcgctgaggagctcaacgtttttcacgagcggggagcctccatcgcccactgtcctaattccaatttgagtcttagctctggcttcctcaatgtgcttgaggtcctgaagcatgaagtgaaaatcggtttgggtacatag

SEQ ID NO: 119224 - DNA, 540 bp, synthetic construct
  misc_feature 1..540: note = Description of Artificial Sequence: Synthetic coding sequence
  source 1..540: mol_type = other DNA
gaaaggggcgcctccattgcacactgccctaatagcaatctttccctgtccagtggttttcttaacgttctcgaggtgctgaaacatgaagtcaagatagggttgggaacagatgtggctggtggatactcctactctatgctcgacgccataaggagagcggtgatggtgtctaatatattactgatcaacaaagtgaacgagaaaagcctgacactgaaagaagtttttcgcctggcgacactgggcggctcacaggccttgggcctcgatggagagatcggcaattttgaggtgggcaaagaatttgatgctattctcataaatcccaaggcctctgatagcccaattgacctgttctacggggacttttttggggacatatctgaggctgtaatccaaaagtttctgtacttgggggatgaccgtaacatcgaagaggtctacgtaggaggtaaacaggtggtgcctttctctagcagtgtgaaagaaaccattcacttaccggcaagctccccccatcccccgccctttccatag

SEQ ID NO: 119225 - DNA, 1365 bp, synthetic construct
  misc_feature 1..1365: note = Description of Artificial Sequence: Synthetic coding sequence
  source 1..1365: mol_type = other DNA
atgtgcgcggctcaaatgcctcctctggctcacatatttcggggcactttcgttcactctacctggacctgtcctatggaggtattgagggatcatctgttaggagttagtgattccggcaagatcgtttttcttgaagaagcctcacagcaggaaaagttggccaaggagtggtgcttcaaaccctgcgagatacgggaactttcccatcacgagttttttatgcccgggttagtcgatacacatattcacgcgtcccagtactcattcgctgggagttcaattgacctgcctctccttgagtggctgactaaatatacattccctgcagaacaccgattccagaacatcgacttcgctgaggaggtatataccagggtggtgaggcgcaccctaaagaatggaaccaccacagcgtgttactttgccactatccatacagacagctcacttctcctggcagacatcaccgataaatttgggcagagagcatttgtgggtaaagtgtgtatggatttaaacgacacgttccccgaatacaaagaaacaactgaagagtcaatcaaagagaccgaaagattcgtgtctgagatgctacagaaaaattattcaagggtgaagcctattgtcaccccaaggtttagcctgtcctgcagcgaaaccctgatgggagaactcggaaatattgccaaaaccagagatctgcacatccaatcacacattagtgagaaccgtgacgaagttgaggccgtgaagaatctttatcccagctacaagaattatacaagtgtgtatgacaagaataatctgctgactaacaaaactgttatggctcacgggtgttacttgtctgccgaggagttgaatgtgtttcatgagcggggcgctagtatagcccattgcccaaattcaaatttaagcttatcatctggcttcctaaacgtgctagaggtgctcaaacacgaagtgaagatcggacttgggacggacgtggccggcggctactcctactccatgctggacgcaatcagacgggcggtaatggtgagcaatatcctgctgatcaacaaagtaaacgagaagtccttgacacttaaagaggtctttcgactcgccacacttggcggtagtcaagccctgggtcttgacggggagatcgggaacttcgaagtgggcaaagaattcgatgccatcctgattaaccccaaagcctctgactcccctatcgacctgttctacggcgacttttttggcgatattagcgaggcggttattcagaagtttctctacttaggagacgacagaaatattgaagaagtctatgtggggggcaaacaggtagtgcctttcagctccagtgtatag

SEQ ID NO: 119226 - DNA, 1143 bp, synthetic construct
  misc_feature 1..1143: note = Description of Artificial Sequence: Synthetic coding sequence
  source 1..1143: mol_type = other DNA
atgcccggattagtggatactcatattcatgcaagtcagtattcttttgcgggatcttcaatcgacctccctctgctcgagtggctgacaaagtatacatttcctgcagagcaccggtttcagaacattgactttgccgaggaagtgtatactagagtggtgaggcgcaccttaaagaatggcaccaccacggcttgttacttcgctaccattcataccgattccagtctactgctcgccgatattaccgacaaatttggtcagagggcgtttgtgggaaaggtctgtatggatctgaacgacaccttccccgagtataaagagaccaccgaggagtccatcaaggaaacagagagattcgtgtctgagatgctccagaagaattatagtagagtgaaacccatagtgaccccgcgcttttctctgtcttgctccgaaaccttaatgggagaattgggcaacatagcaaagacaagagacctccacattcagagtcacatctccgagaaccgagacgaagtggaagcggtgaagaacttatatccttcatataaaaattacacgtctgtgtatgacaagaacaacttgcttacaaacaagacagtaatggcccatggctgctatttatcagcagaggaactaaacgtcttccacgagcgaggcgcgtctatcgcacattgtccaaacagcaacctgtccttaagcagcgggttcctcaatgtgctggaggtgctgaaacacgaagtaaagattggactgggaaccgacgtcgccggcggatactcttactcaatgctcgatgctattagaagggctgtcatggtgagcaacatcctgttgattaataaggttaacgaaaagtctttaaccctaaaggaagtattcagactcgctactttgggcggctcacaagccctggggctcgatggcgaaatcggtaactttgaagtgggcaaggagtttgatgcgatcctcatcaacccaaaagcctctgattctcctatcgatctcttctatggcgacttttttggtgatatcagcgaggcagttattcagaaattcctctatctgggagatgaccgaaatatagaagaagtatatgttgggggaaagcaggtggtgccattttccagctctgtttag

SEQ ID NO: 119227 - DNA, 2082 bp, synthetic construct
  misc_feature 1..2082: note = Description of Artificial Sequence: Synthetic coding sequence
  source 1..2082: mol_type = other DNA
atggccctgtgcaacggagattcgaaactagaaaacgccgggggcgacctgaaagatggtcaccaccactacgaaggagcggtggtgatcctggatgccggtgcccagtatgggaaggtgatcgacaggcgcgtgcgcgagctcttcgtgcagtcagaaatctttcccctggaaacaccagcctttgccatcaaggaacaaggattccgggctatcatcatcagtggcgggcccaactccgtgtatgccgaagacgcgccctggtttgatccagccatatttacaattggcaagcccgtcctagggatctgttacgggatgcagatgatgaacaaggtctttggaggtaccgtgcacaagaagagcgtcagagaagacggggtttttaacatttctgtggacaacacctgcagtctattccgcggccttcagaaggaagaagtcgtgttgctgacccacggtgacagcgtggacaaagttgcagacggatttaaagtggttgctcgctccgggaacatagttgccggaatcgctaatgaaagcaaaaaactgtacggggctcagttccatccagaggtggggttaaccgaaaacggaaaggtcatcttgaagaatttcctatatgatatcgcgggctgtagtgggacttttacagttcagaatagggagctggaatgtatccgcgagatcaaggaacgggtcggaacatctaaggtgttggtgttgctctcagggggggtggactccaccgtctgtacggctctgctcaatcgcgcacttaaccaggaacaggtgatcgctgttcacattgataatgggttcatgcgcaagagggagagtcaatctgttgaggaagccctgaagaagctgggcattcaggtgaaggtgattaatgcagcacatagcttctataatggtactaccaccttgcccatttcagatgaggacagaaccccccgtaaacgaatttccaagacactcaacatgactaccagcccagaagagaagcggaagataattggggacacatttgtgaagatcgcgaacgaggtgatcggagagatgaatttaaagccggaagaggtgttcctagctcagggaaccctacgcccggacctcatcgaaagtgcctcactggtcgcttccggcaaagccgagctgataaagacacaccacaatgacactgagctgattcgtaagctccgagaagaaggaaaagtcatcgaacccttaaaagactttcacaaagatgaagttaggatcctagggcgggagctcggactgccagaggagttggtttcaaggcacccgtttcccgggcctggcctggccattagggtgatctgcgctgaggagccatacatatgcaaggacttcccggaaacaaacaacatcttgaaaattgtagcagatttttccgcgtccgtgaaaaagcctcacactttgctgcaacgcgttaaggcctgtacgacagaggaggaccaagagaagttaatgcagattacaagcctccactccctgaacgcttttctattgccaattaaaactgtgggagtgcaaggtgattgtagatcctactcctacgtttgcggcatttccagtaaagatgaacctgactgggaatctttaatattcttggccaggttaatcccaagaatgtgtcacaatgtgaatcgggtcgtgtatatctttggcccgcctgtgaaagaaccccccacagacgtgaccccaacatttttgacaacaggcgtactgagcactctgcgacaggccgattttgaggcccacaatatcctcagagagtccggctatgcaggtaagatttcacagatgccggtaattttaaccccactgcacttcgacagagatcccctgcagaagcagccatcctgccagcggtccgtagtgatcagaacttttattacatcagattttatgaccggaatacctgccacccccgggaacgagatcccagtggaggtagtactgaagatggtgactgagatcaaaaaaattcctggtatctccaggattatgtacgatctcactagcaagccgcccggcactactgaatgggagtag

SEQ ID NO: 119228 - DNA, 1929 bp, synthetic construct
  misc_feature 1..1929: note = Description of Artificial Sequence: Synthetic coding sequence
  source 1..1929: mol_type = other DNA
atgctcgaagagacgctacgcatggccactaccacaattaaggaacaaggcttccgcgctatcattattagcggcggccctaatagcgtctatgctgaggacgccccttggttcgatcccgctattttcacaatcggtaagcctgtcctgggcatttgctatggaatgcaaatgatgaataaggtgttcgggggaacagtgcacaaaaagtctgtccgagaagacggtgtcttcaacatctcagtcgacaatacttgtagcctgttccgggggctccagaaggaagaagtggtactgctgactcacggagattctgtggacaaagtagcagatggctttaaggtcgtggctcggagcgggaacattgtagctggcatcgccaatgagagcaagaaactttatggtgctcagtttcacccagaggtggggttgacagagaacgggaaggtcattctgaagaacttcctctacgacattgctggctgctctggcaccttcaccgtccagaatcgcgagctggagtgcatcagggaaatcaaagagagggtgggaacctcaaaggtgctggtgctcctgagtggtggcgtggattctaccgtatgtacagccctgctgaacagagccctgaatcaggagcaggttatagctgtccatattgataacggcttcatgcgaaagagagagagtcagagcgttgaggaagccctgaagaaactcgggatccaggtgaaagtgataaatgctgcccatagtttctacaatggaacaacaacactgcccatcagcgatgaagaccgaaccccccggaagcgcatcagcaaaaccctgaacatgactacatctcccgaagagaagcggaagattatcggcgatacattcgtgaagattgcgaacgaggtcatcggcgagatgaatctcaagcccgaagaggtctttttggcccagggcaccttacgtcctgatctcatagagagcgcatctctcgtcgccagcgggaaagcagaactgatcaaaactcatcacaacgatactgaattgattaggaagttaagagaagagggaaaagtgatcgagcccctgaaggattttcacaaagacgaggttcgaattctcggcagagagctcggacttcccgaggaactcgtcagccgtcaccccttccctgggcccgggctagccattcgggtgatctgtgctgaagaaccgtacatctgtaaggacttccccgaaaccaataacatccttaagattgtggccgacttctcagcctcggtgaaaaagccacataccttgcttcagagagtcaaggcttgcactacggaggaagatcaggagaaactgatgcaaataactagccttcactcgctgaatgcttttctactccctattaagacagtgggtgttcaaggcgactgccgatcgtactcttacgtgtgcggtattagctcgaaggatgaaccagattgggagtcactcatctttttggcaagactgatcccccgcatgtgccataatgtgaatcgggtagtttatatatttggaccacctgtgaaggaaccacctaccgatgttacaccaacattcctgaccacaggtgtgctgtccacgttaaggcaggctgatttcgaagcccacaacatactgagggaaagcgggtacgcaggaaagatttcccagatgccagtgattttgacccccctacacttcgatcgcgaccctctccaaaaacagcctagttgtcagagatcagtcgtgataagaactttcatcacgagcgactttatgacaggtatcccggccaccccaggcaatgaaatccctgtggaggtcgtgttaaagatggtgactgaaatcaagaaaatccccggaatctcccggattatgtatgacctaacgagcaaacccccaggaaccaccgagtgggagtag

SEQ ID NO: 119229 - DNA, 2082 bp, synthetic construct
  misc_feature 1..2082: note = Description of Artificial Sequence: Synthetic coding sequence
  source 1..2082: mol_type = other DNA
atggcgttgtgcaacggggactccaagcttgagaacgctggcggagaccttaaggacgggcaccatcactacgaaggcgcggtggtcatcctggatgccggcgcacagtacggcaaggtgatcgatagacgggtccgggagcttttcgtccagtctgagatcttcccgctagaaacaccagctttcgctatcaaggaacagggctttcgggccatcatcatctcaggtgggccaaacagtgtttatgcggaggacgccccatggttcgaccccgcaatttttaccataggaaagcctgttctgggcatctgctacgggatgcaaatgatgaataaggtcttcggtggcaccgtacataaaaaaagcgttcgtgaagatggagttttcaacatctctgtagacaacacctgttccctcttcaggggactgcagaaggaggaggtggtgctccttacacacggcgattcagtggacaaggttgccgacggcttcaaagttgtggccagatctggtaacatagtggcgggcatcgcaaatgaaagcaagaagctgtatggcgcacaattccatcccgaggttggtctcactgaaaacggaaaggtcattttgaaaaattttttatacgacatcgctggatgcagcggaaccttcacagtccagaatagagagcttgagtgcatcagggagatcaaggaacgggtggggacgagtaaggtgctggtgctgctttctggcggcgtcgattctaccgtctgcaccgcgctgctgaatcgggctctcaatcaggaacaggtgatagcagtccacatcgacaacgggttcatgcgcaagcgtgagagccagagcgtagaagaggccctgaaaaaactcggtatccaggtaaaggtcatcaacgccgcccacagcttttacaatggaacaacaacccttcctatttccgacgaagatcgaaccccccgaaaacggatatctaaaaccctgaacatgaccacctcgccggaagaaaagcgcaaaattattggagacacgttcgtcaaaatagccaacgaagtgattggcgaaatgaacctcaaaccagaagaggtgtttctagctcagggcacgctgcgccccgacctgatagagagtgctagcctggtcgcctctgggaaagccgagttgatcaaaacacaccataacgatacagagcttatccgcaagctgagggaggaggggaaggtaatagagccactcaaagacttccataaggacgaagtgcgtatcttgggacgggaattaggccttcccgaggagctggtgtcacgtcacccctttccaggtcccggcttggctatcagggtgatctgcgcagaggagccatacatctgcaaagatttccctgaaacaaataacatcctgaaaatagttgccgacttttccgccagtgtcaagaaaccgcacaccctgctgcagagagtgaaagcatgcacgactgaggaggatcaggagaaattgatgcagataacctccctgcactctctgaatgcctttcttttgccgattaagaccgttggtgtgcagggcgactgccgaagctatagctacgtatgtggtatttcctcaaaagacgagccagattgggagagcctcatcttcttagcaagactcatccctaggatgtgccacaatgtgaacagagtggtttatatctttgggcctcccgtaaaggaaccccctactgacgtcaccccaacttttctgaccactggtgtgctcagtaccctacggcaggctgactttgaggcgcacaacattttgcgagaaagcggctacgccggaaagatttctcagatgcccgtaatactgactccccttcacttcgaccgggaccctttgcaaaagcagccatcctgccagagaagcgtcgtcattcgcacgttcattacatctgacttcatgaccggtattcccgccactcccggaaacgaaatacctgtcgaagtggtgctgaaaatggtcaccgaaattaaaaaaatcccagggatttccagaataatgtacgatctgacttccaagcctcccggaactacagaatgggagtag

SEQ ID NO: 119230 - DNA, 1146 bp, synthetic construct
  misc_feature 1..1146: note = Description of Artificial Sequence: Synthetic coding sequence
  source 1..1146: mol_type = other DNA
atgagcggagtcgtccggactctgagtcggtgcctgttgccagccgaggctggcggagccagagaaagaagagcaggtagcggtgctagggacgccgagcgagaagcgaggcgacgctctcgggatatcgacgccctgctggcgcgagaacgccgagcagtgcgacgcttagtcaagatactattactgggagccggagaaagtggtaagtcaacttttctgaagcagatgcgtatcattcacggcagggagttcgatcagaaggcattgcttgaatttcgtgacacgatctttgacaacatcctgaaggggtctcgtgtattggtggatgcccgggataaacttggtatcccatggcagtatagtgagaatgagaaacacggcatgttcctgatggcatttgagaacaaggccggtctccccgtggagcctgcaactttccagttgtacgtgcctgcactttcagcactttggagggacagcggaatccgcgaagctttctcccggaggtccgagtttcagttaggcgagtcagtgaagtactttctggacaacttggacagaatcggccagcttaactactttccaagcaaacaggatatcctcctggcccggaaggcaaccaaaggaattgtcgaacacgattttgtcattaagaaaattccattcaagatggtggacgtaggaggacagcgatcccagcgccaaaagtggttccagtgctttgacgggatcacttcaattctgttcatggtcagttcttcggagtatgaccaggttctgatggaagaccgtaggactaacagactggtggagagcatgaatattttcgaaaccatagtgaataacaaactctttttcaacgtctcaatcatcctttttctgaacaaaatggacctgcttgttgaaaaggtgaagaccgtatcaattaagaagcacttcccagactttcgaggtgatcctcaccggctggaggatgtccaaaggtatcttgtgcagtgcttcgatcgcaagcgaaggaatcgcagcaagcctctatttcatcactttaccaccgctatagatacggagaatgtgcgcttcgtctttcatgcagtcaaggacacaatcctgcaagaaaacctgaaagacatcatgcttcagtag

SEQ ID NO: 119231 - DNA, 702 bp, synthetic construct
  misc_feature 1..702: note = Description of Artificial Sequence: Synthetic coding sequence
  source 1..702: mol_type = other DNA
atgatatatcctctgatcgtgttgcccctgtgcgcctcatggcattggggcctaatccgcaaagggatagtgctattttggggagagagtgtgaagtattttctggataatctcgatagaatcggtcaattgaactattttccatccaagcaggacatccttctggctaggaaggccaccaaagggatcgtggagcacgatttcgtaatcaagaaaatacctttcaaaatggtcgatgtgggcgggcagagatctcagcgacagaaatggtttcaatgtttcgacggtatcacatctatcctgttcatggtgtcaagctctgagtatgatcaggtcctcatggaagatcgtagaactaaccgcctggtggagtcaatgaatatattcgaaacaatcgtgaacaacaagctcttcttcaatgtgtcaattattctgtttctgaacaagatggacctgctagtagagaaagtgaagacagtatcgatcaaaaagcacttcccggactttcggggcgacccccatcggctcgaggacgtccagcgctatttggtgcaatgtttcgacaggaaaaggcgcaaccgctctaaacctctgttccaccactttaccacagcaattgacactgagaatgtgagattcgtgtttcacgccgtcaaggacacaatactgcaagagaatctaaaagacattatgctgcagtag

SEQ ID NO: 119232 - DNA, 867 bp, synthetic construct
  misc_feature 1..867: note = Description of Artificial Sequence: Synthetic coding sequence
  source 1..867: mol_type = other DNA
atgcgtattatccacggaagggagtttgatcagaaggctctgctggaatttagagatacaatttttgacaatatcctcaagggcagccgtgtgcttgttgatgcgcgggataaattgggtataccatggcagtactctgagaatgaaaaacacggtatgtttctgatggcctttgagaataaggccgggctgcccgtcgagcccgctacttttcagctgtatgtgccggccctgtcagccctgtggcgggacagtggaattcgggaagccttttcccggcggtcagagttccaactgaattatttcccctcaaaacaggacatactgctggctagaaaggctaccaagggtatcgtggaacacgacttcgtgattaagaaaataccgttcaagatggtggacgtgggggggcaacggagccagcgacagaaatggttccagtgctttgatggcatcacaagcatcctgttcatggtgtcaagcagcgagtacgaccaggttctgatggaagacagacgcacgaacaggctggttgaaagtatgaacattttcgaaaccatagtaaataataagttattcttcaatgtcagcatcattttatttctgaacaagatggatttactagtcgagaaggtgaaaactgtatctattaagaagcatttccctgactttcgtggagaccctcatagactggaggatgtgcagcgttacctggtccaatgttttgacaggaaacgacggaaccgcagtaagcctctctttcatcactttactactgccattgacacagagaacgtgcgtttcgtgtttcacgcggtgaaggacaccatactgcaggaaaacctaaaggacattatgctgcagtag

SEQ ID NO: 119233 - DNA, 1080 bp, synthetic construct
  misc_feature 1..1080: note = Description of Artificial Sequence: Synthetic coding sequence
  source 1..1080: mol_type = other DNA
atgactttggaatcgatgatggcttgttgcctgtccgacgaggtgaaagaatcaaagagaatcaatgctgagatagagaagcaactcaggagggacaagcgagacgcgcggcgcgaattgaagttgttgctactggggaccggcgaaagcggaaaatctactttcattaagcagatgcggattatccacggcgccggatattcagaagaggacaagcgtggattcacgaagctggtataccagaatatttttacagctatgcaggcaatgattcgcgccatggaaaccctgaaaatcctgtataagtacgagcaaaacaaggccaacgcattactcatccgggaggtcgatgtggagaaggtgacaactttcgagcaccagtacgtctccgcaatcaagaccctctgggaggatcctggcatacaagaatgctacgatcgccggagagagtaccagctgagcgactctgctaaatattacctgacagatgtggaccgtatcgctacattagggtatctgcccacccagcaagacgtgctgagagttagggtgcccacaactggaatcatcgagtatcccttcgatcttgagaacattatctttaggatggtggacgttgggggacaacggagcgagaggcgcaagtggatacactgtttcgaaaatgttaccagtattatgttcctggtggcactcagtgagtatgaccaggtgctcgtggaaagtgacaacgaaaataggatggaggagtcaaaagccctgtttagaacaattatcacgtacccctggtttcagaattcttccgtgatcttgtttttgaataagaaagacctattagaggataagattctatattcgcaccttgtggactattttccagaattcgatggccctcagagagacgcgcaggccgcccgggaattcatcctgaaaatgtttgtggatctgaatccagactccgacaaaattatttacagccacttcacttgtgccacagacaccgagaatatccgttttgtgtttgccgccgtcaaggataccatactgcagttaaacctcaaggagtataatctggtgtag

SEQ ID NO: 119234 - DNA, 1059 bp, synthetic construct
  misc_feature 1..1059: note = Description of Artificial Sequence: Synthetic coding sequence
  source 1..1059: mol_type = other DNA
atggcagacttccttccaagccgctctgtgctgagcgtgtgttttccaggatgcctgttgacctccggcgaggcagagcagcagagaaagtctaaagaaattgacaagtgtctttccagggaaaaaacctacgtcaagagactggtgaagattctgctgctcggagctggtgagtccggaaaatcaacctattctaatgtcattaaaggcatgcgagttctcgtcgacgccagagaaaagttgcacattccctggggcgacaattcaaaccaacagcatggtgacaagatgatgtcttttgacacaagggccccaatggccgctcaggggatggtggagacacgcgtttttctgcagtacctgcctgctatccgcgccctttgggccgattcagggattcagaatgcctatgacagacggagagaattccagctaggggaatccgttaagtacttcctcgataacctggacaaactcggggagcctgattacattccctcccagcaggatatcttgctggcccggcggccaaccaaaggcatccacgagtacgatttcgaaatcaaaaatgttccttttaagatggtcgacgtggggggccagcgtagtgaaaggaagagatggttcgaatgcttcgacagcgtgacatcaattttatttctggtgagcagctccgaattcgaccaggttctgatggaggacagactaacgaatcgccttactgagagtctcaatatttttgagacgatcgtgaacaaccgcgtattttccaacgtcagtatcatcctgttcctgaacaagaccgatcttctggaagagaaggttcagatagtctccatcaaagattattttctggagttcgagggcgacccacattgtttaagagatgttcagaaatttctggtcgagtgcttccgcaacaagagaagagaccaacagcagaaaccactgtaccatcacttcactacggccattaataccgaaaatatcagactagtgttccgggacgttaaagatactatcctccatgataatctgaagcagctaatgttgcaatag

SEQ ID NO: 119235 - DNA, 1134 bp, synthetic construct
  misc_feature 1..1134: note = Description of Artificial Sequence: Synthetic coding sequence
  source 1..1134: mol_type = other DNA
atggcggacttcttgccaagcagaagtgtcctttcggtgtgcttccccgggtgcctactcacatccggtgaggcggagcagcagcggaaaagtaaagagatcgataagtgcctatcgagggaaaagacctacgtgaagcggctcgtgaaaatactcctgctgggggcgggcgaaagcggaaagagtaccttcctcaagcaaatgagaataattcatggtcaggatttcgaccagcgggcccgcgaggaatttcgtcccacaatatatagcaacgtcattaagggtatgagggtgttagtagacgcaagagagaagctccacataccatggggcgataattctaatcagcagcacggggataaaatgatgagcttcgacacaagagcccccatggccgcccagggaatggtggaaacacgagtctttctgcaatacctgcctgctatccgtgcgctctgggccgattctggtattcagaacgcctatgacaggcggcgagaatttcagcttggggagtctgtaaaatacttcctggacaacctagacaagcttggagagccagattacatcccaagccagcaggacatcttactagcccgccgaccaacaaaaggcatccacgagtacgattttgaaatcaagaacgtgccgttcaagatggttgacgtgggtggccagcgctccgagaggaagagatggtttgaatgcttcgactccgtcacttctattttatttttagtttcaagctcggagttcgatcaggtgctgatggaggaccggttgaccaaccggttgacagagtctctgaatattttcgaaacaatcgtgaacaacagggtcttttccaacgtgtcaatcatcctgtttcttaacaaaacagaccttctggaagagaaagtgcagattgtctctattaaagactacttcctggagtttgagggcgacccgcactgcctgcgggatgtgcagaagttcttggtggagtgtttccgcaacaaaaggcgcgatcagcagcagaaacccttatatcatcacttcaccacagccattaacacggagaacatccggctagtatttcgggatgtcaaagatactatactgcatgacaatcttaagcagcttatgctccagtag

SEQ ID NO: 119236 - DNA, 849 bp, synthetic construct
  misc_feature 1..849: note = Description of Artificial Sequence: Synthetic coding sequence
  source 1..849: mol_type = other DNA
atgcgggttcttgttgacgccagggagaaactgcatataccgtggggtgataatagtaaccagcagcacggggacaagatgatgagctttgacacaagagcgcccatggcagctcaggggatggtggaaacacgagtttttctgcaatatctgccggccatccgggctctgtgggccgacagtggaatccagaacgcctatgatcgaaggagggagtttcagttgggggagagcgtcaaatattttcttgataacctggacaaactcggagaaccagactatatacccagccagcaggacatccttctagccagaaggccgactaaaggaattcacgagtatgattttgaaatcaaaaatgtgccttttaaaatggtcgacgtgggtggccagcgctcagagcgcaaacgctggtttgaatgttttgattccgtgacatcaattctctttctcgtctcttcctcagagtttgaccaggttcttatggaagaccgactcaccaatcggttgacggaaagcctgaacatattcgaaaccatcgtgaataacagggtgttctcgaatgtaagtattattctgtttctaaacaagactgatctcctggaggaaaaggtgcagattgtgagcattaaagattatttcctcgagttcgagggggacccacattgtctacgggatgtccaaaaattccttgtggagtgttttcgaaataagcgcagagatcagcaacagaagcccctatatcatcactttacaaccgccataaataccgaaaatatcagactcgtttttcgggacgtaaaggataccatccttcacgataacctaaaacagctgatgttgcagtag

SEQ ID NO: 119237 - DNA, 1068 bp, synthetic construct
  misc_feature 1..1068: note = Description of Artificial Sequence: Synthetic coding sequence
  source 1..1068: mol_type = other DNA
atggccgggtgttgctgcttaagcgccgaggagaaggaatcacaaagaattagtgcagaaatcgagcggcagctgcgacgagacaaaaaggatgctcggagagaattgaaactgctgctactaggcaccggagagagcggaaagtccacctttataaaacaaatgcgcatcattcacgggagtggatattctgatgaggaccgcaaaggctttacaaaacttgtatatcaaaacatctttacagccatgcaggctatgatccgggcaatggataccttgagaattcaatatgtgtgcgaacagaacaaagaaaacgcccaaatcattagagaagtcgaagtggacaaggtgtctatgctgtccagagaacaagttgaggccattaaacagctttggcaagaccccggaatccaggagtgctacgaccgacgccgtgagtaccaactttcagattccgcaaaatattatctgaccgacatcgatcgcatagccacaccgtcgttcgtgccgacccagcaggacgtcctccgggtccgggtccccacaacagggattatcgagtacccattcgacctcgagaatatcatatttagaatggtggatgtgggaggccagcgtagcgaacggcggaaatggatccattgtttcgagagcgtgacaagcatcattttccttgtggccctaagcgaatacgatcaggtcctcgctgagtgtgataatgagaaccgtatggaggaatctaaagccctcttcaagacaatcatcacttatccatggttcctaaacagcagcgtaatcctttttctaaacaagaaagatctgcttgaggagaagatcatgtacagtcatctgatcagttatttcccagagtacaccggccccaagcaggatgtcagggcggctagggatttcatcctgaaactctaccaggaccaaaaccctgacaaagagaaagtgatttactcccattttacttgcgccaccgatacggataacatccggttcgtattcgctgctgtcaaagacacgatccttcaactgaacctcagagaatttaacctcgtgtag

SEQ ID NO: 119238 - DNA, 1125 bp, synthetic construct
  misc_feature 1..1125: note = Description of Artificial Sequence: Synthetic coding sequence
  source 1..1125: mol_type = other DNA
atggcccgctcattaacctggaggtgttgtccttggtgtctgactgaagatgagaaggcagccgctcgagtggaccaggagatcaatcggatactcctggaacagaagaagcaggaccgaggtgaactcaagttactgctcctgggcccaggcgaaagtggtaaatccacattcattaaacagatgcgaatcattcacggtgctgggtactcggaagaagagcgcaagggattccgtccattggtgtaccagaacatcttcgtatctatgcgcgccatgattgaagcaatggaacggcttcagatccccttcagccgccccgagagtaagcaccacgccagcctggtgatgagccaggatccatataaagttactacattcgaaaagaggtacgctgctgcaatgcagtggctctggcgggacgccggcattcgggcgtattacgagcggagacgggagtttcatctcttagattcagccgtatattatctgagtcacttggagcgaatcacggaggaaggctacgtaccgacggcgcaagacgtcctccggagcaggatgcctacgaccggtattaatgagtactgcttctctgtgcagaaaacaaatctgaggatcgtggatgtggggggtcagaaatccgaacgtaagaagtggatccactgtttcgaaaacgttattgcgctgatctatctcgcaagcctttctgagtacgaccagtgcttagaagaaaacaatcaggagaacaggatgaaggagagtcttgcactcttcggcactatcttagagcttccatggttcaagtctacatccgtgatattattcttaaacaaaacggacattcttgaagagaagattccgacctcccacttagcaacgtatttcccctcttttcaaggtccaaaacaggatgcggaggccgctaagagattcatcttagacatgtatacccggatgtatactggatgcgttgatggcccagaggggagcaagaagggagctagatcgcgacgtctcttctcccattacacttgtgcgacggatacccaaaatatccgcaaagttttcaaagacgttcgcgattccgtccttgctagatacctggatgaaataaacttgttgtag

SEQ ID NO: 119239 - DNA, 1065 bp, synthetic construct
  misc_feature 1..1065: note = Description of Artificial Sequence: Synthetic coding sequence
  source 1..1065: mol_type = other DNA
atgggatgtacactcagcgccgaggagagggcggcgctggagaggagcaaagccatcgagaaaaacctgaaggaggacgggataagcgcagctaaggatgtgaagctgctcctgctgggagccggcgaaagcggcaagtccactattgttaaacagatgaaaattattcatgaagatggctttagcggggaagacgtgaaacaatataagccagtggtgtactctaacaccattcaatccctggcggccatagtacgcgccatggacacactgggtatagaatacggagacaaggagcggaaagctgatgccaagatggtttgcgatgtggtgagcaggatggaggataccgaaccattcagcgccgagctgctttctgctatgatgcgcctttggggggattcagggattcaggagtgttttaacaggtccagggagtaccagctgaatgacagcgccaagtactacctggattctcttgaccggattggtgcagccgattaccagccaaccgagcaggatatcctcagaaccagagtgaaaacgaccggcatcgtagaaactcatttcacattcaaaaacctgcactttaggctgttcgatgtggggggccagcgttccgagaggaagaagtggatccattgtttcgaggatgtaacagcgataattttttgcgtcgcactttcgggctacgaccaggtactccatgaagacgaaaccacgaaccggatgcatgagtccttgatgctgttcgattctatctgcaacaataaattctttattgacactagtatcatcctcttcttgaacaaaaaagacctgtttggcgagaagatcaaaaagtcacctctgactatttgttttcctgaatatactggccccaacacttatgaagacgccgctgcgtacatccaggcccagttcgaatccaaaaataggagcccgaataaggagatttactgtcatatgacatgcgccaccgatacgaataacattcaggtggtgtttgacgcagtgactgacattattatcgctaataacctgagaggctgcggattgtattag

SEQ ID NO: 119240 - DNA, 1065 bp, synthetic construct
  misc_feature 1..1065: note = Description of Artificial Sequence: Synthetic coding sequence
  source 1..1065: mol_type = other DNA
atgggctgtacgctcagtgccgaggagagggccgctctggagaggagcaaggccatcgaaaaaaatttgaaagaggatgggatctccgcagctaaagacgtcaagcttctgctgttgggcgccggtgagagtggaaaatccaccattgtgaaacagatgaagatcattcacgaggatggttttagcggcgaggatgtcaagcagtataaacccgtagtttattctaatactattcagtccctagcggcaatcgtgcgggctatggacacactggggatcgaatatggagacaaagaaagaaaagccgatgccaagatggtctgcgacgtggtttcccggatggaggataccgaacccttcagcgctgaattgctatccgcaatgatgaggctgtggggcgactccggcatacaggagtgctttaaccgcagtcgcgaatatcagctcaacgattccgctaagtattatctcgatagtctggacaggattggagctgcagattatcagcctacagagcaagacatcctgagaaccagagtgaagacaacaggtatagttgagactcactttacgtttaagaatctccacttcagactcttcgacgtcggggggcagcggagcgagaggaaaaagtggatccactgcttcgaagatgtcaccgccataattttttgtgtggcacttagcgggtacgaccaggtgctgcatgaagacgaaaccacaaacaggatgcacgagtccctgaagctattcgattctatctgtaataacaaatggttcaccgacacctcaataatcctgtttttgaacaagaaagacatattcgaggagaaaattaaaaagagccccctaactatctgctttccagaatacaccggtcctagtgccttcactgaggctgtggcctacatccaggctcagtatgaaagtaagaacaagtctgcacacaaagagatctacacacatgtcacgtgtgctacagatacaaacaatatccaattcgtcttcgacgcagttacagatgtcataatcgcgaaaaacctgcgggggtgcggactatattag

SEQ ID NO: 119241 - DNA, 1146 bp, synthetic construct
  misc_feature 1..1146: note = Description of Artificial Sequence: Synthetic coding sequence
  source 1..1146: mol_type = other DNA
atgggatgtctgggagggaattcaaagacaactgaggaccagggggtcgatgagaaggaaagaagggaagccaataagaaaatcgagaagcagctccaaaaagagaggctggcctacaaggccacccaccgcctgctgctcctcggggccggtgagtctgggaagtcaacaatcgttaaacagatgagaatactgcatgtcaacggctttaaccctgaagaaaagaaacaaaaaattctggacatcagaaagaacgtgaaagacgccatcgtaacaattgtgtcggccatgtccacgatcatcccaccagttcctcttgctaatcctgagaaccagttccgttcagactatattaaaagcatagcccccatcactgacttcgaatatagccaggaattttttgatcacgttaagaagctctgggacgatgagggggtaaaagcctgttttgagcgctctaatgagtaccagctcattgattgtgcccagtatttcctggagcggatcgattcagtgtcactggtcgactatacaccaacagatcaggacctcctgaggtgccgggtgttaacttctggtatcttcgagacccgctttcaggttgacaaggtgaattttcatatgttcgatgtggggggtcaaagggacgagagaagaaaatggattcaatgttttaacgacgtcacggctattatctatgtcgcagcttgctctagctacaacatggtaattagagaagataacaatactaacagactgagggagtctctggacctgttcgagagcatttggaataacaggtggttgaggacaataagtatcattttattcctcaacaagcaggacatgctggctgaaaaagtgctggccggcaagtctaagattgaggattactttcccgagtatgccaattatactgtccccgaagatgcaaccccagatgctggagaagatccaaaggttacacgagccaagttcttcattagagacctcttccttcgaatctccactgcgactggtgacggtaaacattactgctacccgcacttcacctgcgccgtcgacacagagaacattcgacgggtatttaacgactgtcgggatatcatccagagaatgcatctgaaacagtatgagctcctttag

SEQ ID NO: 119242 - DNA, 1377 bp, synthetic construct
  misc_feature 1..1377: note = Description of Artificial Sequence: Synthetic coding sequence
  source 1..1377: mol_type = other DNA
atgggcctgtgctacagcttgcggcctctgcttttcggcggacccggggatgatccctgtgccgcctcagagccaccagttgaggatgcacagcctgctcctgcacccgcgctagcccccgtaagagccgccgcccgtgataccgcgagaaccttgttacctcgtggtggagagggatctcctgcttgcgcgcgccctaaggcggataaacccaaagagaaaaggcaaaggactgaacagctgagtgccgaagagcgcgaagcagccaaggagcgggaagccgtaaaggaggcgagaaaagtgagtcgtggaattgatcggatgctcagggaccagaaaagagatttacagcagacacaccgccttctgcttcttggggcaggagaaagcggcaaatccaccatagtcaagcagatgcgtatcctgcacgtgaatggattcaacccagaagaaaaaaagcaaaagattctagatatccggaagaacgtcaaggacgccatagtcacgattgtctctgccatgtccaccatcatccctcccgtgccacttgccaaccccgaaaaccagtttaggtcagattacatcaaaagcattgctcccattactgattttgaatattctcaggagttctttgatcatgtgaaaaagttatgggatgatgagggcgttaaggcctgctttgagcgctccaatgagtatcagctgattgattgcgcgcagtactttctggagaggatcgattctgtgtccctggtggactacacccctaccgaccaggacctcttgcggtgtcgcgtactaacaagcggaatctttgagacccgttttcaagtggataaggtgaacttccacatgttcgatgtgggcggtcagagagacgagcgtcgaaagtggatccagtgttttaatgatgtgaccgccattatctacgtggctgcttgtagctcttacaacatggtcatccgggaggacaataataccaacaggctgagagaaagtctcgatctgttcgaaagcatttggaataacagatggctccggacaatcagcatcattctcttcctgaataagcaggacatgctggcagaaaaggtcctagccggtaaaagcaagatcgaagactactttcctgagtacgccaattatacggtgcccgaagatgctacaccggacgcaggcgaagaccctaaagtcacaagggctaagttcttcatcagagatttgtttttaagaatctctacggctactggggatggtaaacattactgctacccgcatttcacctgcgccgttgacactgagaacatcagaagggttttcaatgattgtagggacatcatccagcgaatgcatctcaaacaatatgaactgctgtag

SEQ ID NO: 119243 - DNA, 1146 bp, synthetic construct
  misc_feature 1..1146: note = Description of Artificial Sequence: Synthetic coding sequence
  source 1..1146: mol_type = other DNA
atgggctgccttggtggcaatagcaagaccacggaggaccagggagtcgacgaaaaggagagaagagaggcaaacaaaaagattgaaaaacaattgcagaaagaaagactggcctacaaggcaacccaccggctgctgctgctgggggccggagagtccggaaaatcgactatcgtcaagcagatgagaatcctccacgttaacggatttaatcctgaggagaaaaaacaaaagatactggatattcgcaagaacgtgaaggacgcaattgtgactattgtgagcgcgatgagcacaatcataccccccgtgccccttgcaaacccagagaatcaattcaggtcagactacattaaaagtattgctccaatcacggatttcgagtatagccaagaatttttcgatcacgtgaagaaactatgggatgatgaaggcgtgaaggcttgctttgaacggtccaacgagtatcaactgatcgactgcgcccagtatttcctggagaggatagactcagtgtctctcgtggattatacccccactgaccaggacctcttacgttgcagggtgttgacatcaggaattttcgagacgcgctttcaggtggataaagtcaacttccacatgttcgacgtgggcgggcaacgagatgaacgaaggaagtggattcagtgcttcaatgatgtcactgccatcatctatgtcgccgcatgctcctcatataacatggtcatcagggaagacaataatactaatcgactaagggaatcccttgatttattcgagtctatctggaataacagatggcttaggactatctcgataattttgttcctaaataagcaggatatgttggctgagaaggtactcgcaggcaagagtaaaatcgaagactacttccctgaatatgccaattatactgtgcccgaagacgccacacctgacgctggcgaggacccaaaagttacccgggctaaatttttcatacgcgacctattcttgcgcatctctacagcgactggggatggcaagcactattgttacccacactttacctgcgcagtggacacagagaatatcaggcgcgtctttaacgattgccgggatatcatccagcgcatgcatctgaaacagtacgaacttctttag

SEQ ID NO: 119244 - DNA, 1146 bp, synthetic construct
  misc_feature 1..1146: note = Description of Artificial Sequence: Synthetic coding sequence
  source 1..1146: mol_type = other DNA
atgggctgcttgggtggcaattctaagacaaccgaggatcagggcgtggatgaaaaagagaggagagaggctaacaaaaagattgagaagcagcttcagaaagagcgcttagcatataaagccactcataggctgctgttgctcggtgctggggagtctggcaagtccaccattgtgaaacagatgaggattttgcacgtgaacggctttaaccccgaggagaaaaagcagaagatccttgacatccgcaaaaacgtcaaagacgctatcgtcaccattgtttcggcaatgagtacgattatcccccccgtcccattggctaatcctgaaaatcaatttcgttctgattatatcaagagtattgcaccaattacagatttcgaatactcccaagagttctttgaccacgtcaagaagttatgggacgacgaaggcgtgaaggcctgtttcgaacggtccaatgaatatcagctcatcgactgtgctcagtatttcctggagagaatagattccgtgtcactagtcgattatacccctacggatcaggacctgctacgatgtcgggtgctgacatccggcatttttgaaacccgattccaggtcgataaggtgaactttcatatgtttgatgtgggtggacagagggacgaacgccgtaagtggatccagtgcttcaatgatgttactgctataatctatgtggccgcctgctccagttataacatggtcattagagaagacaacaacaccaataggttgcgggaatcactcgatctgtttgaatcaatttggaacaacaggtggctgaggactattagcatcatcctgttcttgaacaagcaggacatgctagccgaaaaagtgttggctggcaagtcgaagatcgaagactactttccagagtacgcaaattatactgtccctgaagacgcaacccctgatgcgggagaggaccccaaagtgacaagggcaaagttcttcatccgtgacttattcctgaggattagcacagctaccggggatggtaaacactattgctatccacattttacatgtgcagtagatacagagaacatacgacgtgtttttaatgactgtcgagatattatacaaagaatgcacttgaagcaatacgagctcttatag

SEQ ID NO: 119245 - DNA, 525 bp, synthetic construct
  misc_feature 1..525: note = Description of Artificial Sequence: Synthetic coding sequence
  source 1..525: mol_type = other DNA
atgttcgatgtcggcggccaacgtgacgagaggcgcaagtggatacaatgtttcaacgatgtaaccgccattatctatgtcgccgcttgctcaagttacaacatggtaattagggaagataataacaccaatcgtcttcgagagagcctggacctgtttgagtccatatggaacaaccggtggctcagaaccatcagcattatcttgttcctcaataaacaagacatgctggccgaaaaggttctggctggtaagtcgaagattgaagattacttcccggagtacgccaattatacggtgccagaggatgcgactcccgatgcgggtgaggacccgaaggtaacacgcgcgaaattcttcatccgggatctgtttctcagaattagcaccgccactggtgatgggaagcactattgctacccacattttacatgcgccgtcgacacggagaacattcggcgggtattcaacgattgtcgtgacattattcagagaatgcacctgaagcagtatgagcttctatag

SEQ ID NO: 119246 - DNA, 963 bp, synthetic construct
  misc_feature 1..963: note = Description of Artificial Sequence: Synthetic coding sequence
  source 1..963: mol_type = other DNA
atgagaattctccatgtcaacggctttaaccccgaagaaaagaaacaaaagatcttggacatcaggaagaatgtaaaagatgccatagtcacgattgtgagcgctatgtcgacaatcatccctcctgttcccctggctaatccagaaaatcaatttcgttcagactacatcaagagtattgcaccaatcactgacttcgagtactcccaggagttctttgaccacgtcaagaagttgtgggacgacgagggggtcaaagcttgtttcgaacggagtaacgagtaccagctcattgactgtgcgcagtactttctagaacgcattgattcagtctcactggtggactatacaccaactgatcaggacctcttacggtgtcgggtgctcaccagtggcatttttgagactagatttcaggtggacaaggtgaactttcatatgttcgatgtgggcggtcaacgagatgaacgacggaaatggatccagtgtttcaatgatgttactgcaataatttacgtagctgcctgcagttcatacaacatggtgattcgcgaagataataacacaaatagattacgcgaatcgctcgacctttttgagagtatctggaacaacagatggcttcgaacaatctccattatcctgttcctcaacaagcaagatatgctcgccgagaaggttttggcaggtaagagtaagatcgaagactactttcctgaatacgccaactacactgtcccagaagacgccactcctgatgcgggcgaggacccaaaagtgactcgcgcaaaattcttcatccgggaccttttcttacgtatcagtactgcaaccggcgacggcaaacactattgctatcctcacttcacctgcgccgtggacaccgaaaacataaggagggtatttaacgactgcagagacataatccagagaatgcatctgaaacaatacgagctgctgtag

SEQ ID NO: 119247 - DNA, 1065 bp, synthetic construct
  misc_feature 1..1065: note = Description of Artificial Sequence: Synthetic coding sequence
  source 1..1065: mol_type = other DNA
atgggctgcacactaagcgccgaggataaggcagcagtcgaacgttctaagatgatcgacaggaacctgagagaagacggagagaaggccgcccgcgaggtgaaactgctgcttttaggggccggggagagcggtaagagcaccatagtaaaacagatgaagatcattcacgaggctgggtattccgaagaggagtgcaagcaatataaggccgtcgtgtacagcaacacgatacagtccatcattgccattatacgcgccatgggaagacttaagatcgactttggagactccgcgcgggccgacgatgcaaggcaattgtttgtcctggccggcgctgccgaggaagggtttatgactgcagaactggccggggtaattaagaggctgtggaaggactctggcgtccaggcttgcttcaatcggtctcgggaataccagctgaatgattcagcagcttactacctgaatgacctagatcgaattgctcagcctaattacattccaacccagcaggacgtgctcagaacacgggtgaaaacgacgggaattgtcgagacacacttcacttttaaggacctccacttcaaaatgttcgatgtgggcggccagaggtccgagcggaagaagtggatccactgttttgaaggagttacagccattattttttgtgtcgcgttgagtgattacgacctcgtgttggccgaagatgaagagatgaaccggatgcacgagtctatgaaactttttgacagtatctgcaacaataagtggtttacagatacgtctattatcttattcttgaataagaaggatctgtttgaggagaaaatcaaaaagtcacctctgaccatttgttacccagaatatgctggaagcaacacctacgaagaggctgctgcatacatccagtgtcagttcgaggatctcaataaacgcaaagacaccaaggagatttatacccatttcacatgtgcgaccgatacaaaaaacgtgcagttcgtgttcgacgccgtgactgatgtgatcataaaaaataacttgaaagactgtgggctattctag

SEQ ID NO: 119248 - DNA, 72 bp, synthetic construct
  misc_feature 1..72: note = Description of Artificial Sequence: Synthetic coding sequence
  source 1..72: mol_type = other DNA
atgggctgcaccctctctgccgaggataaagccgcagtggaacgcagtaagatgatagaccggaacctctag

SEQ ID NO: 119249 - DNA, 909 bp, synthetic construct
  misc_feature 1..909: note = Description of Artificial Sequence: Synthetic coding sequence
  source 1..909: mol_type = other DNA
atgaagattatccacgaggccggctatagtgaagaggagtgcaagcagtacaaggccgtagtctattccaataccatccagtccataatcgctataatacgtgccatgggtcggctgaaaatcgatttcggcgactcagctcgggctgatgacgccaggcagctgttcgtgctcgccggcgccgccgaggaaggattcatgacggcagaactggcgggcgtcataaagcgcctctggaaagacagcggagtgcaggcatgctttaacagatccagagagtatcagttaaacgatagcgccgcttactatctgaacgaccttgaccggatcgctcaacctaattacataccaacacagcaggacgtgctgagaacccgggtcaagaccacaggaattgtggagactcattttactttcaaggatctacattttaaaatgttcgacgtgggtggacagcggagtgagcggaaaaaatggattcattgctttgagggtgtaacagcgattattttctgtgtcgccctgtccgactatgatctcgtgttagctgaagatgaagaaatgaatcggatgcacgagagcatgaagctattcgattctatatgtaacaacaaatggttcactgacacatcgatcatcctgtttctgaataagaaggacctttttgaggagaaaatcaagaaatctcccctaaccatttgttatcccgagtacgccggcagcaacacgtacgaagaagccgccgcctacatacagtgtcagttcgaggatctgaataaacgcaaagacactaaagaaatctacacacatttcacgtgcgccactgacactaaaaatgtgcaattcgtgttcgacgccgttaccgacgtgatcatcaagaataacctgaaggattgcggcctattttag

SEQ ID NO: 119250 - DNA, 1020 bp, synthetic construct
  misc_feature 1..1020: note = Description of Artificial Sequence: Synthetic coding sequence
  source 1..1020: mol_type = other DNA
atggagtacgccggacatctaccagctagttctgctcaagggactattctggcatgcacatcgtgcaccggagctggggagagcggaaagtcgacaatcgtgaaacagatgaaaataattcacgaagatggctactcagaagaggagtgtcgccagtaccgcgctgtggtttacagtaatacaatacaatccatcatggctatagttaaggctatgggcaatctgcagattgacttcgcggatccttctagggctgacgatgcgagacaactatttgccctgtcatgcacagctgaggagcagggagtgctcccggacgatctcagcggcgtaatcagaaggttgtgggccgatcatggcgtccaggcttgcttcggtagaagccgcgagtatcagctgaacgactcagctgcctattacctgaatgatctcgagcgtatagctcaatctgattacattccaacccagcaggacgtcctgaggacacgggtgaagacaacaggcatagtcgagactcactttacatttaaagatctccattttaaaatgtttgacgtcggaggccaacgcagcgaacgcaaaaaatggatacactgcttcgaaggagttactgccattattttctgtgtagccctatcggcctatgatctagtgctggccgaggacgaagagatgaatcgcatgcacgagtccatgaaattgttcgactccatttgtaacaataagtggttcaccgatacctcaatcatcctctttctgaataagaaagacctcttcgaggagaaaataactcactctcccctgacaatctgttttcccgagtatacaggagctaataagtatgacgaggctgcttcgtacatccagtcaaaattcgaggacctgaataaacgcaaagatactaaggaaatttacactcactttacttgtgctaccgacaccaaaaatgttcagttcgtgtttgatgctgtgaccgatgtgattataaaaaacaacctgaaagactgcggcctcttctag

SEQ ID NO: 119251 - DNA, 1068 bp, synthetic construct
  misc_feature 1..1068: note = Description of Artificial Sequence: Synthetic coding sequence
  source 1..1068: mol_type = other DNA
atgggatgtaccgtaagcgcagaagataaggccgccgccgaacggagtaagatgatcgacaaaaacttacgcgaggatggagaaaaggctgctcgcgaagtaaagcttctgctccttggagccggagagtctgggaaatctaccatcgttaagcagatgaaaattatccatgaggacggctattccgaagaggagtgcaggcaataccgcgcggttgtttattcaaacaccattcagagcattatggcaattgtgaaggctatgggcaacttacagatcgacttcgctgatcctagccgggcagacgatgcccggcagctttttgctttgagctgcaccgcggaggagcagggggtgcttcctgacgacctgagtggggtgatccggcggctgtgggctgatcacggagtgcaggcttgttttgggagaagtcgggaatatcagctgaacgattcagcggcctattacctcaacgacctggaacgaattgcgcagtcagattacatccccacacaacaggatgtcctgcggacccgcgtgaaaaccaccggaattgtggaaacccatttcacattcaaggacttgcacttcaagatgttcgacgtgggcggtcagcgctccgaaaggaaaaagtggatccactgttttgaaggcgtgacggcgatcatcttttgtgtggctctctctgcctatgacctcgtgctcgctgaggacgaggagatgaatcgcatgcacgaatctatgaaactctttgacagcatttgcaacaataaatggttcaccgacacaagcattattctgtttttgaataagaaggacctctttgaggaaaaaatcacgcatagcccattaacgatttgctttcctgaatataccggggccaacaagtacgacgaagccgcctcttacattcagtctaagttcgaggatcttaataagcggaaggatactaaagagatttatactcattttacttgcgcaactgacacaaagaacgtgcagttcgtcttcgacgccgtgacagacgttattatcaaaaacaatttgaaagactgcggactcttctag

SEQ ID NO: 119252 - DNA, 1020 bp, synthetic construct
  misc_feature 1..1020: note = Description of Artificial Sequence: Synthetic coding sequence
  source 1..1020: mol_type = other DNA
atgacagaaggggtaaaaaccctgggctggactaagcagaaggggggttgccattggggaaggtccgagggggctggggaaagcggcaagtccaccatcgtgaagcaaatgaagattattcacgaggatggctactccgaggaggaatgcagacagtatcgagccgtggtctacagcaacaccattcagtcaattatggccatagtgaaagccatgggtaacctccagattgattttgctgacccctcccgggccgacgacgctagacaattgttcgccttgtcatgtaccgccgaagaacaaggagttctcccggacgatctctctggtgtgatccggaggctttgggccgaccacggcgtccaggcatgcttcgggcggagccgagaataccaattaaatgattccgctgcttactatctaaacgacctggagcgaatcgcacagtccgactatataccaactcagcaggacgtactgagaacacgcgttaaaacgactgggattgtcgagacacatttcactttcaaggacctccatttcaaaatgtttgacgtggggggccaacgcagcgaaagaaagaagtggatacattgctttgaaggcgtgacagctattatattttgcgttgctctgagcgcctacgatctggtgcttgcggaggacgaggaaatgaacagaatgcatgagagtatgaagttgttcgattctatctgcaacaataaatggtttaccgacacaagtatcatcctatttttgaataagaaggatctgttcgaagaaaaaataactcatagccccctgactatatgctttccggagtacacaggagcaaacaaatatgacgaggccgcttcctacatacagtcgaaattcgaagatctgaataaaaggaaggacaccaaggaaatctacacccatttcacttgtgctaccgacacgaaaaatgtccagttcgtgttcgatgcggtgactgatgttatcatcaagaacaatctcaaggattgtgggctgttttag

SEQ ID NO: 119253 - DNA, 912 bp, synthetic construct
  misc_feature 1..912: note = Description of Artificial Sequence: Synthetic coding sequence
  source 1..912: mol_type = other DNA
atgaagattattcacgaggacggttacagtgaggaggagtgcagacaataccgtgctgtggtgtattctaatacgatacagagcatcatggccatagtgaaagccatgggaaacctccaaatagacttcgctgaccccagcagggccgatgatgcgagacaactgtttgccctttcatgcacggctgaggagcagggtgtgctgcccgatgacctgtctggagttatacgccgactgtgggccgaccatggagtgcaagcctgctttgggcgatcacgggagtatcaactcaacgactctgctgcctactatctgaacgatctggaacgcatagcgcaaagcgattacattccaacccaacaggatgtcctgaggactagggttaagaccaccggcatcgtcgaaacccacttcacattcaaggatcttcatttcaagatgttcgatgtaggcggccagcgaagcgagagaaaaaagtggatccactgtttcgaaggggtcaccgccattatattttgcgtggcgctttccgcttatgaccttgtcctagccgaggatgaggagatgaataggatgcatgagagcatgaaactattcgacagcatttgcaataacaaatggtttacagatacatccattatactgttcttgaataagaaagatttattcgaggaaaaaattacacattcacccctcaccatttgcttccctgagtacacaggcgctaataaatacgatgaggcagcatcttatattcagagcaaatttgaggatctcaataaacggaaggacacaaaggaaatttatacacattttacctgcgccaccgatacaaagaatgtacaatttgtgttcgacgcggttacggacgtaataattaaaaacaacctcaaggattgtggcctgttttag

SEQ ID NO: 119254 - DNA, 957 bp, synthetic construct
  misc_feature 1..957: note = Description of Artificial Sequence: Synthetic coding sequence
  source 1..957: mol_type = other DNA
atgcgtggagccggagagagcggaaagtctacaatcgttaagcaaatgaaaattattcacgaggacggatatagtgaggaagaatgcaggcagtatcgcgcagtggtgtatagtaatactatccagtccatcatggctattgtcaaagccatgggcaatctccaaatcgatttcgccgatccttctagggctgacgacgcacgccagctgtttgcactgagctgtaccgccgaggaacagggggtgctgcctgatgacctttcaggggtcatccggagactctgggccgatcacggggttcaggcctgtttcggacgctcgcgagagtaccagctgaacgacagcgcggcgtattacctgaatgatttagaaaggatcgcacaaagcgactacattcctacccaacaggacgtactgcgcacccgagtgaaaacaacaggaatagtcgagacacactttacttttaaggatctacattttaagatgtttgatgtgggcggtcagagatccgaacgtaaaaagtggattcactgtttcgagggggtaaccgcaatcattttttgcgtggcactgtcagcatacgatctggtcctcgccgaagatgaggaaatgaaccgcatgcatgaaagtatgaagctttttgatagcatttgtaacaataagtggttcacggacacaagcattatcttgttcttaaacaagaaagatctgtttgaggaaaaaatcacacatagcccactgaccatttgcttcccagagtatactggagctaacaaatacgatgaggcagcctcctacatccagagcaaatttgaggatctcaataaaaggaaagatacaaaggaaatttatacacacttcacatgcgcgactgacaccaagaacgtgcagttcgttttcgacgccgtcaccgacgtgatcatcaaaaataatctgaaagactgcggcctgttttag

SEQ ID NO: 119255 - DNA, 825 bp, synthetic construct
  misc_feature 1..825: note = Description of Artificial Sequence: Synthetic coding sequence
  source 1..825: mol_type = other DNA
atggccattgtgaaggcaatggggaacctgcagatcgactttgctgacccgagtcgcgccgacgacgctcgccagcttttcgctctttcgtgcacagccgaagaacagggagtgctccccgacgatctgagcggtgtgattagaaggttatgggctgaccacggcgtgcaggcgtgctttggacggtcacgggagtatcagctgaatgacagcgccgcttattacttgaacgatttagagaggatcgctcagagcgactatattcctactcagcaggacgtgctgagaactcgggtcaaaacaactggaatcgttgagacccatttcacattcaaagatctgcacttcaagatgtttgatgtaggcggtcaacgcagcgagcgcaagaagtggatccattgcttcgaaggcgtgaccgccattattttttgtgtagccctgtctgcatacgatttagtacttgcagaagatgaggagatgaataggatgcatgagtccatgaagctctttgattctatttgtaacaacaaatggtttactgacacctcaattatactgtttctgaacaaaaaggatctgttcgaggaaaagatcactcattctccactgaccatttgcttcccagaatatactggtgcaaacaaatatgatgaggctgctagctacatccaaagcaaattcgaagatctaaacaaacgcaaagacaccaaggaaatttacacacactttacatgcgcaaccgacactaagaacgtgcaatttgtgttcgatgcagttaccgatgttataatcaaaaacaatctgaaagactgtggccttttctag

SEQ ID NO: 119256 - DNA, 1086 bp, synthetic construct
  misc_feature 1..1086: note = Description of Artificial Sequence: Synthetic coding sequence
  source 1..1086: mol_type = other DNA
atggggtgcaccgtctctgctgaagacaaggccgctgctgaacgcagcaagatgatcgacaagaacctgcgcgaagatggggagaaggccgccagagaggtgaagcttctccttctgggagctggagaaagcgggaaaagtactatcgtcaagcagatgaagatcattcacgaggacggttactccgaagaggagtgtaggcagtaccgggccgtagtgtatagtaacactatccagtcaatcatggccatcgtcaaggccatgggaaacttacagatcgactttgctgacccatcccgagctgacgatgcccgccagctcttcgccctttcatgtaccgccgaagaacagggagtgctccctgacgacctttctggggtcattaggcgtctgtgggcagaccacggggtgcaagcatgttttggaagatctcgcgagtatcagctcaatgatagtgctgcatattacctgaacgacttggagcggattgcccagtcagattatatccccactcagcaagacgttctgcgcacccgagtgaagacaactgggatcgtagagactcattttacctttaaggatctgcacttcaaaatgttcgatgtcgggggccagcgctccgagcggaagaagtggatccactgtttcgaaggggtgaccgctatcattttctgcgtggccctaagtgcttacgatctcgtattagcggaggacgaagagatgaataggatgcacgaatccatgaaactgttcgattcaatttgcaacaataagtggtttaccgacacctctattatcctgttcctcaataagaaggacctgtttgaagaaaaaattactcatagtcctctcactatctgttttcccgagtataccggcgcaaataaatacgacgaagctgcgtcatacatccagtccaaattcgaggacctgaacaaacggaaggataccaaggagatttatacacatttcacttgcgccaccgatacgaagtcgcgcaaactgttccgcgagaattacctgaagctgagcgaccctgaccagcagccacctcccgcccctcttcctagcgatagcgtgccctag

SEQ ID NO: 119257 - DNA, 1065 bp, synthetic construct
  misc_feature 1..1065: note = Description of Artificial Sequence: Synthetic coding sequence
  source 1..1065: mol_type = other DNA
atgggatgcaccttgtcagccgaagacaaagccgccgttgaaagatctaagatgatcgaccggaacttgcgagaggatggtgagaaggctgcgaaggaagtcaagttgctgctattgggagccggggagtctggcaaatctacaatcgtcaagcaaatgaagattattcatgaagatgggtactcggaagacgagtgcaaacagtacaaagtggtggtctatagcaataccatccaaagcatcatcgctatcataagggccatggggcgcctaaagattgatttcggagaggctgccagggcagacgacgcaaggcagctgttcgttctggcagggagcgccgaggaaggcgtgatgactccggagctggccggagtgattaagcgattatggcgggatggaggggtgcaagcttgcttcagccgctcccgtgaatatcagctgaatgattccgcaagttattatctgaacgatttagacagaatcagccagtctaattacatccctactcagcaagatgtgctgcgcactcgagtcaagacaacaggaatcgttgaaacgcatttcacttttaaggacttgtattttaaaatgtttgatgttggcggccagcggtctgaaaggaaaaaatggatccactgctttgaaggagtcacggcaattatcttctgtgttgccctgtctgattatgacctggttctagccgaggatgaggagatgaatagaatgcacgaatcaatgaagcttttcgactccatttgtaacaacaaatggttcaccgagacatctatcattctgtttcttaacaaaaaggacctctttgaggaaaagatcaagcggtccccattaacaatttgctaccccgagtacactggaagcaacacttatgaagaagccgccgcctatatccaatgtcagtttgaggatctgaatcggcgcaaagataccaaggaaatttatacccatttcacatgcgcaacagacactaaaaatgtgcagtttgtgtttgatgccgtcacagatgtgattatcaaaaacaacttaaaagaatgcgggctgtactag

SEQ ID NO: 119258 - DNA, 2652 bp, synthetic construct
  misc_feature 1..2652: note = Description of Artificial Sequence: Synthetic coding sequence
  source 1..2652: mol_type = other DNA
atggccgagaactcagtgttaacatctacaaccggccggacttcgcttgccgactcttcgatcttcgacagtaaagtgaccgaaatttctaaagaaaatctgctaattgggtcaacctcatacgtagaagaggaaatgccacagattgagacacgtgtgattctggtgcaggaagcagggaagcaggaagaactgataaaggcactaaaagatattaaagtgggctttgtgaagatggagtcagtagaagaatttgagggactggatagtcctgagtttgagaatgtcttcgtggtgacagacttccaagactcagtttttaacgatctgtataaggctgactgtagagtgatcggacctccagtggtcctcaattgttctcagaagggtgaaccgttgcctttttcttgtaggccattgtactgcacttctatgatgaatctggttctttgcttcaccgggtttagaaaaaaggaggagctggtcaggctggtcactctagtccatcatatgggtggggtgattaggaaagacttcaactccaaagttactcacctcgtcgctaattgtacccagggcgagaagttcagggttgctgtgtctctcggtacacccattatgaaaccagaatggatctataaagcctgggaacggaggaacgaacaggacttctacgccgccgtagacgactttaggaacgagtttaaagtgccaccgttccaggactgtattcttagttttctgggattctcagatgaggagaaaacgaacatggaagagatgacagaaatgcagggaggcaagtatcttcccctcggggacgagcgctgcacacatctggtggtggaagagaatattgttaaagacctcccatttgaaccatcaaagaagctttacgtcgtcaagcaggaatggttttggggctcgatccagatggatgcccgcgcaggagagaccatgtatctgtacgagaaggcgaacacccccgagctgaaaaagtccgtgtccatgctctctttaaacaccccaaatagcaataggaaacgacgccgcctgaaggaaacgctggctcaactttctagagaaaccgatgttagcccttttcctccccgcaaaaggccaagcgcagagcactctctcagcattggcagcctgttagacatcagcaacacacccgagtcttctatcaattatggagacacacctaaatcttgtaccaagtcctctaagtcctcaactccagttcctagcaaacagtctgccagatggcaggtggcaaaggagttgtaccaaacagagagcaactacgttaatatactggcgaccatcattcagctgttccaggtccccctggaggaggaggggcaacgcggggggccaatactggccccagaagaaatcaagacaatcttcggatcaatccccgatatttttgatgtccacaccaaaattaaggatgacctcgaagatctgatcgtcaactgggacgaaagtaagtcgattggggacatctttctcaagtactcaaaggacctcgttaagacttacccccctttcgttaatttttttgagatgtccaaagagacaattattaagtgcgagaaacagaagccccggttccatgcattcctgaagataaaccaagccaagcccgagtgcggccggcagagcctggtggagttgttaattaggcctgtccagaggctgcccagtgttgccttattgctgaatgacttgaaaaagcatacagcagacgaaaatccagataagagcacgctggagaaggccatagggagtcttaaagaagtcatgacacacatcaatgaggataagagaaaaacagaagcccagaagcagatcttcgacgtagtgtatgaagtggacgggtgcccggcaaatctgctgagttcacacaggagccttgttcagagggtagaaactattagtttgggggagcacccttgtgacaggggtgagcaggttaccctctttctgttcaatgattgtctggagatcgctcgcaaacgacataaggttattggcaccttcagatctcctcacggacagactcgtcctccagcgtcacttaaacacatccacttgatgcccctgagtcagataaagaaggtgcttgacatcagggagacagaggattgtcacaatgcattcgcgctgcttgtgcgtcctcccactgaacaagctaacgtgctgctgagctttcagatgacatccgacgagctccccaaagagaattggctgaaaatgctgtgtaggcatgtggccaacactatctgcaaagctgacgccgagaacctgatctatacggcagaccccgagagcttcgaggtgaacacaaaagatatggattctacgctctcacgggcttctagggccattaaaaaaaccagcaaaaaggtgacgagagcttttagtttttccaaaacgccgaagagggccctgagacgggcacttatgaccagtcatggtagcgtggagggtagatctcccagctcaaatgacaagcacgtaatgtcccgcctgtcgagcacaagcagccttgcaggcatcccttcaccgtcactcgtgtctctccctagtttcttcgaacggcggagtcacaccttatcaaggtctaccacacatttgatatag

SEQ ID NO: 119259 - DNA, 1053 bp, synthetic construct
  misc_feature 1..1053: note = Description of Artificial Sequence: Synthetic coding sequence
  source 1..1053: mol_type = other DNA
atgggagcaggtgcttcagcagaggagaagcacagtagagagcttgagaagaagctcaaagaggatgccgagaaagacgcccgcaccgtaaaacttctcctgcttggtgctggggagagcggcaaatctacaattgtgaagcagatgaaaatcatccatcaagacggctactctctagaggaatgcctcgagtttattgcaatcatctatgggaacacattacagtctattttagccatcgtccgcgctatgacaacactgaatattcagtacggcgactctgctcgacaggacgacgcccgtaagctcatgcacatggcagatacaattgaagaggggaccatgccaaaagagatgtctgacattatacagcggttgtggaaggatagtggcatccaggcctgctttgagcgtgctagcgaatatcagcttaatgactccgctggatactacttgagtgacttggagaggcttgtcacgccgggctacgttcctacagaacaagatgtccttagatcccgggtgaagactacagggataatcgagactcagtttagcttcaaagacctgaatttccggatgtttgacgtgggcggccagcggagcgaacggaagaagtggatccactgctttgaaggcgtgacttgcataatatttatcgctgctcttagcgcctatgatatggtgctcgtggaagacgacgaagtcaatcgaatgcatgaatcactccatctgttcaactcgatctgtaatcataggtatttcgctactacctcaatagttttattcctgaacaaaaaggatgtgtttttcgagaaaatcaagaaggctcacctttctatttgtttccctgattatgatggccccaacacctatgaggacgccggaaattacatcaaggtgcagttcttggagctgaatatgaggagagatgtgaaggagatttacagccacatgacctgtgccacagatacacagaatgtgaaatttgtgtttgatgccgtgacagatattattatcaaagagaacctgaaggactgcgggctcttctag

SEQ ID NO: 119260 - DNA, 1065 bp, synthetic construct
  misc_feature 1..1065: note = Description of Artificial Sequence: Synthetic coding sequence
  source 1..1065: mol_type = other DNA
atggggagcggcgccagtgccgaggacaaggaacttgccaagcgcagtaaggagctagagaagaagcttcaggaagacgccgataaggaagccaagacagtgaaactcctcctgcttggtgccggtgagtctgggaagtccactattgtgaagcagatgaagatcattcatcaggacgggtattccccagaagagtgcctggaattcaaagcaattatctatggaaatgtgttgcagtcaattctggccatcattagggctatgacaacactgggaatcgattatgccgagccctcgtgtgcagacgatggccggcagttaaacaatctcgctgatagcatcgaggagggaaccatgcctcctgagttagtagaggttatccgcagactctggaaagacggtggagtgcaggcctgtttcgagagggccgccgagtaccagttgaatgactccgcgagctactatctcaaccagctcgaaagaatcactgaccccgaatatctgcccagcgagcaggatgtcctgagaagtcgagttaagactaccgggatcatcgagaccaagttcagcgtgaaggacttaaacttcaggatgtttgacgtaggtggccagagatcagaaagaaaaaaatggatccattgcttcgagggcgtgacttgtatcatcttctgtgcagccctgtccgcatacgacatggtcctggtcgaagacgacgaggtgaatagaatgcacgagtctctccacttatttaacagcatatgcaaccacaagtttttcgctgcaacttccatcgtgctgtttttgaacaagaaagacttgttcgaagagaaaatcaagaaagtgcacctatcaatttgctttcctgaatatgatggtaataactcttatgatgatgctgggaattatatcaaaagccagttcctggatctcaacatgaggaaggatgtaaaggagatctactcacacatgacatgtgctacggatactcaaaacgtgaagtttgtgttcgacgccgtgaccgatataattattaaggagaacctcaaggactgtgggctgttttag

SEQ ID NO: 119261 - DNA, 1068 bp, synthetic construct
  misc_feature 1..1068: note = Description of Artificial Sequence: Synthetic coding sequence
  source 1..1068: mol_type = other DNA
atgggttgcaggcagagtagcgaggagaaagaagcagctagacggtccaggagaatcgaccgacacttgaggtccgaaagccagaggcaacgccgcgagatcaagttattactgttgggaactagtaatagtggcaaatcaacgatcgtgaaacagatgaaaatcatccactccggcggtttcaatcttgaggcatgcaaggaatataagcctcttatcatttataatgccatcgactccctcacacggatcataagggcgctggctgctctcagaattgacttccacaaccccgaccgcgcatacgatgcagtacagctgttcgctctgaccggccctgcagagtctaaaggtgaaattactcctgaacttctgggcgtaatgagaaggctgtgggcagaccctggggctcaggcctgcttctctaggtcctcagaatatcatctcgaagataacgctgcatactatcttaacgatcttgaaagaattgccgctgcagattatatccccactgtcgaggacatactgcgttctcgcgatatgaccactggcatagtggagaataaattcaccttcaaagaactgacgtttaagatggtggacgttggcggccagcggagtgagaggaaaaagtggatccactgcttcgaaggagtgaccgcgatcattttctgcgtcgagctgtcaggatacgatctaaaattgtacgaggacaaccagacatcacggatggccgaatcgctgcgactgttcgatagtatttgcaacaataattggtttattaatacttcgctgattcttttcttgaacaagaaggacctgctggccgagaaaatcagaaggattccattgacaatctgctttcccgagtataagggacaaaacacctatgaggaagctgcagtctatatacagcgccagtttgaggacctgaaccgcaacaaagagactaaggaaatctatagccattttacatgtgctacagacaccagcaatattcagttcgttttcgatgccgtcactgatgtgatcattcagaacaacctaaaatacatcggtctgtgttag

SEQ ID NO: 119262 - DNA, 912 bp, synthetic construct
  misc_feature 1..912: note = Description of Artificial Sequence: Synthetic coding sequence
  source 1..912: mol_type = other DNA
atgaagatcattcattcaggcggctttaacctggaggcttgtaaagagtataaaccactaataatctataacgctatagacagcctgaccaggatcattcgggccctcgcagccctacggatcgactttcataatcccgatcgtgcgtatgacgctgtgcagctatttgccctgacaggtccagcagagtccaagggcgagattactcctgaactgttaggtgtcatgcgcagactgtgggctgatcctggggcacaggcttgttttagccgcagtagcgaataccacctggaagataatgccgcctactatctgaacgatctggaaagaatcgccgccgctgactacataccaacagttgaggacatcctgcggtcacgtgatatgactaccggcattgttgaaaacaagttcacctttaaagaactcacatttaaaatggtggacgtagggggacaacgaagtgagcgtaaaaaatggattcactgcttcgaaggcgtgactgccatcatattttgcgtggaactgtcaggatacgatttaaaactgtatgaggataaccagacgagccggatggcagagtctctcagactcttcgacagcatatgtaacaataactggttcatcaatacatctttaattctctttttgaataaaaaagacctcttggcggagaaaatccgccgcatccccctcaccatttgcttccccgaatacaagggacagaacacctatgaagaagctgctgtctatatccagcggcaatttgaggacctcaataggaacaaggaaacgaaggagatctattcccacttcacctgcgccaccgacacaagtaacattcaattcgtgtttgacgccgtaaccgatgtcatcattcagaacaatctgaagtacatcggcctgtgttag

SEQ ID NO: 119263 - DNA, 1188 bp, synthetic construct
  misc_feature 1..1188: note = Description of Artificial Sequence: Synthetic coding sequence
  source 1..1188: mol_type = other DNA
atgtgtgatcaaaccttcctggtgaatgttttcggtagttgcgataagtgcttcaagcagagagccttaagacctgtcttcaagaagtcacaacagcttagctactgttcgacatgtgctgagattatggcaacagagggcctgcatgagaacgaaaccttagccagtttgaaatcggaagcagagtccttaaaagggaagctggaggaggagagagctaagctgcatgatgtggaattgcatcaagtggcggagagagttgaggccctagggcagttcgtgatgaaaaccagacggactctgaagggccacggaaacaaggtcttgtgcatggactggtgcaaggataagcgccgcatagtatcatcttcccaggatggaaaagtgattgtctgggatagctttaccaccaacaaagaacacgcggttaccatgccctgtacctgggtcatggcttgcgcctacgccccctccggctgtgccattgcttgcggagggttggataataagtgttccgtatatcccctgacttttgataagaatgagaatatggccgccaagaaaaaatctgtggccatgcacaccaattatctgagtgcatgttcctttaccaattctgatatgcagattctgactgccagcggcgatgggacctgcgccctctgggatgttgagagcggtcaacttctccagagttttcacggacatggagcggatgtgctttgtctagatctggcccctagtgaaaccggaaatacattcgtgagtgggggttgtgataagaaggccatggtttgggacatgcgcagcgggcagtgtgtgcaggcttttgaaacccacgagtctgatatcaactcagtgcgctactatccaagtggagatgccttcgccagcggatccgacgatgccacttgcagattgtatgacctgagagccgatcgggaggttgccatctactcaaaagaatcaatcatttttggagcaagctcagtcgacttcagcctgtctggtcggttgctgttcgcaggctataatgattacacaattaatgtctgggatgtgttaaaggggtcccgggtcagcattctattcggccacgagaatcgggttagcacactgagggtgagcccagatggcaccgccttctgctcaggcagttgggatcacaccttgagggtatgggcttag

SEQ ID NO: 119264 - DNA, 1062 bp, synthetic construct
  misc_feature 1..1062: note = Description of Artificial Sequence: Synthetic coding sequence
  source 1..1062: mol_type = other DNA
atggctacagagggcctccatgagaacgagaccctggctagtctgaagtccgaagctgaatcgctgaagggaaaactcgaagaagaaagggcgaaactgcatgatgtggagctgcatcaagtggccgaaagagtggaagcattaggtcagttcgtcatgaaaactagaagaaccctgaagggtcacggtaacaaggtactgtgtatggattggtgcaaggataagcgaaggatagtttcctcttcacaggacggcaaggtaattgtctgggacagctttaccactaacaaggagcatgcggtgaccatgccatgcacttgggtgatggcctgtgcctacgcaccatccggctgtgccatcgcctgcggaggattggataacaagtgtagcgtgtatccgctgacattcgacaaaaatgagaatatggcagctaagaaaaagtctgtggccatgcatacaaattacctgagtgcctgctcatttaccaacagtgacatgcagatattaaccgcttcgggcgatgggacttgtgcgctgtgggacgtcgagagtgggcagctcctgcagtcgtttcacggacacggtgccgatgtcctctgtctggacctggctccctccgaaacgggaaatacatttgtatcagggggatgtgataaaaaggctatggtttgggacatgaggtctggccagtgtgtgcaggctttcgaaacccatgaatctgacattaacagcgtgcggtattacccttctggggacgcatttgctagtggctccgatgacgcaacctgtagactgtacgacctgcgagcagatcgggaagtggctatatattcgaaggaatctatcattttcggagccagttctgtggacttcagcttaagcggcagactcttattcgccggctacaacgactacactattaatgtctgggacgtactgaagggcagccgggtgagcattttattcggccatgaaaacagggtgtctacactgcgggtgtcacccgatgggaccgctttctgctcaggcagctgggaccatactctccgggtctgggcatag

SEQ ID NO: 119265 - DNA, 852 bp, synthetic construct
  misc_feature 1..852: note = Description of Artificial Sequence: Synthetic coding sequence
  source 1..852: mol_type = other DNA
atggcgaccgagggacttcatgagaatgaaacactggcttcattgaagtccgaggccgaaagcctgaaaggtaaactagaagaagaaagagctaagttgcatgatgtcgagttgcatcaggtggccgaacgggttgaggccttaggccagttcgtcatgaagacccgtagaacattaaaaggacacgggaataaagttctgtgtatggactggtgtaaagataaaaggaggattgtgagctcctcccaggatggaaaagtgatcgtttgggattcttttacaactaacaagatcctgactgcaagcggggacgggacttgcgcactgtgggatgtggagtccgggcaactactgcaatcattccatggccatggggccgacgttctgtgcctggatctcgccccctctgaaaccggaaatacattcgtgagcgggggctgtgataaaaaggcaatggtctgggacatgcggtcaggacagtgcgttcaggctttcgaaacccacgaatctgacattaactccgtgagatattatccatctggagacgcgttcgcctcaggctctgatgatgccacctgtcgactgtacgatctcagagcagatcgagaggttgcgatctactcaaaagaaagtataatttttggtgccagctccgttgattttagcctgagcggacgattgctgtttgccgggtacaatgattacaccattaacgtgtgggatgtcctgaaggggagcagagtttctatcctattcgggcatgaaaacagggtgagcactttacgggtctcccccgacggaaccgccttttgttcagggagctgggatcacaccctgcgagtttgggcatag

SEQ ID NO: 119266 - DNA, 582 bp, synthetic construct
  misc_feature 1..582: note = Description of Artificial Sequence: Synthetic coding sequence
  source 1..582: mol_type = other DNA
atgtccaagttgttgatccttattcttactgcatcaggagatgggacttgcgctctgtgggatgtcgaatctggccagctgctgcagagtttccacgggcatggagccgacgtgctttgtctggatcttgcgcccagcgagactgggaacaccttcgttagcgggggctgcgataaaaaagctatggtttgggatatgaggagtgggcagtgtgtgcaggcctttgagacacacgagtctgacatcaactctgttagatattacccctctggcgacgctttcgccagtggctctgatgacgcaacatgtaggctttatgatcttagagccgacagggaagtggccatatatagcaaggagtccatcatctttggggcaagcagcgtggacttttctttaagcgggcggttactgttcgctgggtataatgactataccatcaacgtctgggacgtgctgaagggttctagggtgtcgatcttatttgggcacgaaaaccgggtttcaacgctgagggtcagtcccgacggcacagcattttgcagtgggtcctgggaccacacactacgcgtttgggcctag

SEQ ID NO: 119267 - DNA, 1023 bp, synthetic construct
  misc_feature 1..1023: note = Description of Artificial Sequence: Synthetic coding sequence
  source 1..1023: mol_type = other DNA
atgagcgaactcgaccagctacgccaagaggcagagcagctcaagaatcagattcgggatgcaaggaaagcgtgtgcagacgctactctgtcccaaatcacaaataacatagatccagtgggtcggatccagatgaggaccaggcggactctgagaggccatctcgctaagatttacgccatgcattggggcacggacagtaggttactggtttctgcgtcacaggacggcaaactcataatttgggattcctacacgaccaacaaggtccacgctattcctctccgaagttcatgggttatgacttgtgcttacgcccctagtggaaactacgtggcatgtggcggactggacaacatttgcagtatctacaatttgaaaactcgtgaggggaatgtcagggtctcaagagagctcgcgggacataccgggtatctctcttgctgccggttcctggatgataaccagatcgttaccagctctggagataccacctgcgcactgtgggatatcgagacgggtcagcagacaacgacattcaccggacacactggagatgtaatgtccctctctctggctcccgatactaggttatttgttagcggggcctgtgacgcctctgccaagttgtgggacgtaagggaagggatgtgtcggcagactttcacaggccatgagagcgatataaacgccatatgtttcttccccaatgggaatgcttttgctaccggtagtgacgacgccacttgtcgccttttcgacctgagagctgaccaggagctgatgacttacagtcacgataacattatatgcgggatcactagtgtttcattctccaaaagcgggcgactgctcctggctggctatgacgactttaattgcaacgtatgggacgcactaaaggccgatagggccggtgtcctcgctggccatgacaaccgagtgagctgtctgggggtcacagacgacggaatggcagttgcgactggcagttgggatagctttctgaagatttggaattag

SEQ ID NO: 119268 - DNA, 1023 bp, synthetic construct
  misc_feature 1..1023: note = Description of Artificial Sequence: Synthetic coding sequence
  source 1..1023: mol_type = other DNA
atgtctgagctagaccagttaaggcaagaagcagaacagctaaaaaaccaaattcgggatgccagaaaagcttgtgctgatgctactctatcgcaaataacaaacaatattgatcccgtaggcaggattcaaatgcgtaccaggagaaccctaagggggcaccttgctaagatttacgctatgcactggggaacagattccagattgctggtttccgcctcccaggatggcaagctaattatttgggactcttataccaccaataaggtccacgctattcccctgcgatcttcatgggttatgacctgtgcctatgcgccctcagggaattatgttgcgtgcgggggcctcgacaatatatgttctatctataacctgaaaacgagagaagggaatgtcagggtctcccgagaactcgccggccatactggctacctgtcctgttgtcgcttcctggatgacaaccagatcgtgacaagttccggtgacaccacttgcgctctttgggacatcgaaacaggtcaacagaccacaacattcactggtcataccggggatgtaatgagtcttagtctcgctcccgatacgaggcttttcgttagtggcgcctgtgacgcttccgcaaagctgtgggatgtgagagaagggatgtgccgacagacatttacgggccacgagtccgatataaatgccatctgctttttccccaatggtaacgcctttgctactggaagcgacgatgcaacttgccggttgttcgatttgagggcggatcaggaactcatgacctacagtcacgacaacatcatatgcggaataactagcgtgtctttcagtaagagtggcaggctcctgctggcaggatatgacgacttcaactgcaatgtttgggacgcactcaaggccgatcgggccggcgtactggctgggcatgataacagagtgtcatgccttggggttaccgacgacgggatggctgtggccaccggatcatgggactcattcctcaaaatttggaactag

SEQ ID NO: 119269 - DNA, 597 bp, synthetic construct
  misc_feature 1..597: note = Description of Artificial Sequence: Synthetic coding sequence
  source 1..597: mol_type = other DNA
taaggctacttgtcatgttgtaggtttcttgatgacaatcagattgtgacgagcagcggcgataccacatgtgccctgtgggatatagagactggccagcagactaccacatttacagggcatacaggagatgtgatgagcttgagtctagctcccgacactcggctgtttgtgtccggcgcctgcgacgcatccgctaagctgtgggatgttcgggaaggcatgtgccgacagacatttacaggccacgagtcagatatcaacgctatctgtttttttccaaatggcaatgccttcgccactgggagcgatgatgctacgtgcaggctgttcgacctgagggccgaccaggaactcatgacatattcccatgacaacattatttgcgggatcacatctgtgtcattttccaagtccggccggcttctgctggccggctatgacgatttcaattgtaacgtgtgggatgctctaaaagcagaccgtgccggagtgctagccggacatgataaccgcgttagctgcctcggcgtcaccgatgatgggatggccgtggccacgggcagttgggactcctttctcaaaatatggaactag

SEQ ID NO: 119270 - DNA, 444 bp, synthetic construct
  misc_feature 1..444: note = Description of Artificial Sequence: Synthetic coding sequence
  source 1..444: mol_type = other DNA
atgagtgaattggaccagctgaggcaggaagccgaacagctgaaaaatcagataagggacgctcgcaaggcctgcgcagatgctactctcagccaaataaccaataatatagaccccgttgggcggatccagatgcgcactaggaggacattgagaggacatctcgccaagatttacgccatgcattgggggactgacagcagactgctagtctcagcatctcaagacgggaaactgatcatatgggactcttatacaactaacaaggtgcatgcaatacctctgaggtcctcttgggtcatgacatgtgcttatgcgcccagtggaaactacgtggcctgcggcggtttggacaacatctgcagcatctacaacttaaagaccagagagggcaatgtcagggtgtcccgtgagctggccggacacactggaacctgtccttag

SEQ ID NO: 119271 - DNA, 327 bp, synthetic construct
  misc_feature 1..327: note = Description of Artificial Sequence: Synthetic coding sequence
  source 1..327: mol_type = other DNA
atgtctgagctggatcagctgcgacaggaggccgaacagctgaagaaccaaattcgcgatgccagaaaggcctgcgcggacgctaccctgtcccaaatcaccaacaacatagaccccgttggccggattcagatgagaactcgacgtacgctgcgtggccatctggctaaaatttatgcaatgcattggggtaccgacagcagattactggtgtcggcttctcaggacggaaagctgatcatctgggacagctacactacaaataaggttcacgctatcccgttgcggagttcctgggtgatgacttgcgcctacgcccccagttag

SEQ ID NO: 119272 - DNA, 405 bp, synthetic construct
  misc_feature 1..405: note = Description of Artificial Sequence: Synthetic coding sequence
  source 1..405: mol_type = other DNA
atgtccgagctggaccaactcaggcaggaggccgagcaattgaaaaaccagatcagaataactaacaacattgaccctgtgggaagaattcaaatgcgtacacgccggaccctgaggggacatctcgctaaaatctacgccatgcattgggggaccgatagccgattactggtcagtgcgtcccaggacggtaagctgattatctgggattcctacacaaccaacaaagtgcacgcgatcccccttcgttccagctgggtgatgacttgtgcatacgccccatctggaaactacgtggcctgcggcggattggataacatatgttcaatttataacctcaaaactagggaggggaacgtgcgggtgagcagagaactagcaggacacaccggaacctgcccttag

SEQ ID NO: 119273 - DNA, 723 bp, synthetic construct
  misc_feature 1..723: note = Description of Artificial Sequence: Synthetic coding sequence
  source 1..723: mol_type = other DNA
atgacttgtgcatatgcccccagcggtaattatgtcgcgtgcggcgggctcgacaacatttgcagcatttataacctcaagacccgcgaaggcaacgtacgggtgtccagggaactggctggacataccgggtacctgagctgctgcagattcttggacgacaaccagattgtaaccagcagcggtgacactacctgcgcactgtgggatattgagactgggcaacagaccacaactttcacgggccatactggtgacgtgatgagtttatcacttgcccctgacacgagactgttcgtgtctggggcatgtgacgccagtgctaaactgtgggacgttcgggaaggcatgtgccggcagacatttacaggccatgaaagtgatataaacgctatttgtttcttcccaaacggtaatgccttcgccacaggatctgatgacgcaacctgtcggctcttcgatcttagggcagatcaggaattgatgacctactctcacgacaacattatatgtggcatcactagcgtaagtttttccaaaagcggtcgcctcctgttagcgggctatgacgacttcaattgtaacgtgtgggatgccctgaaggccgaccgggctggggtgcttgctggacacgataacagggtgtcttgtctgggcgtgactgacgatggcatggcagtggcaaccggcagctgggactcatttctgaaaatttggaactag

SEQ ID NO: 119274 - DNA, 984 bp, synthetic construct
  misc_feature 1..984: note = Description of Artificial Sequence: Synthetic coding sequence
  source 1..984: mol_type = other DNA
atgacagctccctgtcctcccccaccacctgatccacagtttgtccttcgcggaacacagagtccagtgcacgcattgcacttctgtgagggtgcacaggctcaaggcaggccgctgctgttttctggcagccagtctggactcgtccacatctggtcactacagacaagaagggcagtcaccacactcgacggccacgggggtcagtgcgtgacctggctgcagacactgccccagggtcgacagttgctgtcccaagggagggacctgaaactctgtctctgggacctggctgaaggccgctccgccgtggttgactctgtttgtctcgagagtgtcgggttttgtagatctagcatcctagccggcggccagcccaggtggacccttgccgttcccggtcgaggttccgacgaggtccagattttggagatgccaagtaagacaagcgtttgcgccttgaaaccgaaagccgatgctaagctcggcatgccgatgtgtctgaggctgtggcaggccgactgctccagtagaccactgcttttggccgggtacgaggatgggtctgtcgtcctctgggacgtctcagagcagaaggtatgcagtaggatcgcctgtcatgaggagccagtgatggacttagacttcgactctcaaaaggctagaggaatctccgggtctgccggaaaagcactggctgtgtggagcttggactggcagcaggccctccaggttaggggtactcacgaactgacaaacccaggaatcgctgaagtgacaataaggccggataggaagatattggcgaccgccgggtgggaccaccgtattagagttttccactggagaaccatgcagcccttggcagtcctggcatttcactcggccgccgtccaatgtgtggccttcaccgcggatgggctgctggccgcaggatccaaggatcagcggatctcactgtggagcttgtacccgcgcgcctag

SEQ ID NO: 119275 - DNA, 984 bp, synthetic construct
  misc_feature 1..984: note = Description of Artificial Sequence: Synthetic coding sequence
  source 1..984: mol_type = other DNA
atgaccgcaccttgcccgcctccacctcccgaccctcagtttgtgctgagaggaacgcaatccccggtccacgcgctgcatttctgcgaaggcgcgcaggcccagggtcgccctctccttttctccggatcgcaatccggcctggtgcacatttggtccttgcaaacaaggagagctgtgactaccctggacggacatggcggccagtgtgtcacttggctgcagacattgccgcaggggaggcaactcctctcccaggggcgagacctgaaactttgcctgtgggacttggccgaggggagatctgcggtggtggatagcgtttgtctcgaatctgtggggttttgtcggagttccatcttggctggaggccagccgcggtggaccttggcggtaccaggcaggggatcagatgaagtccagattctggagatgccctccaaaacaagcgtgtgcgctcttaaacctaaggctgacgccaagctcggtatgcctatgtgccttaggctctggcaagccgattgttctagccgaccactcctgttggctggttacgaggacggttcagtggtcctgtgggacgtgagcgagcagaaggtgtgcagtcggatcgcatgccacgaggagcccgtgatggatttagattttgactcacagaaggcccgcggaatcagtggttctgcaggcaaagctttagcggtctggtccctggactggcagcaggccctgcaagttagagggacccatgagctgactaatcctggaatcgcggaggttaccatacgaccagaccgcaaaatccttgctaccgcaggttgggaccacagaatccgggtttttcattggcgcacgatgcagcccctggccgttctggccttccacagtgccgcagttcagtgtgtggcatttaccgccgatggcttactggccgccggctctaaggaccaacggatctccctgtggtctttgtatccacgagcatag

SEQ ID NO: 119276 - DNA, 639 bp, synthetic construct
  misc_feature 1..639: note = Description of Artificial Sequence: Synthetic coding sequence
  source 1..639: mol_type = other DNA
atgaccgctccttgtcctcctcctccacccgaccctcagttcgtactacgcgggacccaatctcccgtgcacgctttacacttctgcgaaggagctcaggcccagggaaggccacttttattcagcggtagccagagtggacttgtgcatatctggtcacttcagactcgacgggccgttaccacactcgatggtcatggaggccaatgcgtgacctggctgcagaccctgccacagggccgacagctgctctctcaagggcgagatctgaaattgtgtctttgggaccttgctgaggggcgctccgccgtcgtggactccgtctgcctggagtctgttggattctgtcggtctagtatactggctggagggcaaccccgctggaccttggctgtgccaggaagagggtcagacgaagtacagatcctggaaatgcctagcaagacttcggtgtgcgctttgaagcccaaagccgatgccaagctgggcatgcctatgtgcctgaggctttggcaggctgactgttcatcccggcccctgcttctggccggctacgaggatgggtcagtcgtgctttgggatgtgagcgaacagaaggtttgctcccggattgcatgtcatgaagaacccggactttag

SEQ ID NO: 119277 - DNA, 1023 bp, synthetic construct
  misc_feature 1..1023: note = Description of Artificial Sequence: Synthetic coding sequence
  source 1..1023: mol_type = other DNA
atgtccgagttggagcagctccgacaagaggccgagcagctgcggaaccagattagggatgcgcgaaaagcctgtggggacagcaccctgacccaaatcactgctggactggatcccgtggggaggattcaaatgcggacccggaggaccctgagaggacacctcgcgaaaatttacgccatgcactgggggaccgattctagactgttagtcagcgcttcacaggatggcaaattaataatctgggattcctacaccacaaacaaggtgcacgccatccccctgcgaagcagctgggtgatgacctgcgcttacgctccgtcaggaaactttgttgcttgtggtggcttagataacatctgtagcatatactcattgaagacgcgcgaaggcaacgtgagagtgagccgtgagctgcctgggcacacagggtacctatcatgttgccggttccttgatgacaatcaaataatcaccagttccggggatactacctgcgctctttgggacatcgagacaggtcagcagaccgtgggcttcgcaggccactccggagacgtaatgtctctctccctcgcccctgacggaagaacctttgtgtcgggagcatgtgacgcaagcataaagctgtgggacgtgcgggactcgatgtgccgtcagacgtttattggccacgagagtgacattaatgccgtggcattctttcccaacgggtatgcttttaccactggatccgacgacgcgacctgcaggctttttgacctacgcgcagaccaagagctacttatgtactctcatgacaacattatctgcggaatcacatcagtggcttttagtaggtctggcaggctgctgcttgccgggtacgacgactttaactgtaacatctgggatgcaatgaagggggatcgcgcaggagtgcttgccggccatgacaaccgggtctcatgtttgggggtaacagatgatggcatggctgtcgctacaggaagttgggattcctttttgaagatttggaattag

SEQ ID NO: 119278 - DNA, 1023 bp, synthetic construct
  misc_feature 1..1023: note = Description of Artificial Sequence: Synthetic coding sequence
  source 1..1023: mol_type = other DNA
atgagcgaattggagcagctgaggcaggaggcagaacagcttcggaaccaaatccgggatgcacgtaaggcatgcggtgactcaacactgactcagatcacggcggggctggatcccgtcggcaggatccagatgcggacacggcgcacgctgagagggcacctcgccaaaatctacgccatgcactgggggactgatagtcgcctactcgtgtctgctagccaagatgggaagctcattatctgggacagttataccactaataaagtacacgcgatcccacttcgatcctcctgggtaatgacctgcgcctacgctccctctgggaattttgtggcttgcggtggattggacaatatttgttccatttatagcttaaagacccgggagggcaatgttcgggtgtcacgggagcttcctggccacaccggatatctgagttgttgcagattcctggatgataatcagataatcacaagcagcggtgacacgacctgcgcattatgggatatcgaaactgggcagcaaaccgtgggtttcgcaggacacagcggtgacgtcatgagcctgtcccttgctcccgacggcagaacatttgtgtccggcgcctgtgatgcgagcattaaactctgggacgttagggatagtatgtgtaggcagacgttcatcggccacgaatctgatataaatgcagtggcattttttcccaatgggtacgccttcacaactgggtctgacgacgccacttgccgcctcttcgacttaagggccgaccaagaactactgatgtattcccacgataatatcatttgcgggattacgtcagtcgctttctctcggagtggacggctgctgctggctggttacgacgatttcaattgcaatatctgggacgccatgaagggcgacagggcgggggtgcttgccggacacgataatagggtgtcttgtttaggagtgaccgatgacggaatggctgtcgctacggggagttgggattcttttttgaaaatctggaattag

SEQ ID NO: 119279 - DNA, 1023 bp, synthetic construct
  misc_feature 1..1023: note = Description of Artificial Sequence: Synthetic coding sequence
  source 1..1023: mol_type = other DNA
atgagtgagctcgagcagttacgccaagaggcagagcaactgcgcaatcaaattagggacgctaggaaggcttgcggcgacagcactctcacacagatcacagccggtctcgaccccgtcgggaggattcagatgcggaccagacgaacactgcggggccatctggcaaagatatacgccatgcattgggggaccgactcacggctcctggtgtcagcctcccaggacggcaaattgatcatctgggattcttataccacaaataaagtacatgctatacctttgcggtcttcctgggtaatgacatgcgcatatgctccgagcggcaacttcgtggcctgtggagggctggataacatctgtagcatttacagcttgaagacgagagaggggaatgtgcgagtgtcccgggaattacccggccacacaggttacctgtcttgttgccgcttcctggatgataatcaaattatcacgagcagcggcgacacgacctgcgcactctgggatatcgagaccggacagcaaaccgtaggcttcgctggacattcaggtgacgtcatgtccctgtccctggcaccagatggtcgcacatttgtctccggagcctgcgacgcctcgataaagctctgggacgtccgcgactctatgtgtagacagacgtttatcggtcacgagtccgacatcaatgctgtcgccttcttccccaacggctatgcctttaccaccggatcggacgacgcaacgtgtcgactgttcgacttgcgagccgatcaggagctgctgatgtattcccacgataacataatctgtgggatcacaagtgttgcattctcccgtagtggcagactgctgctggccgggtatgatgactttaactgtaatatctgggatgctatgaagggagaccgtgccggagtgctggccgggcatgataatagagtgtcctgtctgggcgtcactgatgacggcatggccgtcgccactggatcttgggattctttcctgaagatttggaactag

SEQ ID NO: 119280 - DNA, 459 bp, synthetic construct
  misc_feature 1..459: note = Description of Artificial Sequence: Synthetic coding sequence
  source 1..459: mol_type = other DNA
atgtctgaattggagcaattgcgacaggaggccgagcaactaagaaaccagattcgtgacgcccgcaaagcgtgcggcgatagcacattaacacagatcaccgcaggcctcgatccggtgggcaggattcagatgagaactcggagaactctgcggggtcacttggccaagatctatgcgatgcattggggtacagactctcggttgttggtgagcgccagccaggacggcaagctgattatttgggacagttacaccaccaacaaagtgcatgctattccactaaggtctagttgggttatgacttgtgcgtacgctccctccgggaattttgtggcctgcggcggcttagataacatttgctccatttattctctgaagaccagagaaggcaacgtgcgtgtgagtcgggagctgcctggccacaccggatatttatcctgctgccgcttcctgtag

SEQ ID NO: 119281 - DNA, 723 bp, synthetic construct
  misc_feature 1..723: note = Description of Artificial Sequence: Synthetic coding sequence
  source 1..723: mol_type = other DNA
atgacttgtgcctatgcccccagtggaaacttcgtggcctgcgggggcctggataacatttgtagtatttattcgttgaagaccagggagggcaacgtcagggtgagtagagaattaccaggacacactggatatcttagctgctgccgtttccttgatgataaccagattatcacaagctctggggacacaacatgcgccctatgggatatcgaaaccggccagcagaccgtggggtttgctggacattccggcgacgtcatgagtctgagcctcgcgccggacggtcgaactttcgtgagcggagcctgcgatgcaagcatcaagctgtgggatgttcgggattctatgtgtcgccagacattcattggtcacgagtctgatataaatgctgtagctttcttccccaacggctatgcatttactacaggatctgatgacgctacttgtcgcctcttcgatctgcgggctgatcaggagcttttaatgtattcccatgataatataatatgtggtattaccagcgtagcgtttagccgtagcgggaggctgctgctggcagggtatgatgatttcaactgcaacatttgggatgcaatgaagggagatcgagccggggtgttagccggtcacgataacagagtcagctgcctaggggtaaccgatgacggcatggccgtcgccaccgggagttgggattcctttttaaagatatggaactag

SEQ ID NO: 119282 - DNA, 891 bp, synthetic construct
  misc_feature 1..891: note = Description of Artificial Sequence: Synthetic coding sequence
  source 1..891: mol_type = other DNA
atgcggactaggaggaccctgcggggccacctggcaaaaatttatgcaatgcactgggggaccgacagtcgcctgctggtgagcgcctcacaggatggcaagttgattatatgggacagctatactacgaataaggtgcatgcgataccgctaagaagctcatgggtaatgacttgcgcgtacgcgcctagcggaaattttgtcgcgtgtgggggcttggataacatttgtagcatttactctctcaaaacccgggaaggcaacgtccgcgtcagtcgagagctacccgggcataccgggtatctctcctgttgccgtttcctcgatgacaaccagattataacttcctctggggatacaacatgcgctctgtgggacatcgaaactggccagcaaaccgtaggcttcgcaggacattcaggagacgtcatgagtctgtcgcttgcgccagatggcaggacattcgtcagcggggcctgtgacgcttctattaaactgtgggatgtccgtgactccatgtgcagacagacatttatcggccatgagagcgacataaatgccgtggctttcttcccaaacggatacgcttttactacgggcagcgatgacgctacttgtaggctgttcgatctcagggctgaccaagagttgctgatgtacagccatgacaacatcatctgcggtattacctcagtggcattctcaaggtcaggtcggctgttgctggcgggctacgacgattttaattgtaatatatgggatgccatgaagggggacagagcgggcgtcttagccggacacgacaatcgggtctcatgcttgggcgttaccgacgacggaatggcagtcgctactggcagctgggacagttttcttaagatctggaactag

SEQ ID NO: 119283 - DNA, 723 bp, synthetic construct
  misc_feature 1..723: note = Description of Artificial Sequence: Synthetic coding sequence
  source 1..723: mol_type = other DNA
atgacttgtgcttatgctccctcagggaactttgtcgcttgcgggggcctagacaacatatgtagtatttacagcttaaagaccagagaaggtaatgttcgcgtcagtcgtgagctccccggacacacggggtacctttcctgctgccgcttcttggacgataaccagatcattacctccagcggtgacaccacgtgtgctctgtgggacatcgagactggccagcagacagtggggttcgccgggcacagtggtgatgtcatgtctctaagcctcgcacccgatgggcgcaccttcgtgtctggggcttgcgacgccagtatcaaactttgggacgtccgtgattctatgtgccgacagacctttatcggacacgagtcagacataaatgctgtggccttttttcctaatggatacgcatttacaaccgggagcgatgatgccacttgtcgcctgtttgacctgagagctgaccaagagctcctgatgtacagccacgacaacattatatgtggaatcaccagcgtcgcgttcagcagaagtggacggctgttgctggccggctatgatgacttcaactgcaatatctgggatgcaatgaagggggaccgcgccggagtactggctgggcacgataatagagtttcttgcctaggggtcactgatgacgggatggcagtggcaactggtagttgggactcatttttgaaaatatggaattag

SEQ ID NO: 119284 - DNA, 699 bp, synthetic construct
  misc_feature 1..699: note = Description of Artificial Sequence: Synthetic coding sequence
  source 1..699: mol_type = other DNA
atgagcgaactggaacagctgcgccaggaggcagaacagctccgaaatcagatccgggatgcaagaaaggcctgtggtgacagcacgctcactcagattaccgccggactcgatcctgtcggacgcatacaaatgcgtacaagaagaaccctaaggggacacctagctaagatttatgccatgcactgggggacagattcaaggcttctcgtgagcgcgtctcaggacggaaagctgatcatttgggactcgtacactacgaataaggtccatgcaatcccactgcgatcgtcttgggttatgacttgcgcctacgcacccagcggaaatttcgtagcctgtggaggtctcgataacatatgctctatttacagcctgaagacgcgagaaggcaatgtaagggtgagccgagaactccctgggcataccgggtatctgtcatgctgtagattcctcgacgacaatcagattataacaagctcaggtgacactacttgtgcgctgtgggacatcgagaccggccagcagacagtcggctttgccgggcactctggggacgtcatgtcgctgtctctggcccctgatgggagaacctttgtgagtggcgcatgcgacgcatcgatcaagctctgggacgtccgcgatagcatgtgtagacagacctttatcggtcacgaatccgacatcaacgccgtgtag

SEQ ID NO: 119285 - DNA, 891 bp, synthetic construct
  misc_feature 1..891: note = Description of Artificial Sequence: Synthetic coding sequence
  source 1..891: mol_type = other DNA
atgagaactcgacggactctacgcgggcacctggctaagatctatgccatgcattggggtacagatagtcgccttctggtgagcgcctcccaggacggcaagctcattatatgggacagctatacgacgaacaaggtgcatgccattcccctgaggagctcgtgggtcatgacctgcgcctacgccccaagcggcaattttgtggcttgtggcgggctggataatatatgttccatctactccctgaaaactcgggagggcaacgttagggtgagcagggaattgcctggccatacaggctatctgtcttgttgcaggtttctggatgacaatcagatcataaccagcagtggcgacacgacttgtgctctctgggacatcgagactggacagcaaacagtcggatttgccggccatagcggcgacgtgatgtccctcagcttagcccccgacggacgcacctttgtgagcggcgcttgtgacgcatcaattaagctgtgggacgttcgggactctatgtgtaggcagacctttataggccacgagtccgacattaatgctgttgcatttttccctaacggatacgcattcaccacagggtctgacgacgccacctgccgtctcttcgatctgagagcagaccaggagctcttgatgtactctcatgacaatataatttgcggcatcacttccgtggcgttcagtcgctccggacgcctcctattggctggatacgacgactttaactgcaacatttgggacgccatgaaaggggatcgagcaggtgtactcgcgggtcatgataaccgtgtctcatgcttaggagtcaccgatgacggcatggccgtggcaaccgggtcttgggactcctttctgaagatctggaactag

SEQ ID NO: 119286 - DNA, 756 bp, synthetic construct
  misc_feature 1..756: note = Description of Artificial Sequence: Synthetic coding sequence
  source 1..756: mol_type = other DNA
atgagcgaactggagcaactccgccaggaggccgagcagctccgcaatcagatccgcgacgctcgcaaagcctgtggggactcaaccctgacacagatcaccgctggcctcgaccctgtggggcgaatccagatgcgcacccgcaggacactgcgcgggcacctcgctaagatctatgcaatgcactggggaaccgatagtagactgctggttagcgcttcccaagacgggaaactgatcatctgggattcttatactacgaataaagtgcacgccataccattgcggagcagctgggttatgacctgcgcgtatgcccctagtggtaattttgttgcttgtggagggcttgacaatatatgctccatttactccctcaaaacccgcgagggaaacgttagagttagtcgagaattgcccgggcacaccggctacctctcgtgttgtcgcttcttggacgacaaccagattattaccagctccggtgatactacgtgtgctctgtgggacattgagacaggccagcagactgtcggttttgccggacattcgggcgacgtaatgagcctgtccctcgcccctgatggccggacttttgtgagtggagcctgtgacgccagcattaagctatgggacgtgcgggacagcatgtgcagacagactttcatcggccacgaatcagatatcaacgctgtggcgttttttcccaatgggtatgcatttaccactggatccgatgatgctacttgtaggtag

SEQ ID NO: 119287 - DNA, 828 bp, synthetic construct
  misc_feature 1..828: note = Description of Artificial Sequence: Synthetic coding sequence
  source 1..828: mol_type = other DNA
atgagtgccgaagtgaaagtaaccggccagaatcaggagcagtttctgctgttagccaaatccgccaagggcgccgctttagcaacgctgatacaccaggtgctcgaagctccaggtgtatacgtttttggggaattgctggatatgccgaacgtgcgcgaactggccgagagcgactttgccagcacattccggctcttgaccgtgtttgcctacggcacttacgcagattatctggcagaggcacgcaatcttccccccctcaccgaagcacagaagaataagctgaggcaccttagcgtggtaactttggcagcaaaagtgaagtgcattccatacgctgttttgctggaggctctggcactgcgaaatgttcgtcagttggaggacttggtgattgaagcagtctatgccgacgtgctgcggggttccttggatcagcggaatcagcgactcgaagtcgactactctatcggacgcgacatccagcgacaggatctaagtgccatagccagaacattgcaggaatggtgcgtggggtgtgaggtagttctgagtggcattgaagagcaagtgtccagggcgaaccagcataaggaacaacagctcggactgaagcagcagattgaatctgaagtggccaatctgaagaaaactattaaagtgacaaccgccgcagccgccgcagctaccagtcaggacccagaacagcacctcacagaactgagagaaccagctccagggactaaccaacggcagcccagcaaaaaagctagtaagggtaaaggactgcgggggtccgccaagatctggtctaaatcaaactag

SEQ ID NO: 119288 - DNA, 387 bp, synthetic construct
  misc_feature 1..387: note = Description of Artificial Sequence: Synthetic coding sequence
  source 1..387: mol_type = other DNA
atgacgagtctgtttgcacaggaaattcgtctttccaaacggcacgaagaaatagtgtcccagcggctcatgctcctgcagcagatggaaaacaaattgggtgatcaacacacggaaaaggcctcccagctccagaccgttgaaacagccttcaagcgcaacctatctctgctcaaagacattgaggctgccgaaaagagcctgcaaactcggattcaccccctaccccgtccagaagtagtgtcccttgaaacccggtactgggcatctgtggaggaatatatccctaagtgggagcagttcctactcggacgcgccccctatcctttcgctgtggagaatcagaatgaagctgaaaacactattcagaacgaggcacaaaggtag

SEQ ID NO: 119289 - DNA, 1023 bp, synthetic construct
  misc_feature 1..1023: note = Description of Artificial Sequence: Synthetic coding sequence
  source 1..1023: mol_type = other DNA
atgagtgagctagaacagctgaggcaggaggctgagcagctgcggaaccagattcaggacgccagaaaggcctgtaatgacgccacactggtccagattacgtcaaacatggactccgtgggccgcattcagatgcggacccgtcgtacacttagaggccacctcgcaaagatctatgccatgcattggggatacgactccaggctccttgtctcagcttctcaggacggcaaactgatcatctgggattcttacaccacaaataaaatgcacgcgattccactgcgcagttcctgggtgatgacctgcgcttacgccccttcggggaactacgtggcctgtggtggtctggataacatttgttccatctataaccttaaaactagagaaggtaatgtgcgcgtttcacgggaactgcccggccacacgggatatctaagctgttgccgcttcctcgatgactctcagattgttacatcttctggtgacaccacatgcgctctgtgggatattgagaccgcgcagcagaccactacctttacgggccacagcggggacgtgatgtccctgtcactgagtccagatatgaggacattcgtatcgggagcgtgcgatgcctcgtccaaattgtgggacatccgcgacgggatgtgtcggcaaagctttacagggcacgtatctgatattaacgccgtttcattcttccctaacggatatgccttcgccactgggagtgacgatgctacatgccggctcttcgacctgcgtgccgaccaggaattgctgctgtatagccacgacaatatcatttgcgggattaccagcgtggcattcagcaaatctggacgactcctcctagctggctacgacgattttaactgtaatgtatgggacacactgaagggagatcgcgcaggtgtcctcgccggacacgacaaccgggttagttgcctcggggtaaccgacgacggaatggccgtggccacgggaagctgggattcctttcttaggatctggaattag

SEQ ID NO: 119290 - DNA, 240 bp, synthetic construct
  misc_feature 1..240: note = Description of Artificial Sequence: Synthetic coding sequence
  source 1..240: mol_type = other DNA
atgtcggaactcgagcagttacgccaagaggctgagcagctccgaaatcagattcaggacgcgaggaaggcatgcaacgacgctactctggttcagattacctccaacatggacagtgtgggcagaattcagatgcgcacccgtaggacacttcgcggccatctggccaaaatttacgcaatgcactgggggtacgactctcgcctgctggtgtcagcttctcaggatggcaaactgtag

SEQ ID NO: 119291 - DNA, 204 bp, synthetic construct
  misc_feature 1..204: note = Description of Artificial Sequence: Synthetic coding sequence
  source 1..204: mol_type = other DNA
atggaggagtgggacgtgccccagatgaaaaaagaggtggaatcgttgaaatatcagcttgcttttcaacgcgaaatggctagtaagacaattccagagctgctcaagtggattgaggatggcataccaaaagaccccttcctgaaccctgatctcatgaagaataacccctgggtggagaaaggaaagtgcacaatcctttag

SEQ ID NO: 119292 - DNA, 216 bp, synthetic construct
  misc_feature 1..216: note = Description of Artificial Sequence: Synthetic coding sequence
  source 1..216: mol_type = other DNA
atggctagcaacaatacagcttcaattgcgcaggccagaaagttggtagagcagctcaagatggaggccaatattgatagaattaaagtttccaaagcagcggcggacctgatggcttactgtgaagcccacgcaaaagaggacccattattaacccccgtgcccgcttctgagaatccatttcgcgagaagaaattcttttgtgccattttatag

SEQ ID NO: 119293 - DNA, 309 bp, synthetic construct
  misc_feature 1..309: note = Description of Artificial Sequence: Synthetic coding sequence
  source 1..309: mol_type = other DNA
atgcaggggaaattacagccgcctatggaaagagaggcccgtgacggggtgccgtccgggaaggtattcctgaaagacctgtcgtcgacgcccatggcctcaaacaacactgcatccatcgctcaagctcggaaacttgttgaacagctaaagatggaggccaatatagaccgcattaaagtttccaaagctgctgccgacctgatggcatactgtgaggctcacgctaaagaggacccgttgctgacccctgtgcccgcatctgagaacccgttcagagaaaaaaagttcttctgcgccattctgtag

SEQ ID NO: 119294 - DNA, 216 bp, synthetic construct
  misc_feature 1..216: note = Description of Artificial Sequence: Synthetic coding sequence
  source 1..216: mol_type = other DNA
atggcctctaacaacacggcctcaattgcgcaggcaagaaaactggtcgagcagctcaagatggaggctaacatagacagaatcaaagtcagcaaggctgccgcagatctcatggcctactgcgaagcccacgcgaaggaagatccacttctaactcccgtacccgctagtgagaacccatttcgcgaaaagaagttcttttgcgcaatcctgtag

SEQ ID NO: 119295 - DNA, 216 bp, synthetic construct
  misc_feature 1..216: note = Description of Artificial Sequence: Synthetic coding sequence
  source 1..216: mol_type = other DNA
atggcctccaataataccgctagcatcgcacaggctagaaagctggttgaacagctcaagatggaggctaacatcgaccgcattaaagtttcaaaggccgctgcagaccttatggcatactgcgaggctcatgctaaggaggatcctttgctgacccccgtgcccgccagcgagaacccgttccgggagaaaaagtttttctgcgccattctctag

SEQ ID NO: 119296 - DNA, 216 bp, synthetic construct
  misc_feature 1..216: note = Description of Artificial Sequence: Synthetic coding sequence
  source 1..216: mol_type = other DNA
atggcaagcaacaatacagctagcattgctcaggcccggaaattggttgaacagttaaagatggaagctaacattgacagaattaaggtgtcaaaggccgcagcagatcttatggcatattgcgaggcacacgcaaaggaggaccctctgcttacacccgtcccagcatcagagaatccgttcagagaaaagaagttcttctgcgccattctatag

SEQ ID NO: 119297 - DNA, 216 bp, synthetic construct
  misc_feature 1..216: note = Description of Artificial Sequence: Synthetic coding sequence
  source 1..216: mol_type = other DNA
atggccagcaataacacggcatctattgcccaggccagaaagctggtcgagcaacttaagatggaggccaacatcgaccgaatcaaggtgtccaaggctgccgccgatctcatggcttattgcgaggcacatgccaaagaggatccgcttctgactcctgtgccagcctcagaaaatcccttccgggagaagaaatttttttgcgcaatactgtag

SEQ ID NO: 119298 - DNA, 333 bp, synthetic construct
  misc_feature 1..333: note = Description of Artificial Sequence: Synthetic coding sequence
  source 1..333: mol_type = other DNA
atggtatatctgcaggcaaagacgaggatccctgaacaccgcaaggtgacacagctgatcaagtgttggtcccccgacttgaacccagtgttccttaaagatttgtccagtactccaatggcttctaacaataccgcatccatcgcacaggcaagaaagctggtggagcagctgaaaatggaggcgaacattgatcgaattaaagtcagcaaagccgccgccgatttgatggcatattgtgaagctcatgctaaggaagaccccctgctgactccagtccccgcgagcgaaaacccatttcgagagaagaagtttttctgcgcaatcttgtag

SEQ ID NO: 119299 - DNA, 207 bp, synthetic construct
  misc_feature 1..207: note = Description of Artificial Sequence: Synthetic coding sequence
  source 1..207: mol_type = other DNA
atgagcggatcctcatccgtcgctgccatgaagaaagtagtccagcagctgcgccttgaggccggattgaaccgcgtcaaggtctcacaggcagccgcagatctgaagcagttctgccttcaaaatgctcagcatgatcctctcctcaccggggtctcctccagcacgaacccctttcggccccaaaaggtgtgctcattcttgtag

SEQ ID NO: 119300 - DNA, 207 bp, synthetic construct
  misc_feature 1..207: note = Description of Artificial Sequence: Synthetic coding sequence
  source 1..207: mol_type = other DNA
atgtctggatcctcaagcgttgcagccatgaaaaaggttgtgcagcagcttcggctcgaagcgggactaaacagggtgaaggtgtcccaggccgcggctgacttgaaacagttctgtctccagaacgcccagcacgaccctcttctcaccggcgtgtcctcatcaaccaatccattccgcccccagaaggtatgcagctttctctag

SEQ ID NO: 119301 - DNA, 225 bp, synthetic construct
  misc_feature 1..225: note = Description of Artificial Sequence: Synthetic coding sequence
  source 1..225: mol_type = other DNA
atgcctgtaattaatatagaggacttgaccgagaaggacaaactgaagatggaagtggatcaactgaaaaaagaggtcacgctggaaagaatgctagtttccaagtgctgcgaggaagtgagggattatgtggaagagcggagcggagaggacccacttgtgaagggaatacctgaagacaagaacccctttaaggagctgaaaggaggatgtgtcattagttag

SEQ ID NO: 119302 - DNA, 225 bp, synthetic construct
  misc_feature 1..225: note = Description of Artificial Sequence: Synthetic coding sequence
  source 1..225: mol_type = other DNA
atgccagtgattaatattgaggacctgactgaaaaggataaactcaagatggaagtagatcagcttaagaaggaagtgacacttgagagaatgctcgtgagtaagtgttgcgaagaggtgagagattatgtggaagaacgcagtggtgaagatccacttgttaaggggatcccagaagataagaacccattcaaagagctgaagggcggctgcgtcatctcctag

SEQ ID NO: 119303 - DNA, 210 bp, synthetic construct
  misc_feature 1..210: note = Description of Artificial Sequence: Synthetic coding sequence
  source 1..210: mol_type = other DNA
atggcacaagatctcagcgaaaaggacctgctaaaaatggaagtcgagcagctcaagaaggaggtgaaaaacacgagaatccccataagtaaggctggcaaggagatcaaggagtacgttgaggcccaggcagggaacgatcccttcctgaagggcattcctgaggataaaaacccttttaaggagaagggcgggtgtctgatttcatag

SEQ ID NO: 119304 - DNA, 210 bp, synthetic construct
  misc_feature 1..210: note = Description of Artificial Sequence: Synthetic coding sequence
  source 1..210: mol_type = other DNA
atggcccaggatctgtcggagaaagatctcctgaagatggaggtggaacagctgaagaaggaggtgaagaatacccggattcccatttctaaagccggcaaagaaatcaaagaatatgtcgaggcccaggctggaaatgatccgttccttaaggggatccctgaagataaaaacccatttaaggagaagggaggatgtctgatttcttag

SEQ ID NO: 119305 - DNA, 210 bp, synthetic construct
  misc_feature 1..210: note = Description of Artificial Sequence: Synthetic coding sequence
  source 1..210: mol_type = other DNA
atggctcaggacctgagtgagaaagacctcctaaagatggaagttgagcagctgaaaaaagaggtcaaaaacacaagaattcctatctcaaaggccggaaaagaaattaaggaatatgtagaggctcaggccggcaacgacccctttcttaagggcattccagaagataaaaaccccttcaaagagaagggaggctgcctgatatcatag

SEQ ID NO: 119306 - DNA, 210 bp, synthetic construct
  misc_feature 1..210: note = Description of Artificial Sequence: Synthetic coding sequence
  source 1..210: mol_type = other DNA
atggcccaggacctgtccgagaaggacctgcttaagatggaggttgagcagctcaaaaaagaggtaaaaaatacgagaattccaatctcgaaagcagggaaggagatcaaagaatacgtcgaggcccaggctggcaatgatcccttccttaaaggcatcccagaggacaaaaatcctttcaaggagaaagggggatgcctgattagctag

SEQ ID NO: 119307 - DNA, 210 bp, synthetic construct
  misc_feature 1..210: note = Description of Artificial Sequence: Synthetic coding sequence
  source 1..210: mol_type = other DNA
atggctcaggatcttagtgagaaagatctattgaagatggaagtggagcagctgaagaaagaagtcaagaacaccaggattcccatatccaaggcaggtaaagaaatcaaagaatacgttgaagcccaggcggggaatgatcccttcttgaaggggatccccgaggataagaatccattcaaggaaaaaggaggctgtttaatcagttag

SEQ ID NO: 119308 - DNA, 1080 bp, synthetic construct
  misc_feature 1..1080: note = Description of Artificial Sequence: Synthetic coding sequence
  source 1..1080: mol_type = other DNA
atgacactcgagtccattatggcgtgctgcctttccgaggaggctaaggaggccaggaggatcaacgatgaaatcgagcggcagctgcgacgcgacaagcgcgacgcccgcagagaactaaagctgctgttactgggtacaggcgagagcgggaagtccaccttcatcaagcagatgcgcataatccacgggagtggctacagtgatgaagacaagagggggttcaccaagctggtgtatcaaaatatctttaccgctatgcaggccatgattcgagccatggatactctgaagataccatataagtatgaacacaacaaggcccacgctcagttggtgagggaggtcgatgtggaaaaggtctccgcattcgagaatccatacgtcgatgcgatcaagagtctgtggaacgacccaggaatacaggagtgttacgacagacgacgagaatatcagttatccgactctacaaaatactaccttaacgatttggaccgcgtggctgacccggcctatctacctacccagcaggacgtgctgagggtacgtgtccccacgacgggtattattgaatatcccttcgacctccagtcagtcatcttcaggatggtagatgttggcgggcagagaagtgaacgcagaaagtggatccactgttttgagaatgtgacaagcattatgttcctcgtcgctctgtcagagtatgatcaagtgctcgtcgagtccgataatgagaaccggatggaggagtccaaggctcttttccgtacaataattacctacccctggttccagaattcgtccgttattttattcctgaacaagaaagatcttttggaggagaagattatgtactcacatttagtagactatttccctgagtacgatggaccacagcgcgacgcccaagcagccagagaatttattttgaaaatgttcgtcgacctcaaccccgattctgacaaaataatttactcccactttacttgcgccaccgatacggaaaatatccggtttgtattcgcagccgtgaaggacaccattctgcagttaaacctgaaagaatataatttagtctag

SEQ ID NO: 119309 - DNA, 474 bp, synthetic construct
  misc_feature 1..474: note = Description of Artificial Sequence: Synthetic coding sequence
  source 1..474: mol_type = other DNA
atggtagatgtgggcggccaaagatcggaacgcagaaagtggatacactgcttcgagaacgtgacttccatcatgttcctggtggcgttgtcagaatacgaccaggtgctggtagaatctgacaacgagaaccggatggaagaatcaaaggctttgtttaggaccataatcacatacccctggtttcagaatagctcagtgatattgtttttgaacaaaaaggacctcctggaggagaagatcatgtattcccaccttgtagactattttcccgaatatgacggtccacaacgtgatgcacaggcagccagagagtttattctgaaaatgtttgtggaccttaacccagacagcgacaagatcatctacagtcacttcacttgcgccacagataccgagaatattagattcgtgtttgctgccgtgaaggacaccatcctacagctgaatctcaaggagtacaatctcgtctag

SEQ ID NO: 119310 - DNA, 513 bp, synthetic construct
  misc_feature 1..513: note = Description of Artificial Sequence: Synthetic coding sequence
  source 1..513: mol_type = other DNA
atgggtgagcgctgggcggactcccagctggatagcaggtctacccatgggacaggagagtctggaaagtcaaccttcattaagcagatgcgaatcatccacggctccgggtactcagacgaagacaagcgtggattcaccaaactggtataccagaacatcttcacagcgatgcaggctatgattagagctatggacacactcaagatcccttataagtacgaacataacaaggcgcatgcccagctcgtgagggaagtggacgtcgagaaggtcagcgcatttgaaaatccttacgtagacgcaattaagagcctgtggaacgatcccggaatccaggaatgctatgatcggagacgggaataccaactgtctgactcaacaaaatattacctcaacgacctggacagagtagccgaccctgcgtacctccctacacagcaagacgtactccgggtgcgggtgccgacaactggcataatagagtatccttttgatctacagagcgtgtag

SEQ ID NO: 119311 - DNA, 1824 bp, synthetic construct
  misc_feature 1..1824: note = Description of Artificial Sequence: Synthetic coding sequence
  source 1..1824: mol_type = other DNA
atgcctaggaagaaaccatttagcgtgaaacagaaaaagaaacagctgcaggataagcgcgaacgcaagaggggcttacaggacgggctccgaagcagctctaattccaggtcaggctcccgagaacgaagggaggagcaaactgatacttccgatggcgaatcagtcacccaccacattcgccgtctgaatcaacagcctagtcagggcctaggcccacggggctatgacccaaacagatatagactgcattttgaacgcgacagcagggaagaagtggaaaggcggaaaagggccgccagagaacaggtcctccagcccgtgtctgccgagcttttggagttggatatacgggaggtgtaccagcccgggtccgtgctggattttcccaggcggccaccctggtcttatgaaatgtccaaagagcagctgatgtcacaggaggagagaagcttccaggattacttgggcaagatacatggtgcttactcatctgaaaaactgtcttactttgaacataacctggagacctggagacaactgtggcgggtcctggaaatgagtgatatagtcctgctgattacagacattcggcacccagtggtgaactttccgcccgctctgtatgagtacgtcacgggggagcttggacttgcccttgtcctcgtcctgaacaaggtggatctggccccaccggccctggtcgtcgcgtggaagcactacttccaccagcattacccacaattgcatgtggtgttgtttacctcgtttccgcgggacccccgcaccccccaggatccttcttcagtactgaaaaaatcccggagacggggacgaggctggaccagagccttgggccccgagcagttattgcgggcctgtgaagccatcaccgtgggaaaggtcgatctctcttcttggagggagaagattgctcgcgatgtggccggagcaacatggggcaatggctccggagaggaggaggaggaagaagacggacctgcagtcctggtcgagcagcagactgattcagccatggagcctacaggcccgactcaggaacgctacaaagacggagtagtaaccattggctgtgtaggttttccaaacgtgggaaagtcctccttgatcaatgggctagtcggacgcaaagtggtgagtgtctcacggactcctggccataccagatattttcagacctactttctgaccccctcagtaaaattgtgtgactgccccgggctcatatttcccagcttgcttcctagacaacttcaagtgctggccggaatctaccctatagctcagatccaggagccttacaccgctgtggggtacttagcctccaggatccccgtccaggctctgctgcatctccggcacccggaggctgaggacccaagtgccgaacacccgtggtgtgcctgggacatctgcgaggcctgggccgaaaagcgcggttacaaaactgctaaagcagccaggaacgacgtataccgggctgctaacagtctattacgtttagccgtggatggacgcctttctttgtgctttcaccctccagggtacagcgaacaaaaagggacctgggaaagccatcccgagaccacagaactcgttgtcttgcaggggagagtaggaccagcaggagacgaggaagaggaggaggaagaggaactgtcctcctcatgcgaagaggagggagaggaggaccgagacgccgatgaagagggcgagggggatgaggagacccccacttctgctcccggctcaagtctggccggcaggaacccttacgctctcctgggggaggacgagtgctag

SEQ ID NO: 119312 - DNA, 1224 bp, synthetic construct
  misc_feature 1..1224: note = Description of Artificial Sequence: Synthetic coding sequence
  source 1..1224: mol_type = other DNA
gtcgtcaattttccccctgccttatacgagtatgtaacaggtgagctgggtttggcccttgtcttggtgctcaataaggtcgatctggccccgcctgctttggtggttgcttggaagcactacttccaccagcattacccacagttacacgtcgtactgttcaccagctttccccgcgatcccaggactcctcaagatccgtcttctgtgctgaaaaagtccagacgacgcggtaggggttggacaagagcattagggccagaacaactgctacgagcgtgtgaggcaatcaccgtcggtaaagtagacttatcatcgtggagagagaagatcgcaagagatgtggctggagcaacctggggcaacggctccggtgaggaagaggaagaagaggacggccccgccgtgcttgttgagcaacagaccgattccgccatggagcctactggccccacacaggagcggtacaaggacggcgtggtaactatcggctgtgtggggtttcctaacgtaggcaagtcttccctgataaatggcctggtgggacgtaaagtcgtttcagtgtccagaacaccagggcatacaagatacttccaaacttactttctcacaccctccgtcaagctgtgcgactgtccaggactgatttttccctcgctgctgcctagacagctgcaagtgctggccgggatctatcctattgctcaaatacaggaaccctatactgctgtaggttaccttgcctctcgcattcctgtacaggctctactgcacctgaggcatccagaggccgaggatccgagtgccgagcacccctggtgcgcttgggacatttgcgaggcatgggccgaaaagcgcgggtataaaaccgcgaaagctgcccgaaacgatgtgtaccgagcagccaactcgcttttacgtttagccgtggacggacgactgagcttgtgctttcatccccctggatattccgagcagaagggaacgtgggagtctcatcctgagaccacagaactcgtggtactgcaaggacgggtgggaccagccggcgacgaagaagaggaggaggaagaggagctgtcctcgtcttgtgaggaggagggagaagaggaccgggatgcagacgaagaaggcgagggggacgaagagacccccacgtccgcgcctgggtcctctctggcgggtcgtaatccgtatgccctgctaggggaagacgagtgttag

SEQ ID NO: 119313 - DNA, 1824 bp, synthetic construct
  misc_feature 1..1824: note = Description of Artificial Sequence: Synthetic coding sequence
  source 1..1824: mol_type = other DNA
atgccgcgtaaaaagcctttctcagtcaagcagaagaaaaaacaactgcaggataaacgtgaaaggaagagggggttacaggatggcttgcgcagctcctctaattcgcgttccggctcccgagagaggcgcgaagaacagacagacacaagcgatggagagtcagttacccaccatatcagaaggctaaatcagcaaccctcacaaggactgggcccaaggggttatgatcccaatcggtatcggttacactttgagcgcgatagcagagaagaggtcgagcggagaaaacgcgctgcacgagaacaggtgctgcaacccgtttctgcggaactcctggagcttgacatccgcgaagtctatcagccaggctcagttcttgacttccctcgcagaccaccctggtcctacgaaatgtctaaggagcagctcatgtcccaagaagaaagaagttttcaggattaccttggcaagatccatggtgcatattcctccgaaaaactttcctacttcgaacacaacctggagacgtggagacaactatggcgtgtgctggaaatgtccgacattgtactcctcattacggacatccggcacccggttgtcaacttcccgcccgccctgtacgaatacgttactggtgaacttggactggcgctagtgttggtcctcaataaagtcgatctggcaccacccgcgcttgtggtggcctggaagcattatttccatcagcattatccacagctgcatgtggttctcttcacttcttttcccagagatccaaggaccccccaggacccctccagcgtgctgaagaaatctcgacgtcggggaaggggctggacaagggctctgggcccagagcaacttctccgagcatgcgaggccattaccgtggggaaggtggacttgagctcatggcgcgaaaagattgcgcgggatgtggccggggctacctggggaaatggatcaggcgaagaggaggaggaggaagacggccccgcggtgctagtagagcagcagacagactccgctatggagccaacaggcccaacccaagaaagatataaagatggggtcgtcaccattggatgcgtcgggttccccaacgtgggcaaaagctccctgatcaacggccttgtcggaagaaaggtggtgagcgtgagtcgcacccctgggcataccaggtattttcaaacttattttttgacccccagcgtcaaactttgtgattgtccaggattaatctttccctcactactgccgcgtcagttacaggtactcgctgggatctacccgatcgcacagatccaggaaccatacacagccgtaggttatctagcctcaagaataccagttcaagccctcttacatctgaggcaccccgaggccgaggacccatcagctgagcacccctggtgcgcatgggacatctgcgaagcttgggcggagaagaggggctataagaccgctaaggccgcccggaacgacgtgtaccgggctgctaacagcctcttacggctggctgtggacgggagactatctctctgttttcacccccccggatatagtgagcaaaagggtacttgggagtctcaccctgagacaaccgagctggtggtgctgcagggccgggtggggcccgctggagatgaagaagaagaggaggaggaggagctgtcttcatcatgtgaagaggagggggaagaagaccgtgacgccgatgaggagggggagggcgatgaagaaaccccaacctccgcacccggatccagtctcgcgggccgaaacccgtatgctctcctcggagaggatgagtgttag

SEQ ID NO: 119314 - DNA, 795 bp, synthetic construct
  misc_feature 1..795: note = Description of Artificial Sequence: Synthetic coding sequence
  source 1..795: mol_type = other DNA
atgggggaacgtgtactatggcccctgagagccgggcagcattggcggcatagacctcttccagctggactgcaggatggcttgcggagcagctcaaattctaggtcgggtagccgtgagcgcagggaagagcagactgacacatcagatggggaaagcgtcacacatcatatccgacgtttgaatcaacagccatcgcagggtctaggaccacgtggctacgatcccaataggtaccgactgcactttgagagagactctcgcgaggaggtcgaacgtcgaaaaagagccgccagggaacaggtgctacagcctgtaagtgcagaattactggaattggatatacgagaggtgtaccagcccggatcagtgctcgatttcccacgccgtccaccatggagttatgagatgtcgaaggagcaactcatgagccaggaggaacgctctttccaggactacctggggaagattcatggtgcttacagtagcgaaaagctcagctatttcgagcataacttggaaacttggagacagctttggagggtactcgaaatgtcagacattgtgctgctgattacggacatccgtcatcccgtggtgaattttcctcctgccctgtatgagtacgtaactggcgagttaggattggcactagttcttgtcctgaacaaagtggatctcgcgcctcctgccctcgtggtggcttggaagcattatttccaccagcactatccccagctgcacgttgtcttgttcacatcatttcctcgagacccccgcaccccccaagattag

SEQ ID NO: 119315 - DNA, 1824 bp, synthetic construct
  misc_feature 1..1824: note = Description of Artificial Sequence: Synthetic coding sequence
  source 1..1824: mol_type = other DNA
atgccaagaaagaagccattctcagtgaaacagaagaagaaacaattgcaggacaagcgcgagcgtaaaagaggtctgcaggatggcttgcgcagctcctctaattcccggtcagggtctcgcgagcgtagagaagagcagacagacacttccgacggggaaagcgtcacacatcacattcgccggctgaatcagcagccatcccagggcctagggcctcgcgggtatgatcctaatcgttaccgtttacactttgaaagggattcccgcgaggaagtggagagaagaaagagagcggctcgagagcaggtgctgcagcctgtgtctgctgagttactggagttagacattcgcgaagtgtaccagcccggatccgtacttgatttcccacgtcgaccaccctggagctatgaaatgagcaaagagcagctaatgagtcaggaggagcggtcttttcaggactacctcggaaaaatccacggcgcatatagcagtgagaagctctcttacttcgaacacaatctggagacatggcggcaactctggagagtgctggaaatgagtgatatcgtcttacttataaccgacatccgccatccggtggtcaattttccccctgccttgtatgaatacgttacaggagagttgggcctagcgctagttctggtcctgaataaagtggacctggccccgcccgctctggttgttgcttggaaacactacttccaccagcactacccccagcttcatgtggtgctgttcacttcatttccacgcgacccccgaacgccgcaagacccttcaagtgtgctcaaaaagtcccgtcgccggggacgcggatggactcgagctctggggccagagcagctgctgcgggcttgcgaggctattactgtcggaaaagtggatctgtcttcatggcgggagaaaattgcccgtgacgtggctggagctacatggggcaatgggagcggagaggaggaagaggaagaggacggacccgcagtcctcgttgagcagcagacggattcggcaatggagccgaccggcccgacccaggaaagatataaggacggagtggttactataggctgtgtcgggtttcctaacgtggggaagtccagtttgattaatggcctggtgggcagaaaggtggttagcgtgtcccggacccctggtcatactaggtattttcaaacttattttctgaccccatcagtcaaattgtgcgactgtccaggactcatctttcccagcctgctccctaggcaactccaggtgctagctggcatttatcccatcgcgcagatacaagaaccttataccgccgtgggctacctggcctcccggatccccgtgcaagccttgctgcatctacgccatcccgaagcagaggacccgtctgcagaacacccctggtgcgcatgggacatctgtgaggcctgggcagaaaaacgcggctacaaaacagcaaaagccgcacgcaacgacgtatatagagcagctaacagtttgctccgattggcagttgacggacgcctgagcttatgttttcaccctcctggctactccgaacagaagggaacctgggaaagccaccctgagaccaccgaactcgtggtgctgcagggaagggttgggcccgccggagacgaggaggaggaagaagaggaggaactgtcgtccagctgcgaggaggaaggcgaggaggaccgagatgcggacgaggagggcgagggcgatgaggaaactccaactagtgcgcctggttcatcactggctggccggaatccctatgccctgctgggtgaagacgagtgctag

SEQ ID NO: 119316 - DNA, 1290 bp, synthetic construct
  misc_feature 1..1290: note = Description of Artificial Sequence: Synthetic coding sequence
  source 1..1290: mol_type = other DNA
atggaggcagccgtggtgttggagatgagtgatattgtgctgctgatcacagatattcgtcaccctgtcgtgaacttccccccggctctctatgaatatgtgactggcgaactgggcctcgctctggtcctggtgctcaacaaggtcgatctcgcaccgccagctcttgttgtcgcttggaagcactatttccatcagcactatccccaactgcatgttgtactctttacatcattcccccgggacccgcggacaccgcaagatccaagctccgtcctgaaaaagagccgccgacgcgggcgcgggtggacccgggccttgggaccggaacagctgttgcgggcctgcgaagcaattaccgtaggaaaggtcgacctaagctcctggagagagaagatcgcgcgcgatgttgccggggccacttgggggaatggaagtggagaggaggaggaagaggaagacgggcccgccgtactcgtggaacagcagacagactctgcgatggagcctactggacccactcaagaaaggtataaagatggggtggtgacgattggctgtgtaggttttccaaatgttgggaagtcctcactgatcaatggattggttggcaggaaggtggtaagtgtgtctcgcacacctggccacactcgatacttccaaacctattttctgactcccagtgtaaaattgtgcgactgtcctggtctgatatttccatccctcctccctaggcaacttcaagtgctagctggaatctaccctatagctcagatccaagaaccctacacggctgtcggttacctggcttcacgaataccagtccaggcccttctgcacctccgccatccagaggcggaggatccatctgctgaacacccatggtgtgcctgggatatctgtgaggcttgggccgagaaaagaggatacaaaacagctaaagccgcaagaaatgatgtgtacagagctgccaacagcctgttgaggctggctgtcgatggccgactgagtctttgtttccatccgcccggctacagcgaacagaaggggacctgggaatcacaccctgaaaccactgagctcgtggtgctgcaaggacgcgtgggacctgccggcgacgaagaagaggaggaagaggaggagcttagttctagttgcgaggaagaaggtgaagaagatcgtgatgccgacgaagagggggaaggcgacgaagagacccctaccagtgctcccggatctagtctggcgggccggaacccctatgcgttgctaggggaagatgagtgttag

SEQ ID NO: 119317 - DNA, 1824 bp, synthetic construct
  misc_feature 1..1824: note = Description of Artificial Sequence: Synthetic coding sequence
  source 1..1824: mol_type = other DNA
atgccacgcaaaaaaccttttagcgtaaaacagaaaaagaaacagctgcaagataagagggagaggaaacgtggcctgcaagatggcctgcgttcatcatccaactcacgtagtggctcacgagaacggcgagaagagcagacagatacctctgatggagagtcggttacccaccacattaggcgcttaaatcagcagccctcacagggcctggggccccgaggatatgatcccaatagatacaggttacatttcgaaagggatagccgtgaagaagtagagcgccgcaaaagggcggctcgggagcaagtccttcagccggtatcagccgagttgctcgaactcgacatccgcgaggtgtatcagcctggtagtgtcctggatttcccgcgcagaccaccctggtcctacgagatgtcaaaagaacaacttatgagccaggaggaacggagttttcaagattatctgggaaaaattcacggagcctattcttcggaaaagctgtcctactttgaacacaacttggaaacatggcgacagctctggcgggtgctggagatgtcagatatcgtgttactgattacagacatcagacaccctgtagtcaactttccacccgccttgtacgaatacgtgactggggaactgggattggcactcgttctggtcctgaataaagtagatctggcaccgcctgctctggtggtagcatggaaacactacttccatcaacactacccacagctgcacgtggtcctctttacatcttttcccagggatccgagaaccccgcaggacccgtcctccgtgttgaagaagtcaagaagaagaggccgcggctggacccgcgctctcggcccagagcagctgctgcgcgcatgtgaagccataactgtcggcaaagttgatttgagcagttggagggaaaaaatcgcacgagatgtcgctggcgccacatggggcaacgggtccggagaggaagaagaagaggaggatggaccagcggtgctggtagaacaacaaaccgactctgctatggaacccacaggtcccacgcaagagcggtacaaggacggtgtggtgaccataggctgcgtcggcttccccaatgtggggaagtcctcacttattaacgggctggtggggcggaaagtcgtgagtgtgagcagaacacccggccacactaggtatttccagacctacttcttaacccccagcgtgaagctttgtgattgccccggcctgattttcccaagtttgctgccaaggcaactgcaggtgctggcaggcatctatcctatcgcccagatacaggaaccttatactgccgtggggtacttggcatcccgcatcccggtccaggccctgctacatttaagacatccagaggcggaagatcctagtgccgagcatccttggtgtgcatgggacatctgtgaagcttgggcggaaaagagaggatacaaaactgcaaaagcagctaggaatgacgtttaccgcgccgctaatagcctgctccgactcgcagttgacggccggctgtccctctgtttccaccctcctggttattctgaacagaaagggacatgggagtcacaccccgaaactactgagctagtcgttctccagggacgtgtggggccagcaggcgacgaggaggaagaagaagaggaggagctctcctcgtcatgcgaggaggagggggaggaggaccgggatgccgatgaggagggagagggggacgaggagactcccacgtctgcaccgggatcatccctagccggccgcaacccgtacgccctgctgggagaggatgaatgttag

SEQ ID NO: 119318 - DNA, 1215 bp, synthetic construct
  misc_feature 1..1215: note = Description of Artificial Sequence: Synthetic coding sequence
  source 1..1215: mol_type = other DNA
atgtctaaggaacaattaatgtcacaggaggagcgatcatttcaggactaccttggaaaaatccacggcgcctacagctccgagaagctttcctactttgagcataatttagagacttggaggcaactttggagagttctagaaatgtccgatattgtgctcctgattactgacatccgtcaccccgtggttaattttcctccagcattgtatgagtatgtgacaggcgaactcggcttggccctggtgttagtgctcaataaagtggacctagcgcctccggcccttgttgttgcctggaagcattactttcaccagcattatccacaacttcatgtggtgttattcacgagtttcccacgggaccccagaactcctcaagacccatcctcggtgctcaagaagagccgtcggagagggcgcggatggacccgggcattagggcctgagcagttacttagggcatgcgaagccattacagttggcaagggctttcctaatgtggggaagtcttcactgatcaatggcttggtcggcagaaaggttgtgagcgtgagtcggacccctggccataccaggtacttccagacatactttctcacaccttctgtgaaactgtgtgactgcccaggcctcattttcccctcactgctgcctcggcagctgcaggtgttggcaggaatttaccctattgctcagattcaggaaccatacaccgcagtgggttaccttgcgtcacggatcccagtgcaggccctcttgcatctgagacaccctgaggccgaagacccctctgccgaacatccctggtgtgcatgggacatttgcgaagcctgggcagaaaaaaggggttataagaccgccaaagcagctagaaacgacgtctacagagccgctaatagcctgctaagattagcagtggatggtcgcttgtcactttgttttcaccctccgggatattcagaacaaaagggaacctgggagtcccatccagagacgaccgagctggtggtgctacaggggcgggtcggccccgcgggagatgaagaggaagaagaagaagaggagttgtcaagctcttgcgaggaggagggagaagaggacagagacgccgacgaagagggagaaggcgacgaagagaccccgaccagcgcaccagggagctctctagccgggcgtaacccctatgctctgcttggggaagacgagtgctag

SEQ ID NO: 119319 - DNA, 795 bp, synthetic construct
  misc_feature 1..795: note = Description of Artificial Sequence: Synthetic coding sequence
  source 1..795: mol_type = other DNA
atgggggaacgggtgctttggccactacgtgcgggacagcactggcgccacaggcccttacctgccgggcttcaggatggcctccgcagttcctccaacagtaggagcggttcgcgcgaacgccgggaggaacaaacggatactagcgatggcgagagcgtcacgcatcacatcaggaggctgaaccagcaaccatctcaggggttgggcccaagaggctatgatcctaacagataccggctgcatttcgagcgcgattcgcgtgaggaggtagagcgtcgcaagcgagccgctcgcgagcaggtgctccagcctgtgtcagctgagttgttggaacttgacattagggaggtttaccaacccggcagtgttctggattttccacgccgtcccccatggagctacgaaatgtcaaaggaacagctgatgtcccaagaagaaaggagttttcaggattaccttggaaaaatccacggagcttattccagtgaaaagctgtcctatttcgaacacaacctcgagacgtggaggcaactgtggagagtgctcgagatgagtgacatcgtgctgctgattaccgacatccgccatccggttgtcaacttcccaccagccctttatgagtacgtgactggggaactggggctggcactcgttttagtgctgaataaggtggacctggcgccacccgccctcgtcgtagcctggaaacactactttcaccagcactacccacaacttcatgtcgtgttgttcacttcttttccaagggacccaagaactccgcaggattag

SEQ ID NO: 119320 - DNA, 795 bp, synthetic construct
  misc_feature 1..795: note = Description of Artificial Sequence: Synthetic coding sequence
  source 1..795: mol_type = other DNA
atgggtgagagggtgctgtggcccctccgggccggccaacattggaggcacaggcccttgcctgcgggtctgcaggacggcctccgaagcagctccaattcgcgaagtggaagccgcgagagacgggaggaacagaccgatactagcgatggcgaaagcgtaacacaccatatccgtagacttaatcagcagcctagccaaggtctcgggccgcggggctatgaccctaacagatatcgcctgcacttcgagcgagacagccgggaagaggttgagagaaggaagcgggccgcccgggagcaagttctgcagcctgtgtctgctgagctcctagagttggacattagagaggtataccagcccggctctgtacttgactttcccagaaggcctccgtggtcctatgagatgagtaaggagcagcttatgtcgcaagaggagcgcagctttcaggattacctgggcaagatccatggggcttattcatcagaaaagctgtcctactttgaacataacctggagacctggaggcagctctggcgagtactggaaatgtccgatatcgttcttctgatcacagatatcaggcacccagtggtgaacttcccccccgccctgtatgagtacgtgaccggtgaactcggcttggctctggtgctggtccttaacaaagtagatttggcaccccccgccttagtggtggcctggaagcactactttcatcagcattatccccagctgcatgttgtgctctttaccagcttccccagagacccgcgaaccccacaggattag

SEQ ID NO: 119321 - DNA, 795 bp, synthetic construct
  misc_feature 1..795: note = Description of Artificial Sequence: Synthetic coding sequence
  source 1..795: mol_type = other DNA
atgggagagcgggtgttatggcctttacgcgccgggcagcactggcgccacaggccgctgcccgccggattgcaggacggactacgctccagtagtaactcccggagtgggagcagagagaggagggaggaacagacagatacttctgatggcgagtcagtaacccaccatatccgccgattgaaccagcagccgtcacagggactaggccctcggggctacgatcccaacaggtatcgcctccacttcgagagagacagtagggaggaggttgagcggagaaagcgggctgccagggagcaggttctgcaacctgtctcagctgagctcctcgaacttgatataagggaggtttaccagccaggtagcgtcctggatttccccaggcgccctccttggtcttatgagatgagcaaggaacaactaatgagccaagaggaaagaagttttcaggattacctggggaagatccatggcgcatactcctctgagaagttatcatactttgaacataacctagagacatggaggcaattatggcgtgtcctggagatgtccgacattgtgctgttgatcacagacattagacaccctgtggtaaacttcccaccagccctgtacgagtacgtgacaggcgagctgggcctggctctggtgctggtactgaacaaggtggacctggctccccctgcactagtggttgcttggaagcactacttccatcagcattatccgcagctgcatgtcgtgcttttcactagcttcccccgcgaccctaggacaccccaggactag

SEQ ID NO: 119322 - DNA, 1824 bp, synthetic construct
  misc_feature 1..1824: note = Description of Artificial Sequence: Synthetic coding sequence
  source 1..1824: mol_type = other DNA
atgcctcgcaagaaaccgttcagcgtgaaacagaaaaaaaagcagctccaagacaagagagagcgcaaacgtgggctacaggatgggctgaggagctcttctaattccagaagcggatcaagagaacggagagaagaacaaaccgacacaagcgatggcgaatctgtcacccaccacatccgccgcctgaaccaacagccttcccaggggctgggaccacggggttatgacccaaatcggtacaggcttcactttgaaagggattcaagggaggaagtggaaagacggaagagggccgcacgcgagcaggtgcttcagcctgtatcagctgaactcctggagctggacattagagaggtgtatcagcctggatcggtactagacttcccccgtcggcctccctggagctatgaaatgagcaaggagcagctgatgtcccaggaagagcgctcgtttcaggactacctggggaagattcacggtgcttattcctctgaaaaactgtcctatttcgagcacaacctcgaaacatggaggcagttatggcgggtgctcgaaatgtctgacattgttctcctcattactgacataaggcatcccgtcgtgaatttcccaccggccctgtatgaatacgtcaccggggagcttggccttgccctagtgctcgtcttgaataaagtcgacctcgctccccccgcgctggtggtggcctggaagcactatttccaccagcactaccctcagctgcatgtggttctattcactagctttcccagagaccctcgaactcctcaggacccatcaagcgttctcaaaaaaagccggaggaggggcagggggtggacaagagcacttggaccagaacagctgcttagagcgtgtgaagccatcacagtgggcaaagtcgacctctcctcttggcgcgagaagattgccagggacgtagccggtgccacatggggaaacggaagcggtgaagaggaagaggaagaggatgggcctgcagtactagtcgagcagcaaactgattccgccatggaacctacgggacccactcaggagcgatataaggacggcgtcgtgacgattggttgcgttggcttccctaacgtgggcaaatctagccttattaatggccttgttggccgcaaggtggtgagcgtgagccgaacacctgggcatactcgttactttcaaacttattttctcactccttccgtcaagctatgtgattgtcctggcttgatttttccctccctgctccccaggcagctccaggttctcgctggcatttaccccatcgcccagattcaggagccttacaccgctgtaggatacctcgcctcacggataccagtgcaagcgttactgcacctgaggcatcccgaagccgaagatccttctgccgagcacccctggtgtgcttgggacatttgtgaagcttgggcggaaaagcggggctacaagactgccaaggccgcgagaaatgatgtttatcgggcagccaatagcctgctgcgacttgccgtcgacggtagattatccctgtgctttcatccacctggctattcagaacaaaaggggacatgggagtcacaccctgagacaacagaactggttgtccttcagggccgcgtggggcccgcgggggacgaagaagaagaggaagaggaagaactatcttcttcctgcgaggaggaaggtgaggaggaccgtgatgccgacgaggagggagagggcgatgaagagacacctacaagtgcccctgggagcagccttgctgggaggaacccgtacgccctgctcggggaggacgagtgctag

SEQ ID NO: 119323 - DNA, 1824 bp, synthetic construct
  misc_feature 1..1824: note = Description of Artificial Sequence: Synthetic coding sequence
  source 1..1824: mol_type = other DNA
atgccaagaaaaaagccattttccgtgaaacagaagaaaaagcagctccaggacaaacgtgaaaggaaaagagggcttcaagacggcctgcgaagcagtagcaacagccgtagtggatcgcgcgaaagaagggaagagcagactgatactagcgacggggagagcgtaacacaccatataagacggttgaaccaacagccatcccaggggcttggaccgcgcggctacgacccgaaccgctatagactgcattttgaacgggatagtagagaggaggtagagagaaggaagcgagccgcccgtgagcaggtgctgcagcctgtgtcagctgaactgctcgaactggacatccgggaggtgtatcagcctggctcggtacttgattttccccgccgccctccatggtcctatgagatgagtaaggagcagctgatgagtcaggaagaacgaagcttccaggattatttgggcaagatccacggagcttattcaagtgagaagctgtcctattttgagcataatctggaaacttggcggcagctgtggagagttttggagatgtccgacatcgtcctgttgatcacagacatcaggcaccctgttgtgaattttccacctgcactgtatgagtacgtgacaggagaattgggattggccctggttctggtgctcaacaaagtcgatcttgcacctcctgctctcgtcgttgcctggaaacactatttccatcagcattatcctcagcttcacgtggtcctctttaccagcttccccagagatccacggactccccaggacccgagttcggtacttaaaaagagccgcagaagagggaggggttggacacgtgcgctggggccagaacagcttctgcgagcctgtgaggctatcaccgtgggcaaggtcgacctgtctagctggcgtgagaaaattgcccgcgatgtggccggcgcaacttgggggaacggtagtggggaggaagaggaagaggaggacgggcctgctgtcttggtcgaacaacagacagactctgccatggaacctacagggccaacgcaagagagatataaggacggcgtggtgaccatcggctgtgtcggtttccctaacgtgggcaagagttccctcatcaatggacttgtgggaaggaaggtggtcagtgtgtcccgcactccgggccatacaaggtacttccaaacttacttcctcactccttcagtaaagctttgtgattgtccgggcttgatttttccctcccttctcccccggcagctccaggtgctcgcaggcatttaccccatcgcccagatacaggagccatacacagccgtaggttacctggcttcccggatccccgtgcaagctctgctgcaccttcgccaccctgaggctgaagacccctctgctgagcacccatggtgtgcctgggacatatgtgaagcctgggctgaaaaaagagggtacaaaacagccaaggctgctcgaaacgacgtttatcgggcagccaacagtctcctacgcttggctgtggacggcaggctctcattgtgtttccaccctcctggatattccgaacaaaaggggacatgggagtcgcatcccgaaaccactgagcttgtggtattgcagggcagggtgggcccagcaggcgacgaggaagaagaagaagaggaagagttaagcagttcttgtgaggaggagggcgaggaagatagagatgctgatgaagaaggtgagggagacgaagagacccccacctctgcccctggctcatcactcgcagggaggaatccatacgcgttgctgggggaggacgagtgctag

SEQ ID NO: 119324 - DNA, 795 bp, synthetic construct
  misc_feature 1..795: note = Description of Artificial Sequence: Synthetic coding sequence
  source 1..795: mol_type = other DNA
atgggcgaacgagtgctgtggcctcttagggcaggacagcactggcgacataggcccctccccgccgggcttcaagatggcctccgtagcagctcaaattctcgctcgggttcaagggaacggcgtgaagaacaaaccgatacgtcagacggcgagtcagtgacccaccacatacgacgtctgaatcaacagccttcgcagggcctgggcccgcggggctacgaccccaatagataccggcttcattttgaaagggactctcgcgaggaggttgagcggcggaaacgggccgccagagagcaggtgctgcaaccagtttccgccgaactgttggagctcgacattcgagaggtctaccagcctggctcagtccttgatttccctaggcgtcccccttggagctacgagatgtccaaagagcagctaatgtcgcaggaagagagaagcttccaggattacctaggtaagatccacggcgcttactcttccgaaaagctgagctacttcgaacacaatctcgagacatggcgtcaactttggagggtgctagagatgagcgatatcgtgctgcttattacagatatccgtcacccagtagtcaattttcctcctgctctttacgagtatgtgacaggggagctaggactcgctctggttctggtgttaaacaaggtggacttggcccctccggccctcgtggtggcttggaaacactacttccaccagcattaccctcagctacacgtggtgctctttacatcatttccgcgggacccgcggacccctcaggactag

SEQ ID NO: 119325 - DNA, 795 bp, synthetic construct
  misc_feature 1..795: note = Description of Artificial Sequence: Synthetic coding sequence
  source 1..795: mol_type = other DNA
atgggcgagcgggtattgtggccccttagggcgggacagcactggagacacagacctcttcctgccggtttacaggatggactgcgctctagtagtaatagcaggagtggaagccgggaacgtcgagaagagcagacggatacttccgacggcgaatctgtgacccaccatattcgacgactgaaccagcagcctagtcagggtctcggcccccgggggtatgaccccaaccgttatcgccttcatttcgaacgggacagcagggaggaggtggagaggcggaagagggcagcccgagaacaggtgctccagcccgtctccgccgaactgctggagctggatatcagagaggtctaccagccaggctctgttctggattttccacgcaggccaccgtggagctatgaaatgagcaaagagcaactgatgtctcaagaggaacgaagctttcaggactacttgggaaagattcacggggcctacagttctgagaagttgtcatacttcgaacacaacttagaaacttggagacagctttggcgagtcctggagatgtccgacatcgtactgcttatcaccgacatccggcatcccgttgttaactttcccccagcgctctatgaatacgttaccggcgaacttggattggctctggtgttggtattaaataaagtcgatttagctccacctgcacttgtcgtagcctggaaacattacttccatcaacattacccccagcttcacgtggttctcttcactagtttccctagagacccacgcacaccccaggattag

SEQ ID NO: 119326 - DNA, 1824 bp, synthetic construct
  misc_feature 1..1824: note = Description of Artificial Sequence: Synthetic coding sequence
  source 1..1824: mol_type = other DNA
atgcccaggaaaaaacctttctccgtgaagcagaagaagaagcagctgcaggataaaagagaacgtaagcgcgggctccaggatggtctgaggtcctcctcaaacagtaggtccggatcacgcgagcggcgggaggaacagacggatacttctgacggggagagtgtgactcaccacattaggagactcaatcagcagccatctcagggactgggaccccggggctacgatcctaatcgctaccgtttacactttgagcgcgattcccgagaagaggtggaacgaaggaagcgagcagcacgcgagcaggtactgcagccagtgtccgcagagctgttagaattggatatccgagaagtctaccagccgggcagtgtcttggactttccaaggcggcctccctggagctatgagatgtctaaggaacagcttatgagccaggaggagcgatctttccaagactatcttggaaagattcatggcgcctacagttcagagaaactgtcttatttcgagcacaacctagaaacatggcgccagttgtggagggtgctggagatgagtgacattgtgcttctgataaccgatattcgtcatcccgttgttaacttcccccctgcactttacgagtacgtgaccggtgagctgggtctcgccttggtgcttgttctgaataaggttgacttggcgcctcccgcccttgtagtggcctggaaacattacttccatcaacattatccacagctacatgtcgttctcttcaccagctttccaagagatcctcgtacccctcaggacccaagcagcgtgctaaaaaagagtagaagacgaggacgagggtggacaagggccctgggtcctgaacagctgttaagagcgtgtgaggctataacggtcggcaaagtggacctttcatcctggcgagagaagatcgctcgagatgtggcaggtgcaacatggggtaacgggtccggcgaggaggaagaggaggaggacggaccagctgtgttggtggagcagcaaactgattctgctatggagcccacggggcccacacaggaaagatataaggatggtgtagtaacaatcggttgcgtcgggttcccaaatgtggggaaaagcagtctgattaatggtctggtgggacgcaaggtggtcagtgtctcccgcaccccgggccatacaagatactttcagacatacttcctgaccccctctgttaaactctgcgactgtccaggcctgatctttccgtctctactccctcggcagctgcaggtcctagccggcatctaccccattgctcaaattcaagagccttacaccgcagtcggctatctagccagcaggattcccgtgcaggctttactccatctgagacatcccgaggctgaggaccctagcgccgagcacccatggtgtgcatgggatatctgcgaagcatgggccgagaagaggggctacaaaacagctaaagctgctcggaacgatgtgtacagggccgcaaactccctcctgcgcctggctgtggacgggcgcctaagcctctgctttcacccacccggctatagcgaacagaagggcacgtgggaatcacatcctgaaaccacagagctggtagtactgcagggacgcgttggcccggccggcgatgaggaggaggaagaggaagaagagttatctagcagctgcgaagaagagggggaagaagatcgcgatgcggatgaggaaggggagggcgacgaggagacccctacgtctgcccccggctcttccttggcgggcaggaatccgtatgcactactgggggaggacgaatgctag

SEQ ID NO: 119327 - DNA, 201 bp, synthetic construct
  misc_feature 1..201: note = Description of Artificial Sequence: Synthetic coding sequence
  source 1..201: mol_type = other DNA
gtcgtgaattttccacccgccctctatgagtacgtgacaggggagctcggattggctctcgttctagtgttaaacaaagtcgacctggcccctccagctcttgtagtggcctggaaacattattttcatcagcattatccccaactccacgtggtgctcttcacttcttttcctcgtgaccctcgcacgccgcaagactag

SEQ ID NO: 119328 - DNA, 795 bp, synthetic construct
  misc_feature 1..795: note = Description of Artificial Sequence: Synthetic coding sequence
  source 1..795: mol_type = other DNA
atgggggaacgagtgctttggccactgagagccggtcagcattggaggcatcgtcctttgcccgctggactgcaggacgggctccggtcttcgagcaactccaggagcggatcccgtgaacgcagggaagagcaaaccgacactagtgatggggagtccgtaacccatcacatacgacggctgaaccagcagccgtcccagggtctgggccctcgaggttatgacccaaaccggtatcggctccacttcgaacgggatagtcgggaagaagtggaacggagaaaaagggctgcccgcgagcaggtccttcaacccgtaagtgcagagttactagaacttgatatccgggaggtttaccaacccggttccgtcctagacttccctaggaggcccccctggagctatgaaatgtccaaggaacagctgatgtctcaggaagaaaggagttttcaagactatctgggcaagattcacggcgcctactcctcagagaaactaagctacttcgaacataatttagagacatggcgccagttgtggcgtgttctcgaaatgtccgacatcgttttgctaattaccgacatcagacatccagtggtaaattttccccccgccctgtacgagtacgtcacaggagaactcggtctcgctttagtactggtgctgaataaagtcgatttagcccctccagccctcgtggtcgcctggaaacactattttcaccagcactaccctcaactgcatgttgtcctcttcacatcgttcccccgcgatcctcggacaccccaagactag

SEQ ID NO: 119329 - DNA, 1215 bp, synthetic construct
  misc_feature 1..1215: note = Description of Artificial Sequence: Synthetic coding sequence
  source 1..1215: mol_type = other DNA
atgagcaaagaacagctcatgagccaagaagaaagatcttttcaggattatctggggaaaatccacggagcttactccagcgagaagttatcttatttcgagcacaacctagaaacgtggaggcaactgtggcgagtgctcgaaatgtccgatatcgtcttgttgattactgacattaggcaccccgtggtcaattttccgccggctctgtacgaatatgtgaccggtgagctgggactagcgttggtacttgttctcaacaaagtcgatcttgctccacctgctctggtagtggcctggaagcactatttccatcagcactatccacagttgcatgtggttctctttactagtttcccacgggatccgcgcacgccacaggaccctagtagtgtgcttaagaagagccgtcgaaggggacggggctggacccgtgcacttggcccggaacagcttctgcgcgcctgcgaagccataaccgtagggaaaggatttccaaatgttgggaagtcaagcctgatcaatggtcttgtcggccggaaggttgtatccgtatcccggacgccaggccatacgcgctattttcagacttatttcctaacccccagtgtaaaattgtgcgactgtcctggactcatttttccgtccctgctgccaagacagctccaggtcctggctggtatttaccccattgctcagatccaggagccctacaccgcggtgggctacctggcttccaggatcccagttcaggctctgttacacctccgacacccagaggcggaggacccatcggccgaacacccttggtgtgcctgggatatctgcgaagcctgggccgagaaacgggggtacaagaccgctaaagctgcgaggaacgatgtttatagagccgcgaacagcttactgcggctggctgtggacgggcggcttagtctatgtttccacccccctggatacagtgagcagaaaggaacttgggaatctcatcccgagactaccgaattagtagtgttgcaaggcagggtgggtccagccggggatgaggaagaagaagaggaagaagagctgtctagctcttgcgaggaagagggagaagaggaccgagatgctgatgaagaaggagagggcgacgaggagactcccacatcagcaccaggttcttccttagcgggcagaaatccttatgccctcctcggggaagatgagtgctag

SEQ ID NO: 119330 - DNA, 789 bp, synthetic construct
  misc_feature 1..789: note = Description of Artificial Sequence: Synthetic coding sequence
  source 1..789: mol_type = other DNA
atggaaccgacaggccccactcaagagcggtacaaggatggagtggtgacaatcgggtgtgttggcttcccaaacgtggggaagtcatccctgattaatgggttggtgggcagaaaagtggtatcagtctctcgtactcccggccacacccggtatttccagacgtattttctgacaccttcagtgaaactgtgtgattgtcctggtctcatctttccgtcactgctgccacggcagctgcaagttctagccgggatttaccccatcgcacagatccaagaaccatacaccgccgttgggtatttagcatctcggatccccgtgcaggcccttctccacttgcgccaccctgaagccgaggaccctagcgccgaacacccttggtgcgcgtgggacatttgcgaagcctgggccgagaagcgaggatataaaaccgctaaggccgctagaaacgacgtttatcgcgcagccaactcattattacgcctggcggtagacggccgattgtccctgtgttttcaccctcccggctattcagaacagaaaggcacctgggagtcgcacccagagactactgaactggtggtgctgcagggtcgagtggggcccgctggtgatgaagaggaagaggaggaggaggagctttcttcatcatgtgaagaagaaggggaagaagacagagacgcagatgaggagggggaaggagatgaggagacaccaacgagcgctccaggaagttccctcgcaggccgtaatccatacgccctgcttggcgaggacgagtgttag

SEQ ID NO: 119331 - DNA, 789 bp, synthetic construct
  misc_feature 1..789: note = Description of Artificial Sequence: Synthetic coding sequence
  source 1..789: mol_type = other DNA
atggagccaaccggtcccacccaggagaggtacaaggatggcgttgtgaccattggctgcgttggtttcccaaacgtaggcaaaagcagcctgatcaacggactcgtggggaggaaagttgtttccgtgagcaggacccctggccacactcgctacttccaaacatactttctcacgcctagcgtgaagctgtgcgattgccctggcttgattttcccgagcctgcttcccaggcagctgcaggtacttgcaggcatctacccaatagcacaaattcaagagccatacacagccgtcgggtatttggcttccagaatcccagtgcaggcactgctccacctgcgacaccctgaggcagaggaccctagtgccgaacatccatggtgtgcttgggacatctgcgaggcgtgggccgagaagagaggctacaaaacagcaaaggcggccaggaatgatgtgtaccgggctgccaatagcctactacgactagcggtcgacgggaggctctccctctgctttcaccctcccgggtactctgagcagaagggtacatgggaatcacatcctgaaactacggaattagtggttctccaggggcgcgtcgggccggcaggcgacgaggaagaagaagaggaggaggagctgtcttcttcctgtgaggaggagggcgaggaggaccgggatgcagatgaggaaggagaaggcgacgaagagacacctacatcagcccctggatcttccctggccggccgcaacccttatgcactcctgggtgaggatgagtgttag

SEQ ID NO: 119332 - DNA, 1290 bp, synthetic construct
  misc_feature 1..1290: note = Description of Artificial Sequence: Synthetic coding sequence
  source 1..1290: mol_type = other DNA
atggaggcggcggtggtgttggagatgtcggacatcgttctccttattacggatattcgacacccggttgtcaactttcccccagctctgtacgagtatgtgactggagaattaggcctggccctcgtcttggttctgaataaggtcgacctggctccccccgccctggtggtggcctggaaacactactttcaccagcattatcctcagctgcatgttgttctgttcacgtcctttccccgggacccgcggacgccccaagatccaagttcggtcttaaagaagtcaagacgccggggtcgagggtggacacgcgccttgggcccagagcaactcctgagggcctgtgaggctataaccgtcggtaaggtggatctgtcttcctggcgagaaaagattgcccgggacgtcgcgggagccacctggggaaatggatccggcgaggaggaagaggaggaagatgggcctgccgtgcttgtggagcagcagacagattccgccatggagcccacaggacctacccaggagcgttataaagacggcgtcgttactattgggtgcgttggattcccaaatgtggggaaaagctcactcataaatggactcgtcggccggaaagtggtttcagtttctagaacacccggacacacgaggtactttcagacctattttcttaccccgagtgttaagttgtgcgattgtcctggactgatcttcccttcccttttacctcggcaactgcaggtgctggccgggatttacccgatcgctcaaatacaggagccctatactgcagtcggctatctagcaagcaggatcccggtgcaagcgctgctgcatttaaggcatccagaggctgaagacccttccgccgagcacccctggtgtgcgtgggatatttgcgaagcctgggcagaaaagcggggctacaaaactgctaaagccgctcgaaatgatgtttatcgggctgcaaacagtctgttgaggctcgcagtcgacggaagattgtctctctgcttccacccccccggttatagcgagcagaaggggacgtgggaaagtcaccctgaaaccacggagttagtcgtcctccagggccgggtcggccctgcaggggacgaagaggaggaggaagaggaagaactcagttctagttgtgaagaggaaggcgaggaggatcgggacgctgatgaggaaggggagggtgacgaggaaactcctacatccgcccccggttcctcactcgccggtcgtaacccttacgccctactgggcgaagatgaatgctag

SEQ ID NO: 119333 - DNA, 1215 bp, synthetic construct
  misc_feature 1..1215: note = Description of Artificial Sequence: Synthetic coding sequence
  source 1..1215: mol_type = other DNA
atgtccaaggagcagctaatgagtcaggaggagcggagcttccaggactacctgggcaaaatccacggcgcttatagcagtgaaaagctgtcgtattttgagcacaatttggaaacttggaggcagttgtggcgtgttctggagatgtctgacattgttctcctaataacagatattcggcacccagtggttaacttcccacccgctttgtatgaatacgtcaccggcgaactggggctggcccttgtgttagtccttaataaagttgatcttgccccacctgccttagtggtggcatggaagcattatttccaccaacactatccccagctccacgtggtgctcttcacgagcttcccaagagaccctagaacaccccaggatcctagtagcgttttaaagaaatcgcgaagaagaggccgcggttggacgagggcattaggccctgaacagctcctgcgcgcttgtgaagcgattactgtgggtaagggctttcccaacgtgggaaagtcaagcctaattaacggcctggtcgggcggaaggttgtgtccgtcagtaggaccccaggacacactaggtactttcagacctacttcttgacaccaagcgtcaagctgtgtgattgtcccggacttattttcccatcacttctgcctcggcagctccaggtgctggctggaatctatcctattgcacagatccaggaaccttacaccgccgtgggatacctcgccagcagaattcccgttcaagccctcctccacttgagacaccctgaggccgaggacccctccgctgagcacccgtggtgcgcctgggacatatgcgaagcttgggctgaaaagagaggctataaaactgcgaaggccgcacgaaacgacgtgtacagggccgcaaactcactgctgagactagccgttgacggcaggcttagtctctgttttcacccccctggatatagcgaacaaaagggcacctgggaatcccatcctgagaccacagaactcgtagtgcttcagggccgagtaggacctgccggcgacgaggaggaggaagaagaggaggagttgagcagttcctgtgaagaggaaggagaagaagacagagacgccgacgaagaaggcgagggagacgaggagacaccaacatcagccccgggcagctccctggcgggcagaaacccctacgcactgctgggtgaagacgaatgctag

SEQ ID NO: 119334 - DNA, 1215 bp, synthetic construct
  misc_feature 1..1215: note = Description of Artificial Sequence: Synthetic coding sequence
  source 1..1215: mol_type = other DNA
atgtctaaggagcaactgatgagccaagaggagaggagttttcaggactacctgggtaaaatacatggcgcttactctagtgaaaagttgagctacttcgagcataaccttgaaacttggaggcaactgtggcgagtgctggagatgagtgacatcgtcctgctgataaccgatattaggcaccctgtggtgaactttccacctgcgctgtatgagtatgtgacaggcgaactgggcctggccttggttctggtcctgaacaaggtagatttagcacccccagcattggtggtggcttggaaacactatttccaccagcattatcctcagcttcatgttgtcctgttcacttcgttcccccgcgacccgaggaccccccaggatccaagctccgttctgaagaaaagcagacgccgcggacgcggttggacaagagccctgggtcccgagcagctcttgagggcgtgtgaagctattactgtcggcaagggttttcctaatgtggggaagagctcgctgatcaatgggctggtcggtcgtaaggtggtctccgtgtccagaacccctggacatacaagatatttccagacatactttctgaccccaagcgtgaaactctgcgactgccctgggctcattttccctagtcttctgcctcgccagctacaggtgctcgctggcatttatcccatcgcgcagatccaggagccatacaccgctgtcggctaccttgccagtaggataccagtacaggcactgctgcacctccgccatccagaggctgaagacccaagcgcggagcacccctggtgcgcttgggatatttgtgaagcatgggctgagaaacgcggttataaaaccgccaaggcagcgcgaaacgacgtgtacagagccgccaactcacttctccgtctggccgtggatggaagactctctctgtgctttcacccgcccggctatagcgaacagaaaggtacttgggaaagccatcccgaaacaactgagctcgttgtgctgcaaggacgggttgggcctgccggtgatgaagaggaggaagaggaagaagaacttagttcctcctgtgaggaggaaggtgaagaagacagggatgccgacgaagaaggggagggcgacgaggaaaccccaactagcgctcctggaagctccctcgcaggtcgcaacccctacgcactgttaggtgaggatgagtgttag

SEQ ID NO: 119335 - DNA, 789 bp, synthetic construct
  misc_feature 1..789: note = Description of Artificial Sequence: Synthetic coding sequence
  source 1..789: mol_type = other DNA
atggagcccacgggacccacccaggaaagatacaaagatggtgttgtcactatagggtgtgtcggttttccaaacgtcgggaagagctcactcataaatggcctggtgggaaggaaagttgtctccgtctctaggacccccggtcacacgcgctactttcaaacgtattttctcacccctagtgtgaagctttgcgactgtcccggattgatcttcccaagtttgctgccacgccagctccaggtgctggccggcatctatcctatagcccagatccaggagccttacacggcagtgggctatttagcatctagaatccctgttcaggccttgctccacttgcgacatcccgaggcggaggatccttccgctgagcatccatggtgtgcctgggacatttgcgaagcatgggccgagaagcgcgggtacaaaacagcaaaggccgcccgcaacgatgtataccgcgcagcgaactccttgctgcgtttggctgtcgatggccgcctgtcattgtgctttcaccctccagggtactctgagcagaagggaacttgggagtcccatccagaaacgactgagctcgtcgtgctgcaggggcgcgtcggcccagcaggagacgaggaggaggaagaagaggaggaactcagttctagctgcgaggaagaaggagaggaggatagggacgcagacgaggaaggagaaggtgatgaggagacacctactagtgcccctgggtccagccttgccggccggaatccctatgccctgctgggcgaagatgagtgctag

SEQ ID NO: 119336 - DNA, 1290 bp, synthetic construct
  misc_feature 1..1290: note = Description of Artificial Sequence: Synthetic coding sequence
  source 1..1290: mol_type = other DNA
atggaggctgcggtcgtactagagatgagcgacattgtgctgctgatcaccgacatccggcatcccgtagtaaatttccctcccgcactctatgaatatgtcactggcgaactgggcctggcactcgttctggtgttaaataaggtcgacctcgcgccaccagccctggtcgtcgcctggaagcactacttccatcagcactatccccagcttcacgtagttctttttacgtcgttcccccgggacccaaggacaccacaggatccttcatccgtcctgaagaagtctagaaggaggggacgcggctggacgcgagcgcttggcccggagcagttgctccgggcctgcgaagcgattacagtcggaaaggtagacctcagttcctggcgcgagaagattgctcgagatgtcgctggagctacatggggtaatgggagtggggaagaagaggaagaagaagatggccctgctgtgctcgtggagcaacagacagatagcgctatggagcctactggtcccacgcaagagagatacaaagatggagtcgtaactatcggctgcgtggggttccccaatgttggcaaaagctcattaataaatggactggtgggccgcaaggtcgtgtccgtgtcccgcacacccggacatacgcgctacttccagacatacttcctgaccccaagcgtgaaactgtgtgactgcccgggtctgatttttcctagcctgctgccgcgacagctccaggttttagccgggatatacccaattgcccagattcaggagccgtacacggccgtgggctatctcgcttctaggatccccgttcaggccctgctccacttgcggcacccagaagcagaggacccatctgcagaacacccatggtgtgcgtgggacatctgtgaagcttgggctgaaaagaggggctacaagaccgccaaggccgcacgtaatgacgtgtaccgagctgctaatagcctattgagattggccgtggacggaagactgagcctgtgttttcatcccccaggttacagtgaacaaaagggaacatgggagtcccatccggaaacaacggaactggtcgtactgcaggggcgggtcggtccagctggagatgaagaggaggaggaggaagaagaactctccagctcgtgcgaagaagaaggcgaggaggaccgtgacgcagatgaagaaggagagggcgacgaagagacacccacctccgcacccggctcatcgctcgccggccgaaacccttatgctctgctgggtgaagatgaatgttag

SEQ ID NO: 119337 - DNA, 1290 bp, synthetic construct
  misc_feature 1..1290: note = Description of Artificial Sequence: Synthetic coding sequence
  source 1..1290: mol_type = other DNA
atggaggcagccgtggtacttgaaatgtctgacattgtgcttctgatcactgacattcgtcatccggtggtcaattttccgccagcactgtatgaatacgtcacgggcgaacttggtttggccctagtgctcgtgctcaataaggtggatttggcccccccagctcttgtggtggcctggaaacattattttcatcagcactatccacagttgcacgtcgtattattcacttctttccccagagatcctaggacacctcaggatccctctagcgtcctcaagaaatcacgaaggaggggaagagggtggacccgggctcttggacccgagcaactgctgcgtgcatgtgaagcgattaccgtcggaaaggtggatctgtcatcatggcgggaaaaaattgctcgcgacgtggccggagccacatgggggaatgggtcaggagaggaagaagaagaagaggatggtcccgccgtgctcgtcgaacagcaaactgattccgcaatggaacccacgggtcctactcaggaacggtacaaggatggagtcgtgaccatcgggtgcgtcggctttcccaacgtagggaaaagttccctcattaacggcctggttgggcgcaaagtggtgagtgtatctcgaacccccgggcacacacgctactttcagacctactttttgactcccagtgtgaagctgtgcgactgtcctggcctgatattcccaagcctgttacccagacagctgcaggtcttagcggggatttacccaattgcccagatccaggagccttacaccgccgtcggataccttgcgtctaggattcccgttcaggccttgttgcacctgagacaccccgaggctgaagacccaagcgccgagcacccctggtgtgcctgggatatttgcgaggcatgggctgagaagcgcggctataaaacagcaaaggcagctcgtaacgatgtctatagggctgctaactcattgctcaggctggctgtagatggcaggttgtccctgtgcttccaccctccaggatattcagagcagaaggggacctgggaatcccaccccgaaactaccgagctggtcgtgctgcagggaagggtgggacccgccggagatgaggaggaagaagaggaagaagagctgtcctcttcctgtgaagaagaaggggaagaagacagagacgctgatgaggaaggggaaggtgatgaagagactccaaccagtgctcccgggagcagcctggcgggcagaaatccctatgcactgctgggagaagacgagtgttag

SEQ ID NO: 119338 - DNA, 789 bp, synthetic construct
  misc_feature 1..789: note = Description of Artificial Sequence: Synthetic coding sequence
  source 1..789: mol_type = other DNA
atggaacccacaggcccaacacaagagaggtacaaggatggtgtggtcaccataggctgtgtcggctttccgaacgttggcaagtctagtcttataaatggactggtgggccggaaagtggtcagtgtgtcccggactccggggcacacaagatacttccaaacttatttcctgactcccagtgtgaagctttgcgactgccctggcctaatattcccatcactcctgcctcggcagctgcaggtcttggccggaatctatccaattgcccagatccaggagccctacacggccgtgggatatctggccagccgaattccagtgcaggcgctgttacatctccgtcaccccgaggcagaagaccctagcgcagaacatccgtggtgtgcatgggacatctgcgaggcttgggccgagaaaagaggctataagacggctaaggctgcccgcaacgacgtgtatcgcgctgcgaatagtctgcttaggctggctgtagacggacgcctcagtctgtgctttcatccccctggctatagtgagcaaaagggcacatgggaatcccatccagaaaccacagagctggtggttttacaaggcagggtgggcccggcaggtgacgaagaggaggaggaagaggaggaactgtctagcagctgcgaagaggaaggcgaagaggacagggatgccgacgaagagggcgagggagacgaggagaccccaacatccgcccctggttcatctctggctggtaggaacccgtatgctcttctcggggaggatgagtgttag

SEQ ID NO: 119339 - DNA, 1215 bp, synthetic construct
  misc_feature 1..1215: note = Description of Artificial Sequence: Synthetic coding sequence
  source 1..1215: mol_type = other DNA
atgtccaaggaacagctaatgagccaggaggaacgctcctttcaagattatctgggtaagatccacggtgcctacagttccgagaagctatcctatttcgaacacaatctggaaacctggagacagctgtggcgcgttctggaaatgtccgatattgtgctcctgataacggatatcagacaccccgtggtgaattttccaccggctttatacgaatatgtgaccggggaactgggactggcacttgtactggtcctcaacaaggtggatctggcccctcccgccttggtggttgcctggaaacattactttcaccagcattatcctcaactgcacgtcgtgctgttcaccagttttccaagagatccgaggactcctcaagatccttcttccgtactgaagaagtctaggcggcggggcagaggttggacccgcgcgctggggcctgagcagctactgcgagcatgcgaggctatcacagttggcaaaggatttccaaacgtcggcaaatcatcccttattaacgggcttgtggggcggaaggttgtgagcgtgtctagaaccccgggccataccaggtatttccagacctactttcttactccatcagttaagctgtgtgattgtcccggcctcattttcccttctctgctgcctcgccagttgcaagttctcgcaggaatttatccgattgcccagattcaggaaccctataccgccgttggctatctcgcctcccgcataccagtccaggcattactccatcttaggcatcctgaggccgaggatccgtctgctgagcatccgtggtgtgcatgggacatctgcgaagcctgggccgagaagcgcgggtacaagacagccaaggcggcaaggaacgatgtgtatagggccgctaacagcttgctcagactagccgtggacggacgtttgagcctgtgcttccatccccccggctactcagagcagaagggaacttgggaaagccaccccgaaaccaccgagctggtagtgctgcagggcagggtgggaccagctggggacgaagaagaggaggaggaggaagaactgagtagtagctgcgaggaagaaggagaggaggacagagacgccgacgaggaaggtgagggtgatgaggaaacccctacctccgcgcccggtagttccctggccggtcggaacccctacgcgctactgggagaggatgaatgttag

SEQ ID NO: 119340 - DNA, 1290 bp, synthetic construct
  misc_feature 1..1290: note = Description of Artificial Sequence: Synthetic coding sequence
  source 1..1290: mol_type = other DNA
atggaagctgccgtcgtgctggaaatgagcgatattgttttgctgataacagacatcagacacccagtggtgaactttcctcccgctttatacgaatatgttaccggcgagcttggcctggccctcgtactggtgttaaataaagtggatcttgccccacccgccctggtggttgcatggaaacactactttcaccagcactaccctcaactgcatgtggtgttatttactagctttccccgggaccctagaacccctcaggatccatcaagcgttctgaaaaagagccggcggagaggccgaggttggacacgcgctctaggtccagaacagctgctccgcgcttgcgaggctatcaccgtcggcaaggttgacttatctagttggcgagagaaaatcgctagggatgttgctggggcaacctggggaaacggaagcggagaggaagaagaagaagaagatgggcccgccgtcctcgtggaacaacagaccgactcggctatggaacccacgggccccacacaagaacgctataaagatggagtcgttacaattgggtgcgtgggtttcccgaacgtgggcaaaagcagcctgatcaacggattggtcggccgcaaagttgtttccgtttccaggaccccaggccacactcgttattttcaaacctactttctcacaccctctgtgaaactctgcgactgtccaggcctcatttttcccagtctgcttcctcgccagctacaagtacttgccgggatctaccctatcgcccagatacaagagccgtatacagccgtcggctatcttgcatccagaatccctgtacaggctttgcttcatctgcgacatcccgaagccgaggatcccagcgccgagcacccttggtgtgcctgggacatctgtgaagcctgggccgaaaaacggggatataagacagccaaagcagcacgtaacgacgtgtaccgcgcagccaactctctcctgcgattggcagtggacggcagactgagcctctgttttcacccccctggatatagtgagcagaaaggcacctgggagtctcatccagagacaacggagctggttgtgctgcaggggagggtgggccctgcaggagacgaagaggaagaagaggaggaagaactgagtagctcatgcgaagaggaaggcgaggaagacagagacgctgacgaggagggcgaaggtgacgaggaaacacccacttccgcacctggaagcagcctggcagggcgcaacccctatgcccttctcggagaggacgagtgttag

SEQ ID NO: 119341 - DNA, 1290 bp, synthetic construct
  misc_feature 1..1290: note = Description of Artificial Sequence: Synthetic coding sequence
  source 1..1290: mol_type = other DNA
atggaggcggccgtggtgctcgaaatgtctgatattgttctcctgattaccgacatacggcaccccgtcgtcaacttccccccagcactgtatgaatatgttacaggagagctaggccttgctctggtgctcgtattaaacaaagtcgatctagcccctcctgctctggttgtggcatggaaacattacttccaccagcactatccccagctgcatgtagtcctcttcaccagctttccgcgtgatccccggacccctcaagacccaagtagtgttcttaagaaaagtaggcgtcgaggacgcgggtggacacgagctctaggcccagagcagctgctccgggcctgtgaggccattaccgtggggaaggtggacctgagttcctggcgcgaaaaaatcgcgcgagatgtcgccggggctacctggggcaacggctcaggagaagaggaggaagaagaagacgggcctgccgttctggtcgagcagcagacagatagcgctatggagcctactggccctactcaggaacgctacaaggacggcgtagtgactatcggctgtgttggattccctaacgtcggaaagagctcattaattaacggactagtcggacgaaaggtggtgtctgtgagtagaacacctggccatacccgctacttccagacctattttcttacaccctcagtgaagttgtgcgactgtcccgggttgattttccctagcttactgcccagacagctgcaggtgttggcaggtatctatccaatcgcccaaatccaagagccctataccgcggtgggttacctcgcgtctcgcatccccgtacaagcactgctacatctgcgacatcccgaggccgaggacccaagtgccgagcatccttggtgcgcatgggacatctgcgaggcctgggcggaaaagcgaggttataagacggctaaggccgcccggaacgatgtgtaccgtgcagcgaacagtctgctgagactggcagtcgatggaaggctgagcctgtgtttccatcctcccgggtacagtgagcagaagggcacttgggagtcccaccctgaaaccaccgagttggtcgtgctacaaggtagagtgggaccagcaggcgatgaagaggaggaagaggaggaggagcttagcagttcctgtgaggaagagggggaagaagatcgagacgcagatgaggaaggcgagggagatgaggagaccccaacttcagcaccggggagttcattagcgggacggaatccatacgccctgctcggggaagatgaatgctag

SEQ ID NO: 119342 - DNA, 789 bp, synthetic construct
  misc_feature 1..789: note = Description of Artificial Sequence: Synthetic coding sequence
  source 1..789: mol_type = other DNA
atggagcctacaggcccgacccaggagagatacaaagatggcgtggtcactatcgggtgcgtgggctttccaaatgtgggcaaatcttctctcattaatggccttgtgggacgcaaagttgtgagcgtcagccgtacccctggccacacgagatacttccagacatattttttgactccatcagtaaaattgtgtgactgccctgggcttatctttccatccctgctgcctaggcaactgcaagtccttgccgggatctacccgattgcccagattcaagagccttacaccgccgtaggataccttgctagccggatcccagtccaagcactcctccatttgcgacacccagaagcagaggatccttcagctgaacatccctggtgcgcctgggacatctgcgaggcatgggcagagaaacgaggttacaagacagctaaggctgctaggaatgacgtctaccgggcagctaactctcttctcaggctcgctgtggatgggcgcctttccctctgcttccatccccccggatactcagaacagaagggcacctgggaatcacacccagaaacgaccgagctggtcgtcctgcaggggcgcgttggacccgccggggatgaggaagaggaagaggaggaagagctgtcatcgagctgtgaagaagagggggaggaggaccgcgacgccgacgaagaaggggagggagacgaggagaccccaaccagtgccccggggagcagcttggcaggcaggaatccctacgcactccttggagaggatgaatgctag

SEQ ID NO: 119343 - DNA, 1290 bp, synthetic construct
  misc_feature 1..1290: note = Description of Artificial Sequence: Synthetic coding sequence
  source 1..1290: mol_type = other DNA
atggaggcagccgtcgtgctggaaatgagcgatatcgttctgctaataacggacatcagacatcctgtcgtgaattttccccccgccctgtatgagtacgtgacaggcgagctgggactcgcactggtactggtcctcaataaagtggacctcgccccgccagcactggttgtggcatggaaacattactttcaccagcactacccccaactgcatgtggtgctgttcacctctttcccgagggatccgcggaccccacaggatccgtcatctgtccttaagaaaagcaggcgcagggggcgtgggtggactcgggctctgggccctgagcagctccttagagcctgtgaggccatcacagtgggcaaagtagatctatcaagctggagggagaaaatcgcgagggatgtcgcgggagcaacatggggtaatggaagcggcgaggaggaggaggaggaagacggacctgctgtgctcgtggagcaacagacagacagcgcaatggagcccactggaccaacgcaagaaaggtacaaagacggcgtggtaaccattggctgtgtagggtttcccaatgtgggcaagtcttcccttattaacggtctcgtcggtcgtaaggtcgtgagtgtctcacgcacacctggacatacccgctattttcagacctactttttaaccccatctgtgaaactatgtgactgcccgggcctcattttcccgagccttctccctagacagcttcaggtccttgccggtatctacccaattgcacaaatccaggagccttataccgcagtcggatacttggcctctcggatccccgtacaggcgctgctccacttaaggcatcccgaagccgaggacccatctgctgagcacccttggtgcgcctgggacatctgcgaagcatgggctgagaagcgcggctacaagacagccaaagcagcacggaatgatgtataccgagccgccaattcactgctaaggcttgccgtggacggacgccttagtctatgcttccatccccccggctacagcgaacagaaaggcacctgggaatcacatcccgaaaccaccgaactggtggttctacaggggagagttggacccgctggcgacgaggaggaggaggaggaagaggagctcagctccagctgcgaagaagaaggagaggaagatcgggacgccgatgaggagggagagggagacgaggaaactccaacgagcgctcctggctcctctctggcggggcggaacccgtatgccctgctgggagaggatgagtgctag

SEQ ID NO: 119344 - DNA, 1215 bp, synthetic construct
  misc_feature 1..1215: note = Description of Artificial Sequence: Synthetic coding sequence
  source 1..1215: mol_type = other DNA
atgagtaaagaacagttaatgagtcaagaggagcggagcttccaggactatctcggcaagatacatggtgcctactcatccgaaaaattatcctacttcgaacacaatctggagacctggcgccagctctggagggttctggagatgtctgacatagttctgctgattaccgacatccggcaccccgtcgtcaattttcccccagctctgtatgagtatgttaccggagaactgggattggcccttgtcctcgtgttaaataaagtcgatctggcgccacctgccttagtagttgcctggaagcattattttcaccaacactatccccagctgcacgttgtcctattcactagctttccgagggatcctcgcaccccccaggacccctcttccgtgctcaaaaagagtcgccgtcgcgggaggggctggacacgggctctcggccctgagcaactgttacgtgcatgcgaagcaatcacggtagggaaggggtttccaaacgtgggaaagtctagcctcatcaatgggctggtgggcaggaaggtggtttcagttagcagaacacccgggcacactcgatattttcagacctactttcttacaccatctgttaagctgtgcgattgtccaggactcattttcccctctctgttacctagacagttgcaggttctggctggaatttacccaatcgctcagatccaagaaccctatactgctgtcggatatctggcaagtcggatacctgtgcaggcactgttacacttaagacaccccgaggctgaggatccaagcgccgaacacccatggtgtgcgtgggacatctgtgaggcctgggccgagaagaggggctataagacagccaaggccgctagaaacgacgtctatagagccgctaactctcttttacgccttgcagtcgacggacgcctgtccctatgcttccatccccccggttattcggagcagaaagggacctgggagagccaccccgagaccacagagctggtagtgctccagggtcgggtggggcccgcaggggatgaggaagaagaggaggaggaagaactttcctcatcatgtgaggaagagggtgaagaggatagagacgccgacgaagagggagagggagacgaggaaactccaacttccgctcctgggagttcgctggctggaaggaatccctacgcattgctaggagaagatgaatgctag

SEQ ID NO: 119345 - DNA, 1215 bp, synthetic construct
  misc_feature 1..1215: note = Description of Artificial Sequence: Synthetic coding sequence
  source 1..1215: mol_type = other DNA
atgagcaaggaacagctcatgagtcaggaagaaagaagttttcaggattacttaggcaaaatacacggagcctacagctctgagaaactgtcctactttgagcacaatttggagacatggaggcagctgtggcgagttctcgaaatgagcgatattgtcctcttgattacggatatcagacatcccgtggtcaattttcccccagctctgtacgagtatgtgacgggagagcttgggttagcccttgtgctggtcctaaacaaggtcgacttggcacccccagccctggttgtcgcctggaagcactatttccaccagcattatccccagctccatgtggtcctgtttacctctttcccaagggatcctagaaccccacaggacccatccagcgtgctcaagaagagcaggcgacggggtcgcggctggacaagagccctcggccccgagcaacttctccgagcatgcgaagcgattactgtcggtaagggcttccctaacgtgggcaagtcctccttgattaacggcctggtgggacgtaaggttgtctccgtctctagaacacctggacacacaagatacttccagacttattttcttacaccaagcgtgaagctgtgcgattgtcctggcttaatcttcccctcactgctcccccgccagctgcaagttttggcaggaatataccctattgctcagatccaggagccgtacactgccgtcggttacctggctagcagaattcctgtgcaggccctgctgcacctccgacaccctgaggccgaggacccgagtgctgagcatccttggtgcgcttgggatatttgtgaagcctgggccgagaagcggggatacaaaactgcgaaagctgcccgcaacgatgtctacagagctgcaaattcgctcctccggctggccgtggatggcaggttgagtttgtgttttcatcccccgggatacagtgagcagaagggaacatgggagtcacaccctgagaccactgaactggtggtccttcagggtagagtgggtccggctggggatgaggaggaggaagaagaggaggaacttagctcaagttgcgaggaggagggcgaagaggatagggatgcagatgaggagggcgaaggagatgaggaaactcccacatctgcccctggatcttccctggcgggtaggaacccatatgcactgctgggcgaggacgagtgttag

SEQ ID NO: 119346 - DNA, 789 bp, synthetic construct
  misc_feature 1..789: note = Description of Artificial Sequence: Synthetic coding sequence
  source 1..789: mol_type = other DNA
atggaacctaccggacctacacaggaacggtataaagatggagttgtgaccatagggtgtgtggggttccctaacgtgggtaagagcagccttatcaatggactggtggggaggaaggtggtctctgtctcccgcacaccaggacacacgagatatttccagacttatttcttaaccccttccgtaaagctctgtgactgccctggcctcatttttccatccctactacctcgtcagctccaagtgcttgcaggaatatatcccattgctcaaattcaggagccttatactgccgtcggatatttagcgtcacgcatcccggtgcaggccctgcttcacctacggcaccccgaagcagaggatccttctgcagagcacccctggtgcgcatgggatatctgcgaagcatgggccgagaaaagagggtacaaaactgccaaggccgcacggaacgatgtgtatcgggcggccaatagcctcctccgcctggcagtggacgggaggttgtccctttgtttccatcctcccggttacagcgaacagaaggggacttgggaatcccatcctgaaaccaccgaactcgtggtcctccagggtcgagtgggaccagccggtgatgaagaagaggaagaggaagaagagctctccagtagctgcgaagaggaaggcgaggaggacagagacgctgacgaggagggcgaaggcgacgaagaaaccccaacaagcgctcctggaagtagcctggctggcagaaatccttatgccttgctcggggaagatgagtgttag

SEQ ID NO: 119347 - DNA, 2196 bp, synthetic construct
  misc_feature 1..2196: note = Description of Artificial Sequence: Synthetic coding sequence
  source 1..2196: mol_type = other DNA
atggtgaaacctaagtacaaaggcagatctacaatcaatccttccaaggctagtaccaatcctgacagggtgcagggagcagggggacagaacatgcgggatcgggccaccattaggaggcttaatatgtatcgtcaaaaggagagaaggaactctcgggggaaaatcatcaagcctctgcagtaccagtccacagtggcaagcgggactgtggctagggtggaacctaatattaaatggtttggcaacactcgggtgatcaagcagtccagcttgcagaaatttcaagaggagatggatacagtcatgaaggacccctataaggtagtgatgaaacagagcaaattgccgatgtccctcctgcatgaccgaattaggccccacaacctgaaggtgcatatactggacactgagagttttgagactacatttggaccaaagagccaaaggaaaagacctaacttattcgccagcgacatgcagtcattgattgagaatgccgaaatgtccacggaatcctacgaccaggggaaggatcgcgacttggtcaccgaagatactggggtgaggaatgaagctcaggaggagatatacaagaagggacagtccaaaaggatctggggggaactgtataaagttattgactcgtctgatgtggtggtgcaagtgctagatgcccgtgatcctatgggcacccggagtccgcacatcgagacttatctaaagaaagagaagccttggaagcatctcatttttgtcctgaataagtgtgaccttgtgcctacctgggctacaaagcgctgggtggccgttctctctcaagactacccaacactggccttccatgcttcactgacaaacccctttgggaagggggcctttattcaactactgcgtcagttcgggaagttacataccgacaagaaacaaatttcggttggcttcatcgggtatcccaacgtgggaaagagctcagtgataaacaccttgcggtcaaaaaaagtatgtaacgtggcccctatcgccggggaaaccaaagtttggcaatatatcactttgatgcggcgcatttttctcatcgattgccccggggtagtgtacccaagcgaagacagtgaaacggatattgtgctgaagggagtagtacaagtggaaaagatcaagagtcccgaagaccatataggcgctgtcctagagcgtgctaagcctgagtatatttccaagacctacaagatagattcatgggagaacgccgaagattttctggagaaactggcctttcggacaggcaaactgttaaaagggggggaaccagatctccagaccgtgggtaaaatggtcctgaatgactggcagcgcgggcgaatccctttctttgtgaagccccctaatgccgagccactggtggcccctcagctgttgccttcgtcttccctggaagtagtgcccgaggccgcccagaacaaccctggggaagaggtcacggaaacggccggcgaaggttcggaaagcattattaaggaggagaccgaggaaaattctcactgcgatgctaataccgagatgcagcagatcctgaccagggttcgccagaacttcggcaagatcaacgtggtgccgcaattctctggtgatgatctggtccccgtcgaggtgtctgatctcgaggaggagctggagagcttttccgatgaagaagaagaggagcaggaacaacagcgggacgatgctgaagaaagcagttctgaacccgaggaagaaaacgtgggcaatgatactaaagccgtgataaaggcgctggatgagaagatcgctaagtatcaaaaatttctcgataaggcaaaagccaaaaaattctccgccgtacggatcagcaagggactctccgagaagatctttgccaagccagaggaacagcgcaaaacccttgaggaggacgtcgacgatcgtgcaccatctaaaaaggggaagaagaggaaggctcagagagaggaggaacaggagcactccaacaaggcaccgcgggctctgacaagtaaggaacgccgtcgggctgttaggcagcagcggcctaagaaagttggagtgcggtattacgaaacccataacgtcaaaaatcgaaataggaataagaagaagacaaacgactctgagggccagaaacacaaacggaagaagtttagacaaaaacagtag

SEQ ID NO: 119348 - DNA, 579 bp, synthetic construct
  misc_feature 1..579: note = Description of Artificial Sequence: Synthetic coding sequence
  source 1..579: mol_type = other DNA
atgcagagcctgattgaaaacgctgaaatgtcgactgagagctacgaccaaggaaaggatcgcgacctggtcaccgaggataccggagtgaggaacgaggcacaggaggagatctacaagaagggccagtctaaaagaatctggggagaactttacaaagtgatagatagtagcgacgtggtagtccaggtgctggacgctcgagaccctatgggcacacggagtccacacatagagacctatctgaagaaagaaaagccgtggaaacacctcatattcgtgcttaacaagtgtgacctggtgcccacctgggctacaaaacgctgggtcgccgtgctgagtcaggactatccgactctggcattccacgcaagcctgacgaaccctttcggcaaaggggcctttatccagctcctccgccaattcggtaagctgcacacagacaagaaacagatttcggtgggtttcatcggatacccaaatgttgggaagagcagcgtgattaacacactgcggtctaagaaggtgtgcaacgtggctcccatagcgggagagacgaaagtttcaatccttctctag

SEQ ID NO: 119349 - DNA, 1614 bp, synthetic construct
  misc_feature 1..1614: note = Description of Artificial Sequence: Synthetic coding sequence
  source 1..1614: mol_type = other DNA
atgacttgccacaaacggtacaagattcagaagaaggtgagagaacatcatagaaagctgcggaaggaagcaaaaaagaggggacacaaaaagcccagaaaagatcccggggtgccaaactcagcaccctttaaggaggcgttgttacgtgaggccgaactccggaaacaaagacttgaagaactgaaacagcagcaaaagctggaccgtcagaaagaactggagaagaaacgaaagttagagacgaaccctgatataaagccctcgaacgtggaacccatggaaaaggagttcgggctgtgcaaaactgagaacaaggcaaagtcaggcaagcagaactctaagaagctgtattgccaagaacttaagaaagtcatcgaggcttcagacgtggtgctggaggtcctcgatgcgcgcgaccccctgggttgtcggtgcccgcaggttgaggaagccattgttcagtcagggcagaagaagttagtattgatactgaacaagtctgatctggtgccgaaagagaatttggaatcatggcttaattatctgaaaaaggaattgcccacagtcgttttcagggcctctaccaaaccgaaagacaaaggcaagataacgaaacgtgtaaaagccaagaagaatgccgcaccgttccggagcgaagtttgttttggcaaggaaggactttggaagttgctgggcgggttccaggaaacatgttctaaagcaatccgtgtgggcgttatcggattccccaatgtagggaaatcctctattattaattccttaaaacaggaacaaatgtgcaatgtaggcgtatctatgggccttaccaggtctatgcaggtggtaccgctggacaagcagatcactattattgactccccgtccttcatcgtctcgccactaaactccagcagcgcacttgcactccgcagtcctgcctcgatcgaggtggttaaacccatggaggccgcttcggctatcctatcgcaggctgacgcccggcaggtcgtgttgaagtatactgtcccaggctaccgcaatagtctggagttctttaccgtgttagcgcaacgccggggcatgcaccagaagggaggcattccgaatgttgagggtgcagctaaactcctgtggtctgagtggacaggtgcatccctcgcatactattgccaccctcctacatcttggactccaccaccatactttaatgaaagcatcgtggttgacatgaagtccggcttcaacttggaggaacttgagaagaacaacgcacagtctataagggccattaaaggcccacacctagctaattccatcctgttccagtcctctggcctgacgaatggaataatagaggagaaggatattcatgaagagctgccgaagcgtaaagagaggaagcaggaagaaagggaagatgataaagattctgatcaggagactgtggatgaggaagtcgatgagaactcctccggaatgtttgccgccgaggagactggagaagccctctcagaggagactactgccggcgaacagtctactcgatctttcatattggataaaattattgaagaggacgacgcctacgacttctccacagattacgtatag

SEQ ID NO: 119350 - DNA, 1650 bp, synthetic construct
  misc_feature 1..1650: note = Description of Artificial Sequence: Synthetic coding sequence
  source 1..1650: mol_type = other DNA
atgaaacggcccaagcttaagaaagcttctaaaagaatgacatgtcacaaacgctacaaaatccagaaaaaagttcgcgaacatcaccggaagctgagaaaggaagccaagaaacgcggacacaagaagcccagaaaggatccaggagtgccaaattcagcaccttttaaggaagctttactacgtgaagcagaattgcgcaagcagcgactcgaggaactgaaacagcagcagaaattggatcgacaaaaggaactggagaagaagcgcaaactggaaactaacccagacattaaaccctctaatgtggagcccatggaaaaagagttcggtctctgtaagacggaaaacaaggcaaagagcggaaaacaaaatagtaagaagctctactgccaggagctgaagaaggtgatcgaggctagcgacgtggtgctcgaagtattagatgcccgtgacccgctgggctgtcgttgcccacaggtggaggaagccattgtccagtcaggccagaagaagctcgttttaatcctgaataagtccgatctcgttcctaaggagaatctcgagtcgtggctcaactatttaaagaaagaactgcctaccgtcgtctttagggcctctacgaaacctaaagataaggggaagatcacaaagagagtgaaagcgaaaaagaacgcagctccgtttagaagcgaggtctgcttcgggaaggagggcctgtggaaattgctcggggggttccaggagacctgtagcaaagctattcgggtgggcgtcatcggatttcccaatgtcggcaaatcttctatcattaattctctcaagcaagagcagatgtgcaacgttggggtgtctatgggactgaccagatcaatgcaagttgtgccactggacaagcaaattaccataatcgacagcccctccttcatagttagtccccttaatagtagttctgccttagcactgcggagccctgcttccatcgaggtcgtgaagccaatggaggcggctagcgcgattctgagtcaggcagatgcacgacaagttgtgctcaagtacaccgtaccaggctataggaattcgcttgagttttttaccgtgctggcccaaagaagaggaatgcatcagaagggagggatccccaacgtggagggggccgctaagcttctttggtcagagtggactggcgcttcactggcttattactgccatcccccgactagctggacaccgccaccttacttcaatgagtctatcgtggttgatatgaagtcggggttcaatctcgaagaactcgagaaaaataatgcccagagcattcgcgctatcaagggaccccatctggcaaacagtatactgttccagagctccgggctgaccaacggcatcattgaagagaaagatatacacgaggagcttcctaaacggaaggagagaaagcaggaggagagagaagacgataaagacagtgaccaagaaaccgtagatgaagaggtagatgaaaactcttccggtatgttcgccgccgaggagacaggtgaagccttgagcgaggaaacaaccgcgggagaacagtctacgagatccttcattcttgataagattatagaggaggatgatgcctacgacttttccacagactatgtgtag

SEQ ID NO: 119351 - DNA, 291 bp, synthetic construct
  misc_feature 1..291: note = Description of Artificial Sequence: Synthetic coding sequence
  source 1..291: mol_type = other DNA
atgacttgccataaaaggtacaaaatccagaagaaagtgcgcgagcatcatcggaagctcaggaaagaggcgaaaaaaagaggccacaagaagccccgaaaggaccctggtgtccccaactccgcaccttttaaggaggctctgctgcgggaggccgagctgagaaaacagagactggaagagttgaagcaacagcaaaaactcgaccggcaaaaggaactcgagaagaagagaaagctggaaaccaacccggacatcaagccgtccaatgtcgaaccaatggagaaatag

SEQ ID NO: 119352 - DNA, 408 bp, synthetic construct
  misc_feature 1..408: note = Description of Artificial Sequence: Synthetic coding sequence
  source 1..408: mol_type = other DNA
atgacttgtcataagcggtacaaaatccagaaaaaggtgagggaacaccatcgcaaactgagaaaggaagctaaaaagaggggccacaaaaagcctagaaaagatccaggggtgccaaactcggcccctttcaaggaagccctgctgagagaggccgaactgcggaaacagcggctggaagaactcaagcagcaacaaaaacttgatagacagaaagagctggaaaaaaaacggaaattggagaccaatccagacatcaagcctagcaacgtggagccaatggaaaaggagtttggcctttgcaaaacagagaataaggccaagagcggtaagcagaactcgaagaaactatattgccaggaactcaagaaggtaatagaagcttccgatgtcgttctggaagtttag

SEQ ID NO: 119353 - DNA, 417 bp, synthetic construct
  misc_feature 1..417: note = Description of Artificial Sequence: Synthetic coding sequence
  source 1..417: mol_type = other DNA
atgaaaagacccaaactaaagaaagcgtctaaaaggatgacttgtcataaacgctataagatacaaaaaaaggtacgcgaacaccacagaaagctgaggaaagaggccaaaaagcgggggcacaaaaaaccgaggaaggatcccggcgttcccaatagcgccccttttaaggaggctcttctgagggaggccgaactcagaaagcaaagactggaggagctcaagcagcaacagaagctggaccggcaaaaagaattggagaaaaaacgaaaactcgaaaccaatcccgacatcaagccttcaaatgttgagcccatggaaaaggagttcggtctgtgtaaaaccgaaaataaggctaagtcgggtaaacagaacagcaagaagctatattgccaggaattaaagaaggtgagttag

SEQ ID NO: 119354 - DNA, 1038 bp, synthetic construct
  misc_feature 1..1038: note = Description of Artificial Sequence: Synthetic coding sequence
  source 1..1038: mol_type = other DNA
atgccccggattgacgcggacttgaagctcgatttcaaagatgtgcttctgcggcccaagagatcttccttgaaaagccgggctgaggtggatttggaacgtacatttacattcaggaactccaagcagacttatagcggaatccccatcattgtggccaacatggataccgttgggacattcgaaatggcagctgtgatgagccagcacagcatgtttaccgccattcacaagcactatagccttgacgattggaaactcttcgctacgaatcaccccgagtgcctccaaaacgtcgccgtgtcctccggatccggtcagaatgatttggaaaaaatgacttccattctcgaagcagtgccgcaggtcaagtttatatgtctggatgtggctaacggatattcagagcactttgttgagtttgtgaaactcgtcagagcaaaattccccgagcacaccatcatggctgggaacgtcgttacgggtgaaatggtggaggaattgatcttatctggggcagacatcattaaagtaggtgttggccctggttcggtttgcactactcggactaagactggcgtcggttatccacagttaagcgccgttatcgaatgcgcggacagtgcacacgggctcaaaggccatattatatctgacggtggatgcacttgtcccggcgacgtggctaaagctttcggagccggggccgactttgtgatgctgggcgggatgttttcagggcataccgaatgtgccggtgaagtttttgaacgaaatggacgcaaactaaagctgttttatgggatgtcctccgacacagctatgaataaacacgctgggggcgtggcagaataccgggccagtgaaggtaagacagttgaagtaccctacaaaggcgacgtggaaaacacaatactggatattctcggagggcttcgatctacgtgtacatatgtgggcgccgctaagttgaaagagcttagtaggcgggccacatttatcagggtcacacagcagcacaacacagtattcagctag

SEQ ID NO: 119355 - DNA, 1230 bp, synthetic construct
  misc_feature 1..1230: note = Description of Artificial Sequence: Synthetic coding sequence
  source 1..1230: mol_type = other DNA
atgccacatattgataacgatgtcaaactagacttcaaggatgtgctgctaaggcctaaacgttctacgctgaagagtaggtccgaggtcgacctgaccagatctttttctttcagaaatagcaaacagacctattcgggggtccccataattgccgctaacatggacaccgtggggacattcgaaatggcaaaagtactgtgcaaattctcattattcaccgcggtgcacaaacactactccctagtgcagtggcaggaattcgcaggccagaacccggactgccttgaacatttggccgcaagtagcggcaccggatcttctgacttcgaacagctggagcaaatcctggaggcaatcccacaggtgaaatacatatgcctcgacgtggctaatgggtactccgaacactttgtcgaattcgtaaaggatgtcaggaaacggtttccccagcacacaatcatggccgggaacgtcgtcacgggcgagatggtagaagaactgatcttgagtggcgccgatatcataaaagtcggcatcgggccaggttccgtctgcaccaccaggaagaagacgggcgtcggatacccccaacttagcgccgtcatggaatgcgccgatgccgcacatggcctgaaaggacacataatttcagacggcggatgtagctgccctggtgatgtggcaaaggcttttggtgcgggcgcagatttcgtgatgttggggggcatgctagctggtcactctgaaagcggaggggagttgatagaacgcgacggcaagaagtataaattgttctatggcatgagcagtgaaatggccatgaaaaagtacgccggcggggtggccgagtaccgttacgtgtggaggccccgatctttagtcatcgtgtggcgccaaaattcctggctacttcggggcggctggtatagcagtcagcgctcaatggtgaatagaggatctatgttaggctccgttgaaaaaagcctggggttgcgtaacccagagggcgaagacaacaaggtatttccgacattacgggcgagcgaaggaaaaactgtcgaagtgcccttcaagggcgatgtcgagcacacaatacgggacatattgggcggaattcggtccacctgtacatatgtcggcgccgctaagttaaaagagctgtcccgacgcaccacttttattcgcgttacgcagcaggtgaacccgatcttcagtgaagcctgctag

SEQ ID NO: 119356 - DNA, 1047 bp, synthetic construct
  misc_feature 1..1047: note = Description of Artificial Sequence: Synthetic coding sequence
  source 1..1047: mol_type = other DNA
atgccacacatagataatgacgtaaaattggatttcaaagatgtgctgctgcggcctaagcggtcaacactcaagtctagatccgaagtcgacctcactcggtcattttctttccgcaattctaagcagacatattcgggagtacctatcattgccgccaatatggacaccgtcggaaccttcgagatggccaaagtgctctgtaaatttagtctttttaccgccgtacataaacattatagcctcgtgcagtggcaagaattcgccgggcaaaatcctgactgcttggagcacctcgctgccagcagcggcacaggcagttcggacttcgaacaactggagcagattctggaagcaatcccacaggtgaagtacatttgtttagatgtcgctaacggttatagcgagcacttcgtcgagttcgtaaaggacgtaaggaagagattcccgcagcacacgattatggcgggcaacgttgtgactggcgagatggtcgaagaactgatcctcagcggggcagacataatcaaagtaggaattggccccggatcagtctgcaccacgagaaagaagacaggcgtagggtacccacagttgtctgctgttatggagtgcgccgacgccgcccatgggctgaagggacacattatctctgacggcggatgttcgtgccccggggacgtggccaaagccttcggggccggcgccgacttcgtgatgctaggcggcatgctcgcaggacattccgagagtgggggcgagctgatagagagggatggtaagaagtataaactgttctatggtatgtcttcggagatggccatgaaaaaatatgccggaggagtggcggagtatcgggcgagtgagggcaaaacagtggaagtgccttttaagggggacgtggaacacacaatacgcgacattctgggtggtattcggtccacctgtacctacgtcggcgctgctaagcttaaggagctgtcccgacgaaccaccttcatccgggtcacacaacaagtgaatcccatcttctccgaagcttgttag

SEQ ID NO: 119357 - DNA, 1047 bp, synthetic construct
  misc_feature 1..1047: note = Description of Artificial Sequence: Synthetic coding sequence
  source 1..1047: mol_type = other DNA
atgcctcacattgataacgacgtcaagctggacttcaaagatgtgctcttaaggccgaagcgatccactttaaaaagtcggtccgaagtggacctgactcggagtttctccttccgcaatagcaagcagacctattctggggtccctattatcgccgccaatatggatacagttggcaccttcgagatggcaaaggtgctatgcaagtttagtctgtttaccgctgtgcataagcactatagtctggtgcagtggcaggaattcgccggccaaaaccctgactgcctggagcatcttgccgccagctctggaaccgggagttccgacttcgagcagctggagcagatcctggaggccatccctcaggtgaaatacatctgcctggatgttgccaatggatactccgaacattttgtggagtttgtcaaagatgtgcggaagcgtttcccccagcacaccatcatggcaggtaacgtggtgaccggcgagatggtggaggaactgatacttagcggcgccgacattatcaaggtgggtataggccctggctccgtctgcaccacaaggaaaaagactggagtaggataccctcagctgtctgctgtgatggagtgtgcggacgccgctcatggactgaaaggacatattattagcgatgggggctgctcgtgtcctggagacgtggccaaagctttcggtgctggcgccgattttgttatgctggggggaatgctggctggccacagcgagtctggaggcgagctaattgagcgtgatggaaaaaaatataaactattttatggaatgtcatctgaaatggcaatgaagaagtacgcaggcggcgtcgctgaatatcgagcctccgaaggtaagacagttgaagtgccttttaagggggatgttgagcacacgattagagacatcttgggcggaattcgtagtacatgtacatacgttggtgcagcaaagcttaaagaactcagccggcgaaccaccttcatacgagtgactcagcaggttaaccctattttcagtgaggcctgctag

SEQ ID NO: 119358 - DNA, 1101 bp, synthetic construct
  misc_feature 1..1101: note = Description of Artificial Sequence: Synthetic coding sequence
  source 1..1101: mol_type = other DNA
atgacttcctgcttacccgcgcttcggttcattgccactcctcggctgtctgccatgcctcatatcgacaatgatgtgaaactggattttaaagacgtgctgctccgccctaaacggagcacactgaaaagcagatccgaggtcgacttaacccggagcttttcattcagaaacagcaagcagacctactccggagtcccaatcattgcagccaacatggatactgtgggtacctttgagatggcaaaagtgctctgcaaatttagtctttttactgcggtgcacaagcactatagcttggtccagtggcaagagttcgcgggccagaatcccgactgcctggagcacctggcggcctcctctggcaccggaagttccgattttgagcagctcgagcagatcctggaggctatcccccaagtcaagtatatttgcctcgatgtagcaaacggctactctgagcattttgtggaattcgttaaagatgtcagaaagaggttccctcagcatactattatggccggtaatgttgtaaccggggagatggtagaggagctgatattaagcggtgctgacataattaaggtgggaatagggcctgggtctgtgtgtactacacggaagaagactggtgtgggctacccccaacttagcgctgtgatggaatgtgccgacgccgcgcacggtttaaaggggcacataatcagcgatggaggttgctcctgtcctggggatgtggcaaaagccttcggtgcaggggccgatttcgtaatgttgggtggcatgctggccgggcactcagagtctgggggggagttaattgaacgagatggcaaaaagtacaaactcttttacggcatgtcttccgagatggccatgaagaaatacgcgggcggagttgccgagtaccgggccagtgagggcaaaaccgtggaggtgcctttcaaaggtgacgttgagcatacaattcgcgacattcttgggggaattaggtccacatgcacctacgtcggggccgcaaagctgaaggaactgtcaaggcggactaccttcattcgtgtaacccagcaagtgaatcctatttttagtgaggcctgctag

SEQ ID NO: 119359 - DNA, 1047 bp, synthetic construct
  misc_feature 1..1047: note = Description of Artificial Sequence: Synthetic coding sequence
  source 1..1047: mol_type = other DNA
atgcctcacatcgataatgacgtgaagctggacttcaaggacgtgctgctgcgcccaaaacggagcactctgaagtcccgctccgaggtagacttgacccgcagcttttcctttcgtaactctaaacaaacctacagcggggttcctattatcgccgctaatatggacacggtcgggactttcgaaatggcgaaagttctctgcaagtttagtttgttcaccgcagtgcataaacattactcccttgtacagtggcaagaattcgcaggacagaacccagactgcctcgaaagcatttggttgcctgcacaggcccaggccctccttacactatcatcatggaataggagctggaagcttttcccccggaagtatatttgtttggatgtagctaatgggtattcagaacattttgttgagttcgtcaaggacgttcggaagcgctttcctcaacataccatcatggcagggaacgtagtgacaggggagatggtggaggagctcatacttagtggagcggacatcattaaagtggggattggtccagggtctgtgtgcaccactcgcaaaaaaactggtgtgggctatccccagctatccgccgtgatggagtgcgctgatgcagcccatggactaaagggacacattatttccgatgggggatgttcttgccctggtgacgtggcaaaagcattcggagctggcgccgatttcgtgatgctgggaggaatgctcgcaggccactccgaatctggcggcgaactaatagagagagatgggaaaaaatacaagctgttctatggcatgagctccgaaatggcaatgaaaaagtatgccggcggagtggcagagtaccgagcctctgaaggtaagaccgtggaggtcccatttaagggagacgtggagcatactatccgagatatcttggggggaatccggagcacctgcacgtacgtgggagctgcaaagctcaaggagctctctaggcgaacaacattcatacgggtaacccagcaggttaaccccattttcagcgaggcttgctag

SEQ ID NO: 119360 - DNA, 1047 bp, synthetic construct
  misc_feature 1..1047: note = Description of Artificial Sequence: Synthetic coding sequence
  source 1..1047: mol_type = other DNA
atgcctcacatcgataacgacgtcaagctggacttcaaggacgtgctcttaagaccaaaacggtccactttgaagtctcgatccgaagtagacttaactagatcattcagctttcggaacagcaaacaaacatactctggcgttcctatcattgctgcaaatatggatactgtggggacattcgagatggctaaggtgttatgtaagttctcgctcttcaccgcagtgcacaaacattattctctggtgcagtggcaggaattcgccggacagaatccggactgcctcgagcacctcgcagcttcctctggtaccgggagctccgatttcgaacagttggagcaaatcttggaggccatcccccaagtaaagtacatctgccttgacgtcgcaaatggctactctgagcattttgttgagtttgtgaaggacgtacggaaacgattcccccagcataccatcatggccggaaacgtggtgacgggggaaatggttgaggagcttatcctctccggtgccgacatcatcaaggtggggattggcccaggttccgtctgtaccactcggaagaaaacaggcgtaggctatccccagcttagtgcagtgatggagtgcgccgatgccgcccacgggctgaaaggacacatcatctccgatggaggctgcagctgccctggcgacgtcgctaaggcttttggagccggcgccgatttcgtaatgctgggcggaatgctggcagggcacagcgagagtggcggcgaattgattgagagagatggcaaaaagtacaagctgttctacggcatgtcctccgaaatggctatgaagaagtatgccgggggcgttgccgagtatcgtgctagcgaaggaaagacagtagaggtgcccttcaagggggacgtggaacatacgatacgagacattctgggcggtatcaggtccacttgcacctacgtgggtgcggccaaactgaaggaattgtctcgccgtactacttttatccgcgtcactcagcaggtgaacccaatcttttccgaagcctgttag

SEQ ID NO: 119361 - DNA, 1779 bp, synthetic construct
  misc_feature 1..1779: note = Description of Artificial Sequence: Synthetic coding sequence
  source 1..1779: mol_type = other DNA
atggccagcgagatccacatgacaggacctatgtgtttgatcgaaaatacgaacgggcgtcttatggcgaacccagaggccctgaaaatcctgtcagctataactcaaccaatggtggtggtcgctattgtcgggttgtaccggacagggaaatcctacttgatgaacaagctcgcaggcaaaaaaaagggattctcccttggcagcacagtccagtcccacaccaaaggaatatggatgtggtgcgttccacatcccaagaagcctggccacatcctcgtgctgctggacactgaaggcctgggggatgtggagaagggggataatcaaaatgattcctggatatttgccctcgctgtactactctctagtactttcgtgtataactccatcgggactattaaccaacaagccatggaccaactgtactacgtgacggagcttacacacaggattcgcagtaaaagttcacctgatgagaatgaaaacgaggtcgaggactccgctgacttcgtcagcttttttccagacttcgtgtggacactgcgggacttttccttagacctggaggctgacggacagccactgacccctgacgagtatctgacatactctctgaaactgaaaaaaggtacatctcagaaggacgagacgttcaatctccctcggctgtgtatccgaaagtttttcccaaagaagaaatgctttgtatttgacagacctgtgcacagacgtaagttagcccaactggagaagctccaggacgaagaattggacccggaatttgtgcagcaggtagccgacttctgctcatacatcttctcaaattccaaaaccaagactctcagcggcggaatccaggtgaacggcccccgcctcgagtcgctggtgctgacttatgtgaatgctattagctccggtgacctcccatgtatggagaatgctgttctggctctagcccagatcgaaaatagcgcggcagtgcagaaagctattgcccattatgagcagcagatgggccagaaggtccaattacctactgagaccctccaagaattgttagacttgcaccgggattccgagagggaggccattgaagtgttcatccggagctcatttaaggatgtggatcacttgtttcaaaaagagttggctgctcaacttgaaaaaaagcgagatgacttctgcaaacagaatcaggaagcgtcgagcgatcgttgctctgcactgttgcaggtgatttttagtccgctcgaagaagaggtcaaggcaggaatttattctaagcctgggggctacagattgtttgtgcaaaaactgcaggatcttaagaaaaaatattacgaagagccccgaaagggtatccaggctgaagagatcctccaaacttacttgaagtccaaggagagtatgaccgatgccatcctgcagaccgatcagactttaaccgaaaaagagaaagagatcgaggtagagcgggttaaggcggagagcgcacaggcctcagctaaaatgctgcaggaaatgcagcgaaagaacgaacaaatgatggagcaaaaggagagatcttatcaggagcatctgaagcaactgaccgagaaaatggaaaacgaccgtgtacaacttctgaaagagcaagagcggaccttagctctgaaattacaggagcaagaacaactactgaaggaaggctttcagaaagaatctcgcatcatgaaaaatgaaatccaggacctgcaaaccaagatgcggagacgaaaagcttgcaccatctcttag

SEQ ID NO: 119362 - DNA, 1668 bp, synthetic construct
  misc_feature 1..1668: note = Description of Artificial Sequence: Synthetic coding sequence
  source 1..1668: mol_type = other DNA
atggtagtagttgcgatagtcggcctgtacagaaccggcaagtcttatctgatgaataagctggctggaaagaaaaaggggttctcgttaggaagtacagtgcagagccacaccaagggcatttggatgtggtgtgtgccacaccccaagaagcccggacacatcttagtgttgctcgatacagagggcctcggagacgtggagaagggagacaaccagaacgatagctggattttcgctttggctgtcctgttgtcctctactttcgtctataactcgattggaacaatcaaccaacaagcaatggaccagctttactacgtgacagagttaacacataggatcagaagtaagtccagtcccgacgagaatgagaacgaggtagaggatagcgccgacttcgtgagttttttccccgacttcgtctggactttgcgagatttctcactggaccttgaggcagatggtcaaccgcttacccctgacgagtacttaacttatagccttaaacttaaaaagggaacatctcagaaagatgagacattcaatctgccgcggctctgtatccgaaagtttttccccaagaaaaagtgttttgttttcgacaggcctgttcataggcgcaagctcgcccagttggagaaactccaggatgaagaacttgaccctgagttcgtgcaacaggttgccgatttctgtagctacatcttcagcaattccaagaccaaaacattaagcggcggaatccaagttaatgggcctcggctggagtcactggtgttgacctacgtgaatgcgatcagctctggcgatttgccttgcatggaaaacgccgttcttgctctcgcacagatagagaacagcgccgcagtccagaaggctatcgctcattacgagcagcaaatgggacaaaaagtgcagctccccacagagaccctgcaggaattgttagatctgcaccgcgattcagaacgcgaggctatcgaagtgtttattagaagtagctttaaggatgtcgatcacctgttccagaaagagttggcagcccagttggaaaagaagagagacgatttctgcaaacagaatcaggaagccagctccgatcggtgcagcgctttactgcaggttatcttcagcccattagaagaggaggtgaaagctgggatatactctaaaccaggggggtaccgcctgtttgtgcagaaactacaagatcttaaaaagaagtattatgaagagcccaggaaaggaatccaagcagaagagattctgcagacctacttaaaatctaaggagagtatgaccgacgcaattctgcagacagaccagaccttgaccgagaaagagaaggagatcgaggtagagagggtgaaagccgagagcgcccaagcctcagctaagatgctgcaggagatgcaaagaaagaacgagcagatgatggagcagaaagaaagatcctaccaggaacatctgaaacagctgacggaaaaaatggaaaacgaccgggttcaacttcttaaggagcaggaaaggaccttggccctgaagctgcaggagcaggagcaactgcttaaggagggctttcagaaggaaagcaggattatgaagaacgagatccaagacttgcagaccaaaatgcggcgaaggaaggcctgcactatctcgtag

SEQ ID NO: 119363 - DNA, 1776 bp, synthetic construct
  misc_feature 1..1776: note = Description of Artificial Sequence: Synthetic coding sequence
  source 1..1776: mol_type = other DNA
atggcccccgaaatcaaccttcccgggcctatgtccctcatcgataacacaaagggacaattagtcgttaatccagaggccctcaagattttgtctgctataacccagccagtggtcgttgtcgcgatcgtcgggctctatcggactggaaaatcttacctgatgaataaactggccggcaagaaaaacggttttagcttgggcagcacagtaaaaagtcatactaaaggcatctggatgtggtgtgtgccccaccccaagaagccagagcacaccctggttctgctcgacaccgagggcttaggagacattgagaaaggagataacgaaaatgattcttggatttttgctctggccatcctgctaagctccactttcgtctacaattcgatgggaacaataaatcagcaggcgatggatcagctgcactacgtgaccgagcttaccgatagaatcaaggctaatagctccccagggaacaacagcgtagacgattccgcagactttgtgagttttttccctgcttttgtgtggaccctccgcgacttcacgctcgaacttgaggtcgacggcgagccaatcacagcggacgattaccttgagttgtcgttgaaattgagaaagggcactgacaagaagtcaaagagctttaatgaccctcgtctgtgcatcaggaagtttttccccaagaggaagtgctttgttttcgattggccagctccgaaaaaatacttagcgcacctggaacagctgaaggaggaggaactgaacccggacttcattgaacaggtggcagaattttgctcatacatcctgtctcattctaacgtcaaaaccctcagtggagggatcccagtcaacgggcctagactggagagtcttgtgctcacatacgttaatgcgattagcagcggggatctgccctgcatggaaaacgctgtgctggccttggcccagatcgagaattccgcggctgtggagaaggccattgcgcactatgaacagcagatgggccagaaggtacagctccctacagagacactgcaagaacttctggacctgcaccgggattctgagagagaggcaatcgaagtgttcatgaagaactccttcaaggacgtggatcagatgttccagcggaagcttggagcccagctggaagcccgacgtgatgatttttgcaaacagaacagcaaggcctcttccgactgttgcatggcactgctgcaggacatattcggccctctggaggaggacgttaaacagggtaccttcagcaaaccgggtggttaccgcctgtttactcagaaactacaggaattgaaaaataagtattaccaggtacccagaaagggaattcaggccaaagaagtgttgaaaaaatatttggagagtaaagaagacgtggctgatgccctgctgcaaacagaccagtccttgagcgagaaggaaaaagctattgaagtagaacgaatcaaggctgaaagtgctgaagcggcgaagaagatgctggaagagatccagaagaagaacgaagagatgatggagcagaaggagaaaagttatcaagagcatgtgaagcagctgaccgagaagatggaacgggaccgtgcacagctgatggcagagcaggagaagacactagctctgaaattacaggagcaggagcggctcttaaaggagggctttgaaaacgagagtaagagacttcagaaggatatctgggacatccaaatgcggagtaagtcgttggagcctatctgtaatatcctgtag

SEQ ID NO: 119364 - DNA, 1776 bp, synthetic construct
  misc_feature 1..1776: note = Description of Artificial Sequence: Synthetic coding sequence
  source 1..1776: mol_type = other DNA
atggccccagagatcaatctacccggacctatgtctctaatagataatacgaaagggcagctggttgtgaaccccgaggcccttaaaatcctgagcgcgatcacccagccagtggtggtggttgctatcgtaggtctgtacagaactggcaaatcttacctcatgaataagcttgcgggaaagaaaaatggtttctccttggggtccaccgtaaaatcccacacgaaaggcatatggatgtggtgcgtcccacacccaaagaaacccgaacacacactggttctactagacacggagggactgggggacattgagaaaggagataacgagaacgattcatggatctttgccctagcgatcttactcagctccactttcgtctacaacagcatgggcaccatcaatcaacaggcaatggaccagctgcactatgtgacggagcttacagatcgcatcaaagccaacagctcacccggtaacaacagtgtggatgatagcgcggactttgtgtccttcttccctgcctttgtttggacactccgagacttcaccctcgaactagaagtggacggagaacctatcactgccgacgactacctggagctctcgctgaaactaaggaaggggaccgacaagaagtcgaagtcctttaatgatcctcgcctgtgtataagaaagttttttcctaaacggaaatgtttcgtgtttgattggccagccccgaaaaaataccttgcccaccttgaacagcttaaagaggaagaactgaaccctgacttcattgaacaggtggccgagttctgctcatacattctaagccactctaacgtgaaaactctcagcgggggcatcccagtgaacggcccgaggctcgaatccctcgtgctgacatatgtcaacgccatcagctccggggacctgccatgtatggaaaacgcagttctggcactagcgcagattgaaaactctgcagcagtggagaaggcaatcgcacactacgaacagcagatgggtcagaaagtgcaactgcctactgagaccctgcaggagctgctcgacctccacagagattccgaacgggaggctattgaagtgttcatgaagaattcctttaaggatgtggaccagatgtttcaaaggaagttgggagcccagctggaggcaagacgagacgacttctgcaagcagaacagtaaagcctctagcgattgttgtatggctctgctgcaggatattttcggccctttagaggaggatgtaaagcaaggaactttctcgaaacccgggggataccggctgttcactcagaaactgcaggagctaaagaacaaatactaccaggtgcctaggaaaggaatccaggcaaaagaggtgttgaaaaaatatctggagtcaaaggaagacgtggccgacgccctgcttcagactgaccaatcgctgagcgaaaaagagaaagctatcgaagtggaacggattaaggctgaatctgccgaggccgcaaagaagatgctggaggagattcagaagaaaaatgaagagatgatggaacagaaggaaaagtcctaccaggagcatgttaagcagctgacagagaaaatggagcgcgaccgggcccagttgatggccgaacaggagaagacactagctctaaagctgcaggagcaggaacggttgttaaaagaaggatttgagaacgagagcaagaggttacaaaaagacatatgggacattcagatgcgatctaagagccttgaacctatctgcaacatactgtag

SEQ ID NO: 119365 - DNA, 1323 bp, synthetic construct
  misc_feature 1..1323: note = Description of Artificial Sequence: Synthetic coding sequence
  source 1..1323: mol_type = other DNA
atggcgcctgaaatccatatgacaggccctatgtgcctgatcgaaaatacaaacggtgagctggtggctaacccggaagcattaaagattctgagcgccattacacaaccagtggtggtggtagccatcgtcggcctctatagaaccggaaagtcctatttgatgaacaagcttgccggcaagaataagggcttttctctgggttcaacagttaaatctcatacaaaagggatttggatgtggtgtgtaccgcaccctaagaagcccgaacatacactggtgctcctggacacggagggactgggagatgtgaagaagggtgacaaccagaacgattcatggatttttactcttgccgtgctgcttagttccacgctcgtatataacagcatgggtaccattaaccagcaagccatggatcagctctattatgtaacagaactgacccaccgaatacggtccaagagctctccagacgagaatgaaaacgaagatagtgcagactttgtgagcttctttcctgattttgtctggactctgagagatttttctctggacctggaagctgacggccagcccctgacacctgacgagtatctggaatatagcctaaagttgacacagggcacaagccaaaaggataaaaacttcaatcttcccaggctgtgcatcagaaagttttttcccaagaaaaagtgcttcgtgtttgacctgcctatccacagaaggaaactagcccaacttgagaagttgcaggatgaggaactcgaccccgaattcgtgcagcaagtagctgacttttgttcttacatcttctctaactccaagactaagacactctctggtggaatcaaggtcaatgggcctcgccttgagtcgctcgttctgacctacattaatgcgatttctcgcggagatctgccatgcatggagaacgccgtgctcgcattagcgcaaatcgagaactctgctgctgtgcagaaagctatcgcacattacgaccagcagatggggcagaaggttcagcttcctgccgagacattacaggagctgctggacctgcaccgggtcagcgaacgcgaggctacagaagtctacatgaaaaactcctttaaagacgtggaccacttgtttcaaaagaagctcgctgctcagttggataaaaagcgtgacgacttttgcaaacagaatcaagaggcctcttccgatcgatgtagtgcgcttctccaggtcatatttagtccgttagaagaagaggtgaaagcagggatctacagtaagcccggagggtattgcctgtttatacaaaagttgcaagattag

SEQ ID NO: 119366 - DNA, 1788 bp, synthetic construct
  misc_feature 1..1788: note = Description of Artificial Sequence: Synthetic coding sequence
  source 1..1788: mol_type = other DNA
atggctcccgagatccacatgaccgggcctatgtgcctgattgaaaatactaacggcgaactggtggccaatccagaggctctgaagatactgagcgccatcacccaacctgtggttgtggttgcgattgtgggtctataccgcactggcaagagttatctcatgaacaaactggccggtaaaaataaagggttctccctgggatctaccgtgaagtcccacacaaaaggcatttggatgtggtgcgtgccacatcctaagaagcctgaacacaccctcgtgctgcttgatacggagggactgggtgacgtcaaaaagggagataatcaaaatgactcctggatatttaccctggcagtgcttttaagttctaccctcgtctataattctatgggcacgataaaccaacaggctatggatcagctgtattacgtgaccgagttgacccataggatccggtccaagtcttctcctgacgagaacgagaatgaagacagcgcagattttgtctcattctttccagatttcgtgtggacactgagggacttttccttagacttagaagcagacggccagccacttactccagacgaatatcttgaatactccctcaagttgacgcaggggacgagccagaaggacaaaaactttaatctcccgaggctttgtatcaggaaattctttcctaagaagaagtgtttcgtgttcgatctgccaattcacagacgaaaactggcccaactggagaaactgcaggatgaggagcttgatcccgagttcgtccagcaagtagcggatttttgcagttacatcttttctaactcaaagacaaaaactctgtccggtgggattaaggttaatggaccacgcctcgagtccctggtgctcacatacatcaacgcaatctcgcgtggcgatctcccttgtatggagaacgcagtgctggcactggctcagatcgagaattctgctgccgtacagaaagccatagcacattatgatcagcaaatggggcaaaaggtccaactgccagccgagactcttcaggaactcctggatctgcaccgggtttcagaacgcgaggccaccgaggtttatatgaagaactccttcaaagacgtagaccatttatttcagaagaaattagccgctcagttagacaaaaagcgggacgatttctgcaagcagaatcaagaggcgagctctgatcgctgtagcgccttactgcaggtgattttctcacccctcgaggaagaagtcaaagcgggcatttactctaagccagggggatactgtcttttcattcagaagctgcaagacctcgagaaaaaatattacgaagagccacgcaaggggatccaggctgaggagatactccagacttacttgaagagtaaggaaagcgtgaccgatgccatcctgcaaactgatcagatcctgaccgagaaggaaaaggagatcgaagttgagtgcgttaaagccgagagtgctcaggcatccgccaagatggttgaggagatgcagattaagtaccagcaaatgatggaagagaaagagaaatcgtaccaggaacacgtcaagcaattgacagaaaaaatggagcgggaacgtgcacaacttctggaggaacaggaaaagaccttgacatctaaactccaggagcaggccagagtcttgaaagagagatgtcagggggagtccactcagctgcagaacgaaattcagaaactgcaaaagactttgaagaagaagaccaaacggtatatgtctcacaaactgaagatttag

SEQ ID NO: 119367 - DNA, 1692 bp, synthetic construct
  misc_feature 1..1692: note = Description of Artificial Sequence: Synthetic coding sequence
  source 1..1692: mol_type = other DNA
atggcgcccgagattcacatgaccggccccatgtgtctcattgagaataccaatggcgagctcgtcgcaaacccggaagcattgaagattttgtccgctattacccagcctgtggttgtagtggccatcgtgggtttgtaccgcaccggcaaaagttaccttatgaacaagctagcaggaaaaaacaagggattttctctgggatctaccgtcaaaagtcataccaaagggatctggatgtggtgcgttcctcatcccaaaaagccggagcatacactcgtgctgctcgacacagaaggcttgggcgatgtcaaaaagggcgacaatcagaacgattcctggatattcacactcgccgtgctgctctcatcgactctggtgtacaatagtatggggactatcaaccagcaggcgatggatcagctgtactatgtgactgagcttacacatagaatcagatcgaagagctccccagatgagaacgagaatgaagattctgccgatttcgtgtccttcttccccgactttgtctggactttaagggatttttctcttgatcttgaggccgatgggcagcctctgacccccgacgagtacctggaatactcactaaagctgacacagggcaaccgcaagttggcacagctcgagaagcttcaggacgaagagctggaccccgagttcgttcaacaggtcgctgatttttgcagttacatcttttcaaattcaaagactaaaaccttatcgggcggcatcaaagtgaacggcccacgtcttgagagccttgttctcacatatataaatgctatttctcgcggagacttaccttgcatggagaatgccgtattagcactcgcccagatagaaaattccgccgcagtacaaaaagctatcgctcactacgatcaacagatgggccagaaggtacagcttcccgcggagactcttcaggaacttctggaccttcatagagtgagtgaacgggaagccacagaggtgtacatgaagaactccttcaaggacgtggaccatctctttcagaaaaagctggccgcacaacttgataagaagagagatgacttctgtaaacagaatcaggaagcctctagtgacagatgtagcgctctcctccaggtgatcttcagtcccctggaagaggaggtgaaagccgggatttacagtaagcccggcggctactgccttttcatccagaaacttcaggacctggaaaagaaatattacgaggagcccagaaaaggcatccaggcggaggagatccttcagacctatctgaaatccaaggagtcagttacagacgccatcctgcagactgaccagattctgacggaaaaggagaaggagatagaggtggagtgcgtgaaggccgaaagcgcacaagcttctgctaaaatggtcgaagagatgcagattaagtaccaacagatgatggaggaaaaagagaagtcctaccaggagcatgttaagcaactgactgaaaagatggagcgggagagggctcagctactggaggaacaagagaagaccctcactagtaaattacaggagcaagcgagagtcctgaaagagagatgccaaggcgaaagcacgcagctgcagaatgagatacaaaagctccagaagaccctgaagaagaaaaccaagaggtatatgtctcacaaactcaagatctag

SEQ ID NO: 119368 - DNA, 414 bp, synthetic construct
  misc_feature 1..414: note = Description of Artificial Sequence: Synthetic coding sequence
  source 1..414: mol_type = other DNA
caggacgaagaactggatcccgagtttgtgcaacaagtcgctgacttttgttcttacatcttttccaactctaagacaaagaccttatccggtgggatcaaggcagaggaaatcctacagacatacctgaagtctaaggagtcagtgaccgatgcaatcttacagacggatcagattttgaccgaaaaggaaaaggaaatcgaggtggagtgcgttaaagccgaaagcgcccaggcctccgccaagatggtggaggagatgcagatcaaataccaacagatgatggaggaaaaagagaagagttatcaggagcatgtaaagcagcttaccgagaaaatggaacgcgagagagcccagctgctggaggaacaagaaaaaaccctgacatccaaattgcaagtgtctaagtgctag

SEQ ID NO: 119369 - DNA, 1923 bp, synthetic construct
  misc_feature 1..1923: note = Description of Artificial Sequence: Synthetic coding sequence
  source 1..1923: mol_type = other DNA
atgggcgagcgcactctccacgcagctgtgcctacaccagggtaccccgagtccgagtcgatcatgatggcccctatctgtcttgtggagaatcaagaagaacagctcactgtgaatagtaaggctttggaaatcttggataaaatttcacagccagtagtagtggtggccatagttggcctgtatagaaccggtaaatcctatttaatgaaccgtttagcagggaagagaaatggttttcctctggggtcaacagtgcaatccgaaaccaaagggatatggatgtggtgtgtgccccacctgagcaaacctaaccatacccttgtgctgctggacactgagggtctaggtgatgtggaaaagtccaacccaaagaacgattcctggatattcgccttggctgtcctgttatcttcctccttcgtgtataattccgtcagcacgattaatcatcaggccctcgaacagctccattacgtaaccgaattggccgaattgatcagagccaagtcttgtccacgccccgacgaagctgaagactctagcgaattcgcctcattcttccctgactttatctggactgtgcgagattttactctggagctcaagcttgatggcaacccaataacagaagatgaatatctcgagaatgccctgaagctaatcccaggtaagaacccaaagattcaaaacagcaatatgcccagagaatgcataagacacttcttcaggaaacggaaatgcttcgtgtttgatcgacccactaatgacaagcaatatctcaatcacatggacgaggtgcccgaggagaatctggagaggcatttccttatgcaaagtgataatttctgttcatatatcttcactcacgccaaaacaaagacactgcgagaagggattatagtaactggtaagcggctagggacgctggtcgttacttacgtggacgccattaattccggcgctgtcccctgccttgagaatgcagttaccgccctagcccagttagagaatccagcagccgtccagcgcgctgccgatcactactcccagcagatggcgcagcagctgcggctgcccacagacacactccaggagctgctggacgtccacgcagcatgcgagagagaagcaatagcagtgttcatggaacactcctttaaggatgaaaatcatgagtttcaaaagaaactggttgacactatagaaaaaaaaaagggagatttcgtgctccaaaacgaggaagcctctgcgaagtattgccaggccgaactcaaaaggttatcagaacatctgactgagagcatccttcgcggtatctttagtgtgcccggcggccacaatctgtacctggaggaaaaaaaacaggtggagtgggactataagcttgtcccccggaaaggtgtcaaggccaatgaagtcctgcaaaacttcctgcagagtcaagtcgtagtggaggagtccatccttcagtccgacaaagctttaaccgccggagagaaggctatagctgccgagcgggccatgaaggaggcggctgagaaggaacaagagctgctgagagaaaaacaaaaggagcaacagcagatgatggaggcccaggagcgtagtttccaggagtacatggctcagatggagaaaaaactggaggaggagcgggaaaacctgctccgtgagcatgaaagactgctgaagcacaaacttaaagtccaagaggaaatgcttaaggaggaattccagaagaagtctgaacagctgaacaaggaaatcaatcagctgaaggagaaaattgaatcaacaaaaaacgagcagctgcgcctgctgaaaattctggatatggccagtaacataatgatcgtgacacttcccggggctagtaaactgctgggtgtgggcaccaagtacctgggctcacgtatttag

SEQ ID NO: 119370 - DNA, 1761 bp, synthetic construct
  misc_feature 1..1761: note = Description of Artificial Sequence: Synthetic coding sequence
  source 1..1761: mol_type = other DNA
atggccctggagatacatatgtctgacccaatgtgcctgatagaaaattttaacgaacagctaaaggtcaaccaggaggctctagaaattctgagcgccattacacagcccgtggtggtggtagctatcgtggggctttatcgcaccgggaagtcatatctgatgaacaagttggccgggaagaacaaaggcttttctgtggccagtacggtgcaaagccacactaaggggatttggatatggtgcgtcccccaccctaattggcctaatcacactctggtcttacttgacacagagggcctcggcgacgtggagaaggcagacaacaagaatgatattcagatttttgcacttgccttgttactaagttccacatttgtgtacaacacagtgaacaagatcgatcagggagcaatcgaccttctgcataacgtcactgagctcacagatctgttgaaggctcggaattcgccagacctcgacagggttgaggatccagccgactccgcttcattcttccccgacttagtctggacactacgcgacttttgtctgggcctcgaaatagacggtcagctcgttacgcccgacgaataccttgaaaactctttgagacccaagcagggatccgaccagagagtgcagaattttaatctgccgaggctgtgtatccaaaaattcttcccaaaaaagaagtgttttattttcgatctcccagcacaccagaagaaattggcacagctggagacactgcctgacgatgagttggagcctgagttcgtgcagcaggtgacagagttttgctcctatattttctcgcactctatgacgaaaaccctgcctgggggtatcatggttaacggcagccgcctgaaaaatctggtgctcacatacgtaaacgccatcagttcaggagatctgccatgcattgagaacgccgtgctagcactggcgcagcgagagaactccgccgccgttcagaaagcaattgcacactatgatcagcaaatgggacagaaagtgcagctcccaatggaaacattgcaagaactgctggacctgcataggaccagcgaacgcgaggctatagaggtttttatgaaaaatagtttcaaggacgtcgaccagtcctttcagaaggaactcgagacattgctagatgccaagcagaatgacatttgcaagcgaaaccttgaagccagttccgattattgttctgcactcctgaaagatattttcgggcctttggaggaggcggtgaagcagggaatttattccaaacccggcggccacaacctgtttattcagaagacagaggagctcaaggccaaatactatcgggaaccgcggaaaggcatccaggcagaagaagtccttcagaaatacctgaaaagcaaagaaagcgtaagccacgccattctgcaaaccgaccaggccctgactgagaccgaaaaaaagaagaaggaggcccaagtgaaggctgaagccgagaaggctgaggcccagaggctcgccgcgatacagcgacaaaatgaacaaatgatgcaggaaagggagcggctgcatcaagaacaggtcaggcagatggagattgccaaacagaattggctcgctgagcagcagaagatgcaagaacaacaaatgcaggagcaggccgctcaattaagcactacatttcaggcccagaataggagtctgctaagtgaactgcagcatgctcagcgcacggtgaataatgacgacccatgtgtgcttctctag

SEQ ID NO: 119371 - DNA, 1761 bp, synthetic construct
  misc_feature 1..1761: note = Description of Artificial Sequence: Synthetic coding sequence
  source 1..1761: mol_type = other DNA
atggcattggagatccacatgtcagacccgatgtgcttgatcgagaacttcaacgaacagttaaaggtgaatcaggaggcattggagatcctctctgctattacacagcccgtggtggtggtggcaattgttggcctgtacaggactggaaagagctacctgatgaacaaactggccgggaagaacaaagggttcagtgtagcttctaccgtgcaatcgcacactaaggggatttggatctggtgcgttccgcatccgaattggccaaaccacacactcgtgctgctggatacggagggcctgggcgacgtcgagaaggctgacaacaagaacgacattcagatcttcgcgctcgccctcttgctgtcctctaccttcgtctataatacagtaaacaagattgaccaaggcgccatagatctgctgcataacgttaccgagctcactgatctcttgaaggctcgcaattctcctgatttggatcgagtggaggacccagcggatagcgcatcgttttttccagatctggtttggacactgagagatttctgcctggggttagaaattgatggacagctggtaacccctgacgaatatctggagaattccctccggccaaaacaaggctccgaccagcgggtacagaattttaatcttccacgcctgtgtattcagaaatttttcccaaagaaaaagtgttttattttcgacctaccggcccaccagaaaaagctggcccagcttgagactctgcccgacgacgagctcgagccagaattcgtgcagcaggtcaccgaattctgttcctatatcttttctcattcgatgaccaaaacgttgcctgggggcatcatggtgaatggtagtagactgaagaacttggtgcttacttatgtgaacgccatctcgtcaggcgacctgccttgcatcgagaatgcggtgttagctctagcccagagagagaattcggctgctgtccagaaggcaatcgcacactatgatcagcaaatgggccagaaggtgcagctccctatggagaccctgcaggaactgctcgacctgcatagaacttctgagcgagaggccattgaagtctttatgaagaactcttttaaggacgtggatcaatctttccagaaggagctggagaccctgctggacgccaagcagaatgatatctgtaagcggaacctggaggcctcctcagattactgtagtgcgctgcttaaggatatcttcgggcctctcgaggaagcagtgaagcaaggcatctacagtaagcccggcggccacaatctctttatccagaaaacagaggagctcaaagctaagtattacagagaacctcgcaaagggatccaggctgaagaagtgttacaaaagtatctcaagagcaaagaatcagtttcacacgccatcctgcagactgatcaggccttgactgagaccgaaaaaaagaagaaggaagctcaggtcaaagccgaggccgaaaaagcagaagctcagcggcttgctgccatccagcggcagaatgagcagatgatgcaggagcgggagcgtctccaccaggagcaggtgcggcagatggagattgccaagcagaattggctcgcggagcaacagaagatgcaagagcaacagatgcaggagcaagcggcccagctcagtaccaccttccaggctcaaaatcgaagtttactgtcggaattgcagcatgcccaacgcaccgttaataatgacgatccttgtgtactcctgtag

SEQ ID NO: 119372 - DNA, 1452 bp, synthetic construct
  misc_feature 1..1452: note = Description of Artificial Sequence: Synthetic coding sequence
  source 1..1452: mol_type = other DNA
atggcgttagaaatacacatgagcgatccaatgtgcctaatcgagaactttaacgaacagctaaaagtaaaccaggaggccctagagatcctctccgcaattacacagcctgtcgtggtcgtggcaattgtggggctgtacaggacgggtaagtcatacctgatgaataagttagccgggaaaaacaaaggtttcagcgtcgccagcactgtgcagtcccatacaaagggaatatggatatggtgtgtacctcaccctaactggcccaaccacacccttgtattgctggacacggaaggtctaggcgatgtagaaaaagctgacaacaaaaatgatattcagatctttgctttggctttgctcctgagcagcacatttgtgtataacactgttaacaagatcgatcagggcgccattgacctcttgcacaatgtgaccgagctcaccgatctcctcaaagccagaaattcccctgacctcgaccgggtggaggacccagccgatagtgcatcgttttttcctgacttagtctggactctccgggatttctgcctcgggttggaaatagatggccagctcgttacaccagatgaatacttggaaaacagcctcagaccgaagcagggatccgatcagcgggtccagaatttcaatttgccacggctgtgcatccagaaatttttccccaaaaagaaatgtttcatcttcgatttgcctgcccaccaaaagaagctggcccaattagagactctgcccgacgacgagctggaaccagaattcgttcaacaggtaacagaattctgctcgtacatttttagccacagcatgaccaaaaccctgccagggggaattatggtgaacggttcacggctcaagaacctggtcctgacatatgtgaacgccatcagtagcggcgatctgccatgcattgaaaatgctgtgttggcgctagcgcagcgagagaactcagcagcagtgcagaaggctatcgcccactatgatcaacaaatggggcaaaaggtgcagctcccgatggagacactgcaagaattactcgacctgcaccgcacaagcgagcgggaagccatagaagtctttatgaaaaacagcttcaaggacgtagaccagtcctttcaaaaagaactggagacgctgctcgacgccaaacagaatgatatctgcaagcggaatttagaagcttctagcgattactgctcagccctgctgaaggatatctttgggcctctggaggaggccgtaaagcaaggtatttattcaaagccaggcggccacaacctcttcatccagaagacagaggaactgaaggcaaagtattacagggaaccccggaagggcatccaggcagaggaagtgcttcagaaatatctgaagagcaaggagagtgtctcccatgccatactgcagaccgatcaggccctgacagagacttag

SEQ ID NO: 119373 - DNA, 1917 bp, synthetic construct
  misc_feature 1..1917: note = Description of Artificial Sequence: Synthetic coding sequence
  source 1..1917: mol_type = other DNA
atggcctctgaaattcatatgccagggcccgtgtgcctgacagagaatactaaagggcacctagtagtgaacagcgaggccttggagattcttagtgcgataacccagcctgtggtcgtcgtggctattgttggactgtatcgcacaggaaaaagttacctgatgaataaattggccggaaaaaacaagggttttcccctggggtgtacagtgaagtccgagacaaaaggtatctggatgtggtgcgtgccccacccctccaaacctaaccacacattgatccttctagacacagagggcctgggcgacatggagaagagcgaccctaaaagcgatagctggatctttgcgctcgccgtactgctcagcagttctttcgtgtacaattctatgggaacgattaatcatcaggccctggaacagctccactacgtgacagagctcactgaactaattcgcgcgaaaagttgtccccgacccgatgaagtagaagactcctctgaattcgtaagctttttccctgactttatttggaccgtgagagattttacccttgaactgaaactcgatggccaccccattaccgaggacgagtatctggaaaatgctcttaagttgatcagcggtaagaatccacagatccagaacagcaataagcctcgagaatggattcgccacttcttccctaagcagaagtgctttgtattcgacaggcctattaacgataagaagctactgcttcatgtcgaggaggtgagagaagatcagttagattccaatttccagatgcagagcgagaatttttgttcatatatcttcacacacgctaagactaagacactgagagagggcattcttgtgactggcaatagactgggcatgttggtggagacctatcttgacgcaatcaatagcggcgcaactccatgcctcgaaaacgccatggcagttctggctcagtgtgagaatagcgcggccgtgcagcgtgctgctaaccactactcacagcagatggcacagcaggtgagattccccactgatacactacaggagcttctagatgttcacgcggtctgcgagcgggaggctatagccgtgttcatggagtattctttcaaagacaagtctcaggagttccaaaagaaacttgtcgatacgatggagaaaaagaaagaagattttgttctacaaaacgaggaagccagcgctaaatactgccaagccgagttaaagcgcctctctgagctgctcacggagagcattagcagaggcaccttctttgttcccggcggacacaatatatatttggaggccaaaaagaaaatcgaacaggactacacactggttccacgaaaaggagttaaagccgatgaggtgctccaaagcttcctccagtctcaggtggttatcgaagagtccatcctgcagtccgataaggcattgactgcaggcgaaaaggcaattgctgcaaagcaggcgaaaaaagaggccgccgagaaggaacaggaactgctgaggcagaagcagaaagagcagcagcaaatgatggaggcccaggagagatcattccaggagaacattgcccaactcaagaaaaaaatggagcgggagagagagaattatatgagagagttacggaagatgttatctcataagatgaaagtgctggaggagctgctgacggaagggtttaaggaaatctttgagtcgctgaatgaagaaatcaacaggctcaaagagcaaatcgaagcggccgaaaacgaggagcccagtgttttctctcaaattctcgatgtggccgggtcgatcttcatcgcagcgctccctggcgcagcgaaacttgttgatctcggcatgaagattctgtcctccctgtgtaatcgtttaagaaacccaggcaagaagataattagctag

SEQ ID NO: 119374 - DNA, 1902 bp, synthetic construct
  misc_feature 1..1902: note = Description of Artificial Sequence: Synthetic coding sequence
  source 1..1902: mol_type = other DNA
atggaatctgggccaaagatgctagccccagtttgccttgtggagaataataacgagcagctgttagtgaaccagcaggccatccagattctagagaagatctcccagccggtggtggttgtggcaattgtgggactttacaggaccggaaaatcttacctgatgaatcacttggcaggtcagaatcatggcttccctctgggtagtaccgtgcaatccgagacgaagggcatctggatgtggtgcgtccctcaccccagcaagccaaatcataccctggtactactggacactgaagggctgggggacgtagagaagggggaccccaagaacgacagctggatttttgcccttgccgtactcttatgctccacctttgtctataacagtatgagtacaattaaccaccaagccctggagcagctgcattacgtcacggaattaacagagctaatcaaagccaagtccagtccgcgacccgatggcgtagaagatagtactgaatttgtgtcattcttccctgacttcctgtggacagtgcgcgacttcacactagaactcaaactgaatgggcatcctattacagaagacgagtatcttgaaaacgccctgaagttgatccaaggaaacaaccctagggtgcaaacgagtaattttccacgcgaatgcattaggaggttttttcctaagcgaaaatgttttgttttcgaccggcccaccaacgacaaggacctgttagcaaatattgaaaaagtgagcgagaaacagctggacccgaagttccaggagcaaactaatatattctgttcctacatttttacgcacgctcggacaaagacactccgggaagggatcaccgtcaccggaaatagattgggtacgctggccgtgacatatgtggaggccatcaacagcggggctgtcccatgtctcgagaacgctgtaataaccctggcccagagagagaacagtgcagccgtccagcgcgctgccgactactactcccagcaaatggcccagcgcgttaagttgccaaccgatactcttcaagagcttctcgatatgcacgccgcgtgtgagcgggaagctatagccatcttcatggagcactcctttaaggatgagaaccaggaatttcagaagaagtttatggagacgacaatgaacaagaagggcgacttccttctgcagaacgaagagtcatctgtgcagtactgccaggccaagctcaacgaacttagtaaaggccttatggagtctatatcagctggcagtttcagtgttcctgggggtcacaaactgtacatggagaccaaggaaagaatagagcaggactactggcaagtaccgcgaaaaggagtaaaggctaaggaggtgtttcagcggttccttgagtcccagatggttatcgaggagagcatcttgcagagtgacaaggccctcacagatcgagagaaagctgtagccgtggatcgcgcaaagaaagaggcagccgaaaaagagcaggaattgctaaagcagaaactccaagaacagcagcagcaaatggaggcccaagacaagtctagaaaggagaacatagctcaactgaaagaaaaactacaaatggagagggaacacttgctgcgagagcagataatgatgcttgaacacactcagaaagttcaaaacgactggctgcacgaaggctttaagaaaaagtatgaggaaatgaacgccgagatttcgcagtttaagaggatgatcgacactaccaagaatgacgatactccttggattgcacggactctggacaatctcgccgatgaattgacagctatcctgtctgctcctgctaagctcatagggcacggcgtgaagggagtgtccagcctgttcaagaagcacaaattgcctttctag

SEQ ID NO: 119375 - DNA, 1512 bp, synthetic construct
  misc_feature 1..1512: note = Description of Artificial Sequence: Synthetic coding sequence
  source 1..1512: mol_type = other DNA
atgtccaccataaatcaccaggccctcgagcagttgcactacgtgacagaactaactgagctgatcaaggccaagtcttcaccaaggcccgacggggttgaggactcaacagaattcgttagcttttttccggactttttatggaccgtgcgtgatttcactctagaactgaaacttaacgggcatcctatcacagaagacgaatatcttgaaaacgcccttaagctgatacagggcaataatccacgcgtgcagacctcaaatttcccccgcgaatgcattcgccgattttttccaaaacggaaatgctttgtattcgaccgccccacgaacgacaaagacctactggcaaatatagagaaggtgtcagagaagcagttagaccccaagtttcaagagcagacaaacatcttttgcagttatatcttcactcacgcccgtaccaagacactgagggaagggattacagtgacgggcaaccggctgggtaccctggccgtgacgtatgtcgaggccatcaactccggtgccgtaccttgtctggagaacgccgtcatcacgctggcgcagcgggaaaatagcgcggctgtgcaaagagccgcagattactacagccagcaaatggcacagagggtgaagttgcctactgataccctgcaggaactcctggatatgcatgctgcatgcgagcgggaggctatagctatttttatggaacactcatttaaggacgagaaccaggagtttcagaaaaaattcatggagaccaccatgaacaagaagggagattttctgcttcagaatgaagaatcttccgttcagtactgtcaagcaaagctgaacgagctttcaaaagggttgatggagagcatttctgcaggcagctttagtgtgcccggcggccacaaactgtacatggagactaaggaacgcattgagcaggactattggcaggttccgaggaagggagtaaaagctaaagaggtattccagaggtttctagagagccagatggttatcgaggaaagtattctgcagagcgacaaggctctgactgatagagagaaggccgttgccgtcgatagagctaagaaagaagctgctgagaaagaacaggaactccttaagcaaaaacttcaggaacagcagcagcagatggaagcccaggataagagccgaaaggagaacatcgctcaactgaaggaaaaactgcaaatggaaagggaacatctgctgcgcgagcagattatgatgttagagcacacacaaaaagtgcagaacgactggctacacgagggctttaagaaaaagtacgaagaaatgaatgccgaaatctcccaattcaagaggatgatagacacaacaaaaaatgatgataccccatggattgcccgtaccctggacaacctggcagatgagctgactgcgattctctcagcacccgctaaactaatcggccacggagtgaagggcgtgagcagcctcttcaaaaaacataaattgccattctag

SEQ ID NO: 119376 - DNA, 1815 bp, synthetic construct
  misc_feature 1..1815: note = Description of Artificial Sequence: Synthetic coding sequence
  source 1..1815: mol_type = other DNA
atggagtctggccctaaaatgctagcaccagtgtgtctggttgagaacaacaatgagcagttactcgtcaaccagcaagccattcaaattctggagaagatatctcagcctgtggtggttgtggcgatcgtggggctctacaggacgggcaaaagctacctcatgaatcatttggctgggcagaaccatggctttccactggatacagagggactgggagacgtcgagaagggggacccaaaaaatgactcgtggatatttgctcttgctgtactactgtgttcaaccttcgtctataatagtatgagcacaattaaccaccaggccctggaacagttacattatgtgaccgaactgacagagcttattaaggcaaaaagtagcccccgcccggatggagtggaagattctactgagttcgtctctttcttcccagactttctctggactgtgcgcgacttcacacttgagctgaaactcaatggacacccgattaccgaggacgagtacctggagaacgctctgaagctgattcaaggtaacaatccaagagtgcagacctcaaactttcctcgggaatgtatacgtcgctttttcccaaagaggaagtgctttgtcttcgatcgaccaactaacgacaaagatcttttggccaacatcgaaaaagttagcgagaaacagttggatccaaagtttcaggagcagacgaacatcttttgctcatatattttcacacatgctaggacaaagaccctgcgggaaggcatcacagtgactgggaatcgcctgggtactcttgctgtgacatatgtggaggcaattaacagcggggctgtaccctgcttggagaatgctgtcattaccctggctcagcgggagaactctgcagccgtgcagcgggcggcagattattactcacagcaaatggcacagcgggtgaaactccccacagatacgctacaggaactgctcgacatgcacgccgcgtgtgagcgcgaggctatcgccatcttcatggaacactcttttaaagatgaaaaccaggaattccaaaaaaagttcatggaaacaactatgaataagaagggggattttctgttgcaaaacgaggagtccagcgtgcaatactgccaggctaaattaaatgaattgtctaagggactaatggaatccatatctgcaggatccttttctgtgcctggcggacataagctgtatatggaaactaaggaaagaatcgagcaggactactggcaggtcccacggaaaggcgtcaaagctaaagaggtgttccagcgtttcctggagagccagatggttatcgaggaaagcatattacagtcagacaaagcgttgactgaccgtgaaaaggcagtggcggtagatcgggcgaaaaaggaagcagcagagaaggagcaggaactactaaagcaaaagctgcaggagcagcagcagcaaatggaagcgcaggacaaaagtcgcaaggagaacattgctcagctcaaggaaaaactgcagatggagcgtgaacacctccttagagagcagattatgatgctggagcacacacaaaaagttcagaacgactggttacacgaggggtttaaaaaaaaatatgaggagatgaacgccgaaattagtcagtttaagcggatgatcgataccaccaaaaacgatgataccccatggattgcaaggacccttgataacctggctgacgagctcaccgccattctgagcgcgcccgcgaaactcataggacatggcgttaagggcgtgtccagcctgtttaagaagcataagttacctttctag

SEQ ID NO: 119377 - DNA, 1299 bp, synthetic construct
  misc_feature 1..1299: note = Description of Artificial Sequence: Synthetic coding sequence
  source 1..1299: mol_type = other DNA
atgaagagcaccaagccaagcctgtccccgagcaagccccaaagctccctcgtgattccgacctcacttttctgcaagacttttccattccatttcatgtttgataaggacatgacaattttacaatttgggaacggaatcagacgattgatgaaccgacgggacttccaggggaagcctaattttgaggagtactttgagattctgacacccaagatcaatcagactttcagtggaatcatgacaatgctgaatatgcagttcgttgtacgagtgcggaggtgggataacagcgtgaagaagtcctctcgggtcatggacctgaaaggacagatgatttacattgtggagtcgagtgctatcctttttctcgggtccccctgcgtcgaccggctagaggacttcaccggccgaggcctctacctctcggatatacctatacacaacgctctgcgcgatgtggttctcatcggcgaacaggcccgagcccaggatggtctcaagaagaggcttggcaagcttaaggccacattggagcaggcccaccaggccctggaagaggagaaaaaaaagactgtcgacttactgtgttcaatattcccctgcgaagtggctcagcagttgtggcagggacaggtggtccaggccaagaaatttagcaacgttaccatgctcttctcagacattgtcgggtttacagcgatctgttcgcaatgttccccccttcaggttattacaatgctaaatgccttatacacacggttcgaccagcagtgtggggaacttgatgtgtataaagttgaaaccattggcgatgcgtactgcgtcgctgggggattgcataaagagtccgacacacacgctgtgcagatcgctctcatggctctgaaaatgatggaactgtcagacgaggtgatgtctccgcacggtgaacccatcaaaatgcgaattgggctgcactccggctcagtgttcgcgggcgtggtgggggtgaagatgccacggtactgtctgtttggcaataacgtgactttagcaaataaattcgagtcctgttctgttccaaggaagattaacgtcagccccaccacatatcgcctactgaaggactgccccgggttcgtgttcaccccgcgctccagagaagagctccctcccaatttcccttccgagatccctggtatctgccacttccttgacgcctaccagcaggggactaactcaaaaccttgctttcagaagaaagacgtcgaggacggaaatgccaactttctggggaaagctagtgggatagactag

SEQ ID NO: 119378 - DNA, 1875 bp, synthetic construct
  misc_feature 1..1875: note = Description of Artificial Sequence: Synthetic coding sequence
  source 1..1875: mol_type = other DNA
atgttttgcactaaacttaaagatttgaagatcaccggcgagtgcccattttccctcctggctccaggacaggtccctaatgagagctctgaggaagctgcaggtagctccgaaagctgcaaggcaacagttcctatttgccaggatatccccgaaaagaatatccaggagagtctcccgcaaagaaaaactagcagaagcagagtgtacttgcatacactcgcggagtcaatatgcaaattaattttccccgaatttgaacgacttaacgtagccttgcagcgcacactcgcgaagcataagattaaggagagccgaaagagcctggaaagggaggattttgaaaagacaatcgccgaacaagccgtagccgccggggtgcctgttgaagttattaaggagagcctgggggaagaggtcttcaagatctgttacgaggaggatgaaaatatattgggtgtggtgggtggtacactgaaagacttcctgaattccttttctactctactcaagcagtcatctcactgccaggaagccggaaaacgcgggaggctagaagacgcgagcatcctttgcctggataaggaggacgatttcctccatgtgtattatttctttccaaaaagaacaactagtcttatccttcccgggattatcaaagctgccgcacatgtgctgtacgagaccgaagtggaggttagtttgatgccgccatgttttcataatgactgcagcgaattcgtcaaccagccttacctcctgtacagcgtacatatgaagtcaaccaagccatccctaagcccatcaaaaccccagtcatccctcgtgatccccaccagcctgttttgtaaaaccttcccatttcactttatgtttgacaaggacatgacaatcctccagttcggcaatgggattcgtaggttaatgaaccgtcgagactttcagggcaaaccaaatttcgaggaatactttgaaatcctgacccccaaaataaaccagacatttagcgggattatgacgatgttgaacatgcagtttgttgttcgagttcggcggtgggataactctgttaaaaagagctctcgcgtaatggacctgaaaggccagatgatatatattgtcgagtcaagtgccattctgttccttggaagtccttgcgtagatcgtttagaagatttcacgggaagggggctctacttgtctgatattcctattcataacgcattaagggatgtggtcctgattggtgagcaggcgcgagcccaggatggactgaagaagagattgggtaagctcaaggccaccctggaacaagcgcaccaagcactggaggaggagaaaaaaaaaacagtcgacctattgtgctcaattttcccatgtgaagtggctcagcagctttggcagggtcaggttgtgcaggcaaagaagttttccaacgttactatgctgttctcagatatcgtggggttcacggcaatctgctcgcagtgtagccctttacaggtgatcacaatgctgaacgccctgtacacacggttcgatcaacagtgtggtgagctagacgtgtataaagtcgagactatcggagatgcttattgcgttgctggagggttacacaaggagagcgacacccatgcagtgcagatcgcgcttatggcacttaaaatgatggagctgtccgacgaggtaatgagtcctcacggtgagccaatcaagatgagaatcgggctgcacagcgggagtgtgttcgccggagttgtgggggtcaagatgccccggtattgcctgttcgggaataacgtgaccctagccaataaattcgagtcctgtagcgtgcccagaaagatcaacgtgtccccaacgacatatcggtag

SEQ ID NO: 119379 - DNA, 2292 bp, synthetic construct
  misc_feature 1..2292: note = Description of Artificial Sequence: Synthetic coding sequence
  source 1..2292: mol_type = other DNA
atgagtcgtagaaaaatttcgagcgaaagttttagcagcctgggatcagattatctcgagacctcccccgaggaggaaggcgagtgccccctctctcgcctgtgttggaatgggagccggtccccccctggccccctggaaccctcacccgccgctgctgccgctgccgctgcaccagcccccacacccgcagcctctgcagcagctgccgccgccaccgccggcgctcgccgcgttcagaggcggaggcgggtgaatctcgactctctgggtgaaagcataagccgtttgacagcaccctcccctcagaccattcagcagacactgaagcgcaccctgcagtattatgagcaccaagtgattggatatcgcgacgccgaaaagaactttcacaacatttcaaaccggtgtagttacgccgatcactccaacaaggaagaaatcgaggacgtctctggtatcctgcaatgcactgctaatatcttaggattaaagtttgaggaaatacaaaagaggttcggcgaagagtttttcaacatctgttttcacgagaatgagcgagtcctccgggcggtggggggaactctccaggatttcttcaatggctttgatgcccttctcgagcacataagaacatctttcggtaagcaggccactctcgagtcgccctcattcctctgcaaggagttgcctgaagggacattgatgctgcactacttccacccacaccacattgtgggcttcgctatgctgggaatgatcaaggccgcgggcaaaaaaatttaccggctggatgtcgaggtcgaacaggttgccaacgagaaactctgttccgacgtcagcaaccccggaaattgttcttgtctgaccttcctaatcaaggagtgtgagaacactaacatcatgaagaatctgccgcagggtacctctcaagttccggccgacctaaggattagcatcaacacattttgtcgggctttcccattccatctgatgttcgatccttcaatgagtgtgctacagctgggagagggcctccgtaagcagcttagatgtgacacacataaggttctaaagtttgaagattgcttcgagatcgtttctccaaaggtcaatgccaccttcgagcgagttctgctccgcctgtctaccccttttgtgattcgaaccaaaccagaagcttcgggatctgagaacaaagataaagtcatggaagtcaaagggcagatgattcacgttccggaaagcaactccattctgtttctcggctctccgtgcgtggataaactcgatgagctgatgggacgcggccttcacctcagtgatatccctattcatgacgcaacccgggatgtaatccttgtcggagagcaggccaaggcgcaagacggtcttaagaaacggatggacaaactgaaggccaccctggagcgcacccaccaggcactggaagaagagaagaagaagactgtggatttgctgtactctatcttcccaggggatgtggcccagcagctgtggcagggccagcaggtccaggccagaaagttcgacgatgtaacaatgctgttttctgacattgtaggatttactgcaatctgcgctcagtgtacaccaatgcaagtgatatccatgctgaacgagctctatactaggtttgatcaccaatgcggcttcctagacatttataaagttgagaccataggggacgcttactgcgtggccgctggactacatcgaaaaagcctctgtcatgcaaaaccgattgcattaatggcactgaagatgatggaactgtctgaggaagtccttacccccgatgggcgcccaatccagcctcagcggtccgaactgctattcagcttccccgtatccattcagctcgttcccgaccagcaccaatccgaaaccgacctgggtacagaaaagatgcgaataggcatccatagtggatccgtgctcgccggcgttgttggcgtgcgaatgcctagatattgtcttttcgggaataatgtgacgttggcctccaaatttgagtccgggagtcaccctaggcgaatcaacgtgagcccaaccacataccagctcttaaagagggaagagtctttcacattcatacccaggagtcgtgaagagcttccagacaactttcccaaggaaatcccgggaatctgctactttctagaagtgagaaccgggccgaaacctcccaagccatcattgagttcgagccggattaagaaggtttcctataacataggcacaatgtttctgagagagacttctctgtag

SEQ ID NO: 119380 - DNA, 2199 bp, synthetic construct
  misc_feature 1..2199: note = Description of Artificial Sequence: Synthetic coding sequence
  source 1..2199: mol_type = other DNA
atgtctagacgtaaaatatcaagcgagagcttctcctccctgggaagcgactatctggagacaagtcctgaagaggaaggggagtgtcctctctctcgcctgtgctggaacgggagcagaagccctcccgggccgctagagccttcacctgctgctgctgctgctgctgcggccccagctcctaccccagcagccagcgcagctgcagctgcagccacggccggggcccggagagtccagagaaggcgcagagtcaatctcgattccttgggcgagagcattagccgactcaccgccccctcacctcagacaatccagcaaaccctgaaacggaccctgcagtactatgagcaccaggtaattggataccgggatgctgagaagaacttccataatatctcaaatcgctgtagctacgccgatcactccaataaagaagaaatcgaggatgtctccggcatcctgcagtgtacggcaaatatcttgggcctgaagttcgaggagattcagaaacgctttggcgaagagttttttaacatctgcttccacgagaatgagcgcgtgctccgggcggtagggggcaccctgcaggacttcttcaacgggttcgacgccctattggaacatattaggacctcatttggaaagcaggccacgctggagtctccatcttttctttgtaaggagctaccagaagggaccctgatgctccattatttccacccccatcacatcgtgggtttcgctatgctgggcatgatcaaagcagccggcaagaaaatctaccgcctggacgtggaggtcgagcaagttgcaaatgagaagctgtgctcagatgtgtcaaatcctggtaattgttcctgcctgacttttctgattaaagaatgcgagaatactaacattatgaagaaccttccacagggcacctcccaagtgcccgccgacctccggatatctatcaacaccttctgccgcgcatttccgtttcatctgatgtttgatcctagtatgagcgttctgcaactaggagaaggcctgcggaagcagttgcgttgcgatacccacaaggtgttgaagttcgaagactgtttcgaaatcgtttctccaaaggtcaacgccacctttgagagagtcctgctcaggctctctacccctttcgtgatcaggactaagccagaagctagcggctctgaaaataaagacaaagtgatggaggtgaaagggcagatgatacacgtgcccgagtctaactctattctgtttcttggaagtccgtgtgtggataagcttgacgaattaatgggcagaggtttgcatctgagcgacatccctatccacgatgctactcgggatgtgattttggtgggagaacaggcgaaggcccaggacggtctcaagaaaaggatggataaactcaaggctaccttggagagaactcaccaggcactggaggaagaaaagaagaaaaccgtagatcttctgtatagtatctttccaggcgacgtagcccagcagctctggcaaggacagcaggttcaagcacgcaaattcgacgatgtaaccatgttattcagcgatatcgtgggtttcactgccatttgcgcccagtgcaccccgatgcaagtcatctccatgttgaacgaactttataccagatttgaccaccagtgtggcttcctagacatctataaggtcgaaacaattggcgatgcctattgtgtcgccgcgggcctgcaccgcaagagcctttgtcacgcgaagccaattgcgctgatggccctcaagatgatggagctgtcggaggaggtgttgacccctgacgggcggccgatacagatgagaatcggtattcatagcggttctgtactagcgggcgttgtcggagtgcggatgcctcgctactgtctgtttggcaacaatgtcacactcgcatcaaagtttgaatcaggatctcatccgcggagaattaacgtgtcgcctacgacataccagcttctgaagcgcgaagagtctttcacttttataccccggagcagagaagagctgcctgataacttccctaaagagattcctgggatttgctactttttggaggtgaggacgggaccgaaaccaccaaagcctagtttgagttcctctcgaatcaagaaggtttcctataatattggcacaatgttcctacgcgagacgtccctttag

SEQ ID NO: 119381 - DNA, 2073 bp, synthetic construct
  misc_feature 1..2073: note = Description of Artificial Sequence: Synthetic coding sequence
  source 1..2073: mol_type = other DNA
atgttttgcacgaaactcaaggacctgaaaataaccggcgagtgtcccttttctctgcttgcccccgggcaagttcctaacgagagcagtgaagaggccgccggctcctccgaatcctgcaaggcaaccgtccctatatgtcaggatatcccagagaagaacatccaggaaagtcttcctcagcgaaaaaccagcagatcaagagtatatctgcataccctggcagagagcatctgtaaactgatattccctgaatttgagcgacttaacgttgctttgcagagaaccctggcaaagcacaaaattaaggagagcagaaaatctctagaacgggaggattttgaaaagacaattgcagagcaggcggtggccgcaggggtgcccgtggaagtgattaaggaatcacttggcgaagaggttttcaaaatttgctacgaagaagatgaaaatattctgggtgtcgtgggagggacactcaaggactttctgaattccttttccaccctgctcaagcagtcatcgcattgccaggaagctgggaaaagaggtcggctagaggatgcctcaattctctgtttggataaggaagacgatttccttcatgtttattattttttccccaagcgaactacctccctgattctcccaggtatcattaaagctgcagcccatgtgctgtatgagacagaagtggaagtgtcgctcatgccgccatgttttcacaatgactgttccgaattcgtaaatcaaccctatctgctctattctgtccatatgaaaagcactaagccaagtctgtcaccgtccaaacctcagtcaagtctggtgattcctaccagcttgttctgcaagacttttccattccactttatgttcgacaaggacatgactattcttcagttcgggaacggcatcagaaggcttatgaaccgccgggactttcagggcaagcctaatttcgaagagtattttgaaattctcacacctaagatcaatcagaccttttctgggatcatgactatgctaaatatgcaatttgtggttcgtgtcagacgttgggacaatagcgttaaaaagagtagcagagtgatggatctcaagggccagatgatctatatagtggagtcatctgcaatcctgttcttgggttctccctgcgtggacaggctcgaggatttcacaggaagaggcctctacctgagcgatatccccatacataacgcactgcgagatgtggtgttgataggcgagcaggcccgggcccaggacggactcaagaaaagactggggaagctgaaggctactcttgagcaagctcatcaggctctggaggaagagaagaagaagacggtagacctgctgtgttcaatatttccctgcgaagtggcacaacagctctggcaaggccaggttgtccaggcaaagaagttcagcaatgtcacgatgttgttttccgatattgtagggttcacggccatctgctcacagtgtagccctctgcaggtcatcaccatgttaaatgctctctatacacgcttcgatcagcagtgcggtgaactcgatgtgtataaggtggaaacgatcggggacgcgtattgtgtggcaggagggttacacaaagagagcgatactcacgctgtgcaaatcgccttgatggcgctgaaaatgatggagctgtccgatgaagtgatgagcccacacggagagcctatcaagatgcggatcggattacatagtggcagcgtgttcgccggcgtggtcggcgttaaaatgccacgctattgtcttttcgggaacaacgtaaccttggccaataaattcgagagctgctccgtgcccaggaaaataaacgtctcacccacaacatatcgtttactgaaagattgccccggcttcgtgtttaccccacgctcccgagaggaactcccacctaacttccctagcgaaatacccgggatttgccattttctggacgcatatcagcaaggtacaaatagtaagccatgctttcagaagaaagacgtagaggacggaaacgccaattttttgggcaaggcatccggtatagattag

SEQ ID NO: 119382 - DNA, 2073 bp, synthetic construct
  misc_feature 1..2073: note = Description of Artificial Sequence: Synthetic coding sequence
  source 1..2073: mol_type = other DNA
atgttctgtacaaagttaaaggatctgaaaattaccggggagtgcccattctctttgctcgccccaggacaagttcccaatgagtcctctgaggaggctgccggatcctcagaatcatgtaaagccacggtacctatttgtcaagacatcccggagaaaaacatccaggagtccctgccccagagaaagacctcaagatctagggtttatctccataccctcgcagagagtatatgcaaactgatctttccggaatttgaacgcctgaacgtagctctccaaagaacactagcgaaacataaaataaaggaatcgagaaagtcactggagcgagaagacttcgaaaagacgatcgcagaacaagccgtagccgccggcgtgccagttgaagtgatcaaggaatcactgggggaggaggtctttaagatctgctatgaggaagatgaaaatatcctgggggtcgtgggcggtacattaaaagactttcttaactccttctccaccctgttgaaacagtcctcacactgtcaggaggccgggaagagaggcaggttggaagatgctagtatactttgtctggataaggaggatgatttcctgcacgtgtattatttcttcccaaagagaacgactagtctgatccttccaggcatcattaaagcggccgcgcatgtcctgtatgaaaccgaggtggaggtgtcactcatgcccccgtgctttcataacgactgcagcgaatttgtcaatcagccatacttactttattccgtccacatgaagagcacaaaacccagcctaagtccctccaagcctcaatcatctctggtgatccccaccagcctgttctgcaagacattcccatttcatttcatgttcgacaaggatatgacaattctccagtttggaaatggcattcgaaggctgatgaaccgccgagatttccagggcaagcctaatttcgaggagtatttcgaaatccttactccaaaaatcaaccagaccttctctggcattatgactatgctcaatatgcagttcgttgtccgcgttcgcagatgggataattccgtcaaaaagtcatcaagagtgatggatctcaaggggcaaatgatctacatcgtggagtctagtgccatcttgtttctggggagcccctgcgtggacagactcgaggattttacaggaagaggactttacttgagcgatattcccatccacaacgcactgagggatgtcgtgctgataggtgagcaggcgagggcccaagacgggctcaagaagaggctcgggaagcttaaggccactcttgaacaggctcaccaggccttggaagaggagaagaagaagacagtggacctgctctgctctattttcccatgcgaagtcgcacagcaactttggcagggccaggttgtgcaggctaaaaagttttccaacgtgacgatgttatttagtgatatcgtgggattcaccgcgatctgcagccaatgttctcccttacaagtaatcactatgcttaatgcgctgtatactcgatttgatcagcaatgtggagaactcgacgtctacaaagtggagaccattggggacgcctattgcgttgctgggggcctgcacaaggaatcagacacacacgctgtgcagattgctctgatggccctgaaaatgatggaactatccgatgaggttatgagccctcacggagaacccattaagatgcgaatcggtcttcatagcggaagtgtttttgccggcgtcgtcggcgtgaagatgccacgctattgtctgtttggaaataacgtgaccctcgcaaataaatttgagtcatgcagtgtgccccgcaagataaatgtctcccctacaacctaccggttattaaaggactgtcccggatttgtgtttacacccagatctagggaggaactcccccctaattttccttcagaaattccaggcatctgtcatttccttgatgcataccagcagggaacaaattctaagccttgtttccagaagaaagacgttgaggacggaaacgcgaactttctcggtaaggccagtggaatagattag
